United States Patent Application Publication US 2008/0114160 A1 - sequence listing, part 33

SEQ ID NO: 8801 - DNA, 18662 bp, Oryza sativa
  unsure (1)..(18662): unsure at all n locations
cgctcccccggtcacaccggagaaagaaggggagggagggggggtttggaaattttnaaacccaacaaantnnntnnngggtggtggtggtgcgcgtgtcncggggggttgaagaggacggcgtttgcgtttcgtttctctctctctctctccgtggcggttttgcggatcgccccctccgaggacgcgtgcctctctttgttgcagtttcttctcttatttttattcccttttcctttggcagttttttttttaaagaaaaaagagggcggctacaaaacgggatcccgttgcaacaggataggcatattaactattctcttgcacgagtatcacgagtaccaggtcctaggtatcacaggtatcgggtatcatgcagctggtaccacaacaggtatcaagtactgtctcatagaagggtatcccgttccaacggaataccgttgtctaggttttctgtttttttttttgggaaacacggtataacgtattcaatctatccccgaataacccaacctgagtgtaggtgtgacataaggacacctccagcgcgcagctaaaaggaggcgcttataagaaaaaccggggttttttttattaccacataggatcaatgagacgcttagcgcaggaagccgctgcttcgtgcggcgccgacgcttgggaggtgtttgcacgggtgctacagatggaacctattatttcaggcatcagtccaactccctagcattggaccatcaggctcttgagtgaagtgcttagtttaatcatatttttaagcacctccttaagcatgtacttagcgttggaggtgccctaataacctagtataataaatccgaacaaaggatcgttcattgaggttcttttaggatagaggaagtagaaacacagacactcaccccaataatttatattcgcctgagcatcttcgagagactggattgatatattttaagattgattattatttttagttgttattatccatgttacacttactcgctatactgaccagcgtgtgaattttaactcaaatgtatgtatgctattggattatgggttaaagaagatgatgtttggaatttgggtgcagtaggtcctgtgaaactttggcttcagtaaaactggggtgactaatgactatcgaagtgtgttttttactctctcttttcaacttatattccctcgttgtagatgtgcacgctttctaaataggtgctaaatagtgtggctttagaaaatcgtatcaatacatttttaagttttgtattaaatacttaattaatcatgctccgttttgcatgttgaaggaaaatggttcccaatccttagcttcaaacacaattgttgtgtacaaaatttgcatcctctaaatcaccacaagccatatgcatgctgatctatgtatacgtgatctcatgccttgtataagacctaaaatacgtacgcacaaaatatgttttgaaaatatctttattggggctagtcgaataacttcaggagtaaaaattatcaagtttgtcactaggaaatttaaggaacatccttaaggtttatgatctcacaaataatgccaccttaaatagaatgttttaggctcattgaaggaatctcatgaaatgcgtacggaactatagtttgcagggttgctggatgaatagacaccctcttactagacggctaatgagtgggcccaatgtatcatgcgttcattagctcatcatgtacaaggttataatgaccttttaataggcgtgtgaaaccaattttataacggagaatgaatgctattgtgataaggcgattaaacagtatccacaattagtgcttaaactttaggaaaaagaatatttatcatgtaagcgtatctatgtcaaaggagtaacacgcttatggcttttcaagtaggttttgatgaaccccatggcgtgttgatccacttaaaagctcaatttgtatggtgtagtctcaactttcctgtttccttagctcttgtactatatgcttattggtaagctaaagttgttgtgctatggtgaggtgtttgctttaggcagtggtggtcatcactcccctaaagtctcctttaacaagtggctttgcaaagggaatacttgactgagaaagactcaaggcaaacggtttttacttcctttttctttctttcaggcacaaaactacacaatgagacaaacgaggaggaaaccaacaaatattctcagccttttctttttcaaggaatgaaatggcgatgaatgtgcgtgtttaccgaggttctaaacgatgtattttttttaaaaaaaaactttgtatatacaaatttcttatagaattgttttaaatctatatttttttaattatatgatacttaattgattcatttataccctcgaataatgatcacaaaccttgcattcagctattcagcataaaaattaaagaacaaaacatactcaagttctgaacttaagatgctataatacaatgttgagatctttttcgcctagttctatactacaagctagccaattcttgttcttgcttcacgaagaagggggtctactgaagtcaatgaagtatatattacattcatactactcatgaaagttgatgacaggacacacaaggatgaaaacacacaaaatacatgctgagttagcatatcatcatttcctcactctgtactgctggcagatgagtcagtgccaaaacgatggcactgggaattggatgttgtgtaggggcacatcagctttgatccctctcttttgttggaaaaaaaggcaactttaattagggtaaaacgcttggctttcttcttaactaggttagcctctatggtgctcttgctttcagcctttcaggggtgagtaatcaagcacaagaagatccacagcaattggcagcatctctgaaagattgggatcatccgagtgtcatggcatacatgcttttttagacttgccgtagttgcaccaacagtagatgataattctccttaactctttaaaagatggcaatatcaaaaagaaaaaaaaatactacgggttaccataaaaggaatcatacatgtacaatatcatttaacaaaagtaaaatctcatgactgtatttagttgtggtatctagaaagaattgtcaaaagagatacattgtcatctgatccatcctcttattcttgtcatcgaagtttgctctgtttatatatcgtgaataatacacacatcattttttccgctcgtgaatggcatagctttggagctaagaattttttgttaaagctaggatatggatatggatattttaatgacttgctaaaggtccatgtattgcaacggataagcaatataatatagttagttattaggcatataacatcaaagcaaaagcattcatgtgtggagatcttatggccccacacattagcttgtgacgttggagacggattcggacgccaccactaacatcatttaaagtagtatagattgtttctatttttaaaaaaaatacacaaaaatttaaccactgcaattcaatttataaactttgaatccaacgtaaatctaaaatcgatctaaggttgtgctaaacagaccttagacacgatttttttttctcattgcacatcaaattaaaaaaataaataggaacaaaagggataattagagggctaaaacgaaattctccaccctttcacacattcccctccccagtgatcagtcgcaaaaccctagttggcaggttgctttgactgcgaccattgcaccttaggctgactggtaccacgaagctttctgcaaaaaacggagggcccagagacgacggagacatgatcacgttggaatcagcatggggtgcacaagaatttcatacctttatgtcaatccgggacccacccaagacaaggatctaggatctgctgaagttatggtgaaagatatagtcatcatcacatgaaaacgatgcattatattagcgggaataaactcattattcctgggttattcacagtacttcactagatcacgttgttttgaagtattatattgatatagtctttatttgaagtacaactttgaccacaaaggattctttgaaatgcatgaattttacaggatttttataagcaaaggtccttaaagaatccctcattacaaagtaggcctaaatcctaattcatgcaataacatatttatatttataaattccagttaacgctgtaattacataaatatacttttcaatacaaacctaccattagccttttgtgtatctaacataaataatttaaaaaactatagcaacatttaaaattttgaaagtttgagttgtgtttgatagttttagtgtgggagaaacgaggatatcctcaaaaccatttcttgtatagtttaagtttacctttgaaacgcacaaatccaaatacacatgaatagaaaaaacataggtatcaacaagagtcctctaaattgcaggaattgttgaaacgtgtttgttttgatgctttataggaaaagtataggatttaggatatgagagagatatgaagaatgtttcccatgaggtccaacatcacattagaaatcctcccaaattttcataaattaagctattccaaattaagctattccaaaggaattttgtaggaatttcaaatggtaattcccttgttccaagggagtatcggaaaattttccatgggatttcaattctaattctaaaaagaacatgtatttttcctttgttccgaagcagccctaaacaatttaaatatcgttgttaggggcagtggaagttctggtggaaacatagaaaaaatgcgcataaagctgaaaaataaatactttacttgatatatagaagggataatgagtatagctgtataagttgtctcaatccaggtttctctgccatcctagggagcgttcgttcgagtgagttagcgtgagaaagcacatcgtagtccgcgcgcacgcttcccaaactactaaacggtgcgtttttggtaaaaaaatttctataggaaagttgctttaaaaatcatattaatccatttttgaaatttaaaatagtttatactcaattaatcatgtgctaatggctcacctcgttttgcgtatcttcccaatcttctcaatctcctatccctcaaactcacccttagtctacattatcagtctaaaagaaaaacacattatatgttgtgtacaactttataaaagtgcaacgcctagtattggaattgatttcctaaacctcccctgcttaatctcagtagttttcccgcaaaaaagaaacattaagcttaatattttgtatacctatttgtttattacttcctccgtttcataatgtaagtcattctagcattgcacacattcatatagatgttaatgaatctaaacatatatatgtgtctagattcattaatatctatataaatgtggataatgagtcttacattacgaaacggagggagtatgtcggtgacatgggaccgggagtatcatgacttagagacttgaggcagacacgatcacccacgtggcctaaccccctcggggggggtcgggcccgagggtgatacggccgcccttctctttgtctccccgaggggtcggaccgctcccgtctcggccccgagggtcgaggcgccccgaccccttgtgggttttgcgccgcgtatatggggtaggtgagcatagcggggctcacctaaccacatttattgcggtttggacgagcgcgtcacgccgcatgtaacgcagtgcagcgcgctcgtttatccggtcagtgaccagtcacagaccgatcagatcgtgggttaggtggcgacaggcggtctgacgcacgcctcgccccatcccgtcaggatgagagcctccaagcactcgtccctagccggagccggcgtgttagctcctggagatggcacgttggtcccggtcagatatataccaggcttcatcctaaccattacaagcaagacattgtatgaagaggggcgaacatgcagattgataaactgacgcgtggtggacaagaatgaccgatttgtgaccggtctgacactggtcatgtcgtcagcagacagccatgttcccacgttgcgcctgcttccggcggaagtggaggtaggtatgggccgtcccatcagaaggtcattcggacggcaaccatacaagtctccgtctgtttatgaaaagataggataagtccccccaaaaaagagagagatggtgcatgtggtatccccttgaggtataaaaggaggaccttgcccacttagaggagggattttttttggatgattttagaggggatcgagaacgatcagagagggagagagtaagagctctctggttctccagctcttttgtagcttcttcatacatagatccaccaaaacacaggagtagggtattacgcttctcagcggcccgaacctgtatacatcgcccgtgtcttgtgtgtttccattctcgcgaaccttccacacacaccgagagcttagaatctcacccagggcccccggccgaaccggaaaaggggggcctgcacggtctcccggtgaggagccccacgctccgtcatctggcgcgccaggtagggggttctgcgtgtgttcttctaagctctcgcactctttcgtgtgcgccaagcttttcctgttcagcccaatggctgaacaagcaaaggcgcacaacctctctccgagtgttagcggtgacgaaggggagccgaacccacgccgtcgagctcgtactccaccgccccctccacgccaaagtcctaggcgggaggaggcgctcgagagggtcgaaggatccgcgacttcgacatccacgggtgatggggaagggcggcgagatggggagcgtcgcctcctcgtctacggcgacggcagcatgccccagggcgcgctccaagctgcgggcgcgctcctacgtcacccgcccattgtccctgacccggagtctccagcccaacgttggctggacgacgtggccaacttggtcatgacggcacggcagcgcctaggtgctggtgggcggtcctccgccaccaagacctctggcgctgctaccaccggctccgtgtcgtcaaggcggagggcgcggcgagcggcggcggttgctcgccattcggccgccactccttcgtcaacgcctccgacccaggaagatctgcgtggggggccggatgcccgcatcagtatcgagcgccggcgtaatggccgacgtgctgcccacgcaacggagggcgcctcctcgtccggagtgtcacatcaacacggacgcggggatcagccctccgtgcccccggttggtggtgtcggctgtagagcctttgtggcgagccttcggaacgtccgttggcccccaaggttccggcccaccatcgccgaaaaatatgacgggagcgtcaaccccgccgagtttctccaggtctacacgaccgggatcgaggccgccgggggtgacgacagggtcatggcgaatttctttcccatggccctgaagggacaggcacggggttggctaatgaacatgccacccgcgtccgtccactcttgggaggatttgtgccaacagttcaccatgaactttcaaggcacatatccgcgcccaggtgaagaagcggacttacatgcagtccagcgaagggatgatgagtcacttcgctcatacattcagtggttctgtcaagtccgcaacaccataccatgcatccctgcacacgcggtgatctacgcgttcagggggggtgtgcggcacaaccgcatgctcgaaaagattgcttccaaagagccccagactaccgaggagctttttcagctcgcggaccgagtggctcgtaaggaagaggcatggacctggaacccctccggttcaggtgtggcagcttcggccgcccccggatccgctgctcggacagggcggcgtgacaggaggaggaagaagaggtcagcccattccgacgacgagggtcatgtcctcgccgtcgagggcgcttcgcgggccacccgaaaggggaggcctgcgagcgacaaaaaaaaggaggccggcgctcccagtagggagcgcccaaccggcaagtggtgcatcgtccacaacacctcccttcacgacctcgcggactgccgcgcagtcaaaagtttggctgagcggacgaggaagtgggaggaggagaggaggcaggagcgccgagagggcaagtccccggcggttccttccggcaatcggcgaagtgaggccaagcagaaggcccccgctgaggacatcgatgacggcgatgatgacctaggtttccaagagcctggggccaccattgccactgtcgatgggggagcgtgtgctcacgtttctcgtcggagccccaaggccatgaagcgagagcttctggccgcggcccctactcatgaggcgacgcgccgggcacggtggtcggaggttgccctcaccttcgaccagaccgaccacccaccgtgtgttgcccggggaggacagatcgcaatggtggtttcccccactgtttgcaacgtgaagctggggcgtgtcctcattaatgggggagcagccctcaacatcctttcccccgcagcctttgacgctatcaaggccccggggatggtgctccggccgtcccagtcgattatcggtgtgacgccgggtcacacttggccgctaggtcatatcgacctcccggtcaccttcggtggatccgccaacctccgcacggaacgggtgaactttgatgtggcggacctcagtctgccctacaacgcggtcctagggaggcccgcgttggtgaagttcatggcggcggtccattacgcctacctccagatgaagatgccgggccccggtggccccatctctgtccatggcgacctcaaagtcgcgcttgcttgtatggagcagcgcgcggaccacctcaccgccgcgtccaagcccgagggaggcgacgagaggcttggcacctccgcccccgccgccccgaggcagcggatagtcacatgcgacgaggtcccggtcaaggaggttgccctgggcgacggcccgtccaagaccacacggatcggtggtcttctggacggcaaataggaagacgcgctcgtctctttcctgcgggcaaacgctgacgtcttcgcatggagaccggcggatatgcccggggtccccagggaggtgattgagcaccgtctcgccgtgcggtcgggcgcaaggccggtccggcagaaagtacggcggcaggccccggaacgtcaagccttcatccgcgaggaggtggcgcgacttctggaggccagattcatccgcgaggtcatccatccggagtggctggcgaacccagtggtcgttcccaaggcgaacggcaagcttcggatgtgcatcgactacaccgaccttaacaaggcatgtcctaaggacccttaccccctgcctcgcatagatcagattgtcgactccacagcggggtgcgaccttttgtgttttctagatgcatactctggttaccatcagattcgcatggctagggaggatgaggaaaaaactgcattcattacccccataggaacttattgttatacgacaatgcccttcgggttaaagaatgcaggtcctacttttcaacgcattactcgaatttctttgggtagccaaataggacgtaatgttgaggcttatgtcgatgacttggttgtaaagatgcgcaaccaagagaccttactctcggatctagcggaaacttttgagagtctccgctccgcccgcataaaattgaaccccgataagtgcgtgttcggtgtacctgcgggcaagcttctcgggtttttggtctctgcccgaggcatcgaggccaaccccgagaagatacgagctatagagcggatgcgcccccccagcaagcttagggatgtgcaatgcgtcaccggttgcatggccgccctaagtcggttcatatcgaggctgggagagaaggcgctacccttatttaagctcctcaaacgctccgggccgtttacttggacggaggaagctgaacgtgccctcactcagttgaaggcgtatctcagctctcccccagttctggtcgccccggagccaaatgaacccttgctactctacttagcggcgaccccgcaagtggttagtgcggcgttggttgtggagcgcgatgaggacaatcctcattccgcgcacccccaccctgtgctggcttggcccgggagagagcagggaggagaggcccccgagccgaacggtggcccaaggcccccgacgaccggagcaggccctctgcccgcttgtcagacggtgccaggtgcccccgacccccaggatggcccgagggccactgcgggaaggccgcacctatcgccctctgaccccgaggctaaccctgtgccgactcgacccgggagagagcagggagaagaggcccccgagccgaacggtggcctaaggcccctgacgaccggaattggccctttgcccgcttgtccgacgacgccaggagcccccgacccccaggacggccccgaggccactgtgggaaggccgcccctgtcgtcctccgaccccgaggtcgtcggcacagaagacgagtgcgccccgcgaggccgcttggacaaagagcgccccagggatgtggcccctagcgaagaggatcggccccaccgaaaggtgcagcggcccgtctactttgttagtgaggccctccgggacgccaagacccgataccctcaagcccagaagatgctttacgctattctgatggcttcgaggaaactgcgccattatttccatacgcatcgggtcacggtggttacgtcttaccccctcggccaaatcttgcataatcgagagggtactggacgggtggtgaaatgggcaatcgaactttgtgagtttgatttgcactttgaaccacgccacgctatcaagagccaggccctcgccgattttgtggcagagtggaccccagctcccgagcccgtctcagtccccgaggccagctcgggcccctcgcagctgcctcacaccgcccattgggtgatgcagttcgacggctccctgtctcttcagggcgccggtgcgggggtcacgttgacctcgccgagcggagacgtcctcagatatttggttcgccttgactttcgggcgaccaataacatggcagagtacgagggactccttgcgggactcagggtggcagctggactggggatccgccgcctcctggtgttaggcgactcccagctggtcgttaaccaggtctgtaaggagtaccggtgctctgacccgcagatggacgcttacgtgcgccaagtacggcgtatggagcgccattttgacgggatagagcttcggcacgtgcccagacgggataacacggttgccgacgaactctcacggctcgcttcctcgcgagcccagaccccaccgggcacctttgaagaaaggcttgcccagccgtcggcgcgacccgaccccttagaggagacggacgcgcctgacaggcccccgaggcccgtcggagtccaggcctcgggacccgaggggagcgctcccagctcccttagattgattgcttggatcgctgagatccaagcatacctcacagataagactctacccgaggaccgcgaagggagtgaacgcgtccagcgcatctccaaacgctacgtgctggtagaagggaccctctatcggcgcgcggctaacggaatcctcctgaagtgcattcctcgggaacaaggcgtcgagcttcttgccgatatccatgaaggcgaatgcggagcccactccgcctcgcgcaccttggttggcaaagcctttcgtcaaggtttctattggccaacagctctcaatgatgcggtcgacctggtccggcaatgcagagcgtgtcaattccacgccaagcaaatccatcagccggcccaggccctgcagatcataccactttcgtggccatttgctgtctgggggctcgatatcctgggaccatttaggcgggccccgggcgggtttgagtatctgtatgtcgcgatcgacaagttcactaagtggcccgaggcttatccggtcgtcaagatcgataagcactccgcacttaaattcattaagggcatcacagcccggtttggagtgcctaaccgtattattacggataacggcacccaattcactagtgaacttttcggcgattactgcgaagacatgggcatcaagctctgcttcgcctcacttgcccaccccagaagcaacggccaagtagagcgcgccaatgcggaaatcctcagaggccttaaaaccaagaccttcaacatcctcaagaagcacgacgattcgtggatcgaggagttgccagcggtgctctgggcgaaccgaaccacgccaagccgagcaaccagggaaacgcctttcttcctcgtctacggcgcggaagcggttctcccatccgagctcaccctgaggtcccctcgggccaccatgtactgcgaggctgatcaagatcagcttcgcagagatgacctcgactacttggaagagcgaaggcggcgcgcggccctccgagccgcgcgctaccagcagagcctgcggcgctaccatcagcgccacgtccgggcccgatcactctgcgtcgacgacctcgtcctacgccgcgtccaaacacgtgctggattgggcaagctctcaccaatgtgggagggtccgtatcgagtgatcggcgtcccccggccgggctccgttcggctggccacgggcgacggcacagagctgcctaacccatggaacatcgaacaccttcgtcgcttctacccctaaagggtgatcgggtgtcaggtttcgggctcgggccaaccccgcacccccctcgggcgtgcagggttggccgggggctaccacatatgcatattcttatttctcttatatctgtatttcaataaaagcattttcgatttcctaaaggctgtatctgtgctgttgtttccttttgaaggatcttgacttgaaataggtcactcgtgttcaatcctgccctcgggggctcgggtcggctaaaatcgccaaacggggcccagaaccgagccgtgccctggggcgtggtgaactccggggggggggaatcggcaaaaacccacaatcgggtcacccataaccctcggtcaccacgctcccggcctggccagtctcgacatgtggatctccccaggcactagccccgacccgagccatttgaggactaggacctgggcacgagcccttgttcaagccaagacacaaaaggaccgcggcacaggcatcctcgtctcatacacacaacaaatagaattgacacaaaaaatttcctctttatttgattgcagattaaattagtctatacaagaagggggcccggaggcctcggaagaagaaaagaagaaactatttaaagattggcgggggcctgggggctcactccgatgcacccgggtcgccagcctcgtcgccactgtcgcccactccgccgtcatcatcctcctcgtcggagttgagggcgaacgcgagccgaggggccgaaccctcgaagctgtggacgatatggtcggcggcgtcccggacctgcgcgcgcgcgccatcctcggtcccgggagggaactcgtccagcgccgtccatggggagaagtcgggatccctggcttggtaactcgccagtacgagctccaccgctcctcgggcgaggtccctcgaggatgacttaatcgtcctctcgagctcctcggggagccgttggagagtcccggctatctccgagaggcgctgggcgaggcccccctggttggcggcgtacttcgcagtccgcccgccccagaggcccgcctgccggccggcgtggtctagacgggagacggcgtcccgaagcatgccgggccctacctcgcctgccaagcggagggcctcgacctccccggcggacgagtctagcgcgccctgcaaatcggcgatggtgtgttcggcagctgcgaggcgggcggttaagtcgctgtcgcccgtggccgccccgccgctacgcgcccttgcatccagctcccttgcctgcgcctcgagttcagcggcccgctggttcagtgcggccctctcggcgcgggcactttccagattgcgacgcgcttgttcctcttgcgcagcctcgcggagggacaggctgtccgccagccgttgcgccgcggcctcggcctcctcgagagctcgctcccgctcggtgagcgcgtcctcgcggaggcggagcgcggactcttcttcagcacaggcagcttcgtgcaccgccagtgtgacctcccgaatagcaacggcgacctcgcgatccgccaggtccctctccacggcgcaggcacgctcttccagcgccatggcacgggcctcaagggcttcttcgcgccgccgggatgccacctcggtctccgccgcccgccgttctcgggcagcggcagcgtcaaggacccctcgggcggcgtcgagttttttccctagctccgcctcccagctcccgtattgaaggcggagggtgtcctgcgcctcgttcatcacggtggtggcgatgaggacagccccccgctcctcctccacctccttggcgatctcccccagcaccttccgacgggcttcgagctctgagacgtgccggcggtgtgccttgcggcccacctccaccatggcctccaccgagcgtcgcccctcttcgacacgcgcccatgcggcgtcgagctccgcccgctctgcttgcagggcctccacctgggcacttaacccgtccaacaccgtggtgtttgcgacggccaaagcctgcagaaggggttctgcgctcagtggagcaacggaaggcgtggggaagagccgcctcgaagaggatgccgcgcggcttggcccgccgatggacgtgccggactcggggatgtcccccggacctggtttgtcctgagcgtcgcacgagggagtgggcccaagcgatgcgcccgcggcctcgtcacgagttgcctcggaagtcgtcgtcgcctcggcctggcgaagtctggcctcctcccgagcggcttcttcagcttggcgagctcggacggccacctgggcaacttcctcggcttctcgaaggcgatccacggcctcttgccggtcagtttcacgggtcgcctcggaggatgtcgtcgcctcggcctggcggagtccggcctcctcccgagcggcttcctcggtctggcgagcccgggcggcctcccgagcggcctcctcggcttcccgaaggcgatccgcagcttctcgccggtcagattcccgcctccgggcctctgtggtcgccgggtcctcggcctcagactggccggacttggaatggcgggagggacgcgacgggatctcgctgaaacagaagaaagaccagaagacaaacaagatggatgagtgaaaactcgcgttgagagaatgaatacggccacgatgggagtgggacgaacctgcgagggggtcggttaaacgaccaccttggaggggaaatgaggtttccacgggatggttctgtcccccccatcttgcggagccgtttcttcttccgctccccctcgggctgcgacgtcggcatggccccctccgggcgcctgctgctggcacgcgccgccccgccccctcggggaggagatgggggaggggttccttcctgcttcctcttcccccgggcgtcggcagggcggccgctccccgggcccccgtcgcggggcccagaagcacgaccccctcccggggtagattgttcccccctgcggctcccgcccgcgccatcgtggcctcgaggagcccgctcctccgacgccccgaccgcctgcatgatggtcaggatggaggcgcggtctggatcgctgcagagggggaggactccttgaggaatgagggatgcctccacggagctgagattcagcacccgttggaccactatcttgaagtcctcaggagcccagtcccatctgaccccctggtgggtcctcatacagtcctcggacccggtgtactcccaggcgccccgggcgcgccgctggagtggcgcgatccggcgacgaagatagtcgccaaacaccatggcccctgtgagcccctgggatcgcaggcccgccaggcggtcgaggacggcgtcgtagccatctcccagatctaccggcgcccgccagttggaggcctgcgctggaggctggctcgaaagtcggaggcgcgcttcgtcggcgaggggggtgtagaaccagtcgctcttccagtcatcccacttcttgcggaggacgcagggaatgtagcggttcagcaccggcccccgcggctggaagtagcaaccaccaaccaccgacggcggcgacaccggctgtacggtgaagaaccaccggaacagccgaagggatgggcgcaccccgatgaacatctcgcacaggtgcgcgaagatggccaatgtcattaccgcgttgggggtgaggtgcgccatctggagatcgtaaaactccagaacatccatgaagaaagaagaaaatggcggaaccagccctgccatagcaaaagggaggaagaagacggaccgccccgggtagcgtggcgccgggcatccctcgcccagcgagactatctcccggccggtggcagattccggcatgaagcggcgcggcagcccggcctgtctctcgctcacgatgcgggaaggcagcagcacgctaccgtcaagcggagtggagccccgtgccatgatgccggaagaagagatgtttgagagcgagcgcgtgtggcgaaggtagggcacaggaaacaaggagttagggcgcaagcggcgaagacaaggggaataatggcgagaggaaggaagcaaatctcttcctcggcgactttatacccttgccaacgctgtgcccggctcctcgtttctcgcgcccactatcttgccccctcgtttctcgcgcccacgcttccactaatcccattcgcccgtttgcggtgcatgaggtggatatgcggctgtggcagtcgagatggaacatctcgtgcgcgcgttaattacgctcgccgaccgaagcgccatcaccatatctctaggaaaaacgaaccggcttgtcccgatttttggaccggccccacctgtcaccaggccttaggaagtggcgtcacgcccgaccgcttccctcgaggagggcgatcgccctggcataacgccgggggctactgtcggtgacatgggaccgggagtatcatgacttagagacttgaggcagacacgatcacccacgtggcctaaccccctcggggggggtcgggcccgagggtgatacggccgcccttctctttgtctccccgaggggtcggaccgctcccgtctcggccccgagggtcgaggcgccccgaccccttgtgggttttgcgccgcgtatatggggtaggtgagcatagcggggctcacctaaccacatttattgcggtttggacgagcgcgtcacgccgcatgtaacgcagtgcagcgcgctcgtttatccggtcagtgaccagtcacagaccgatcagatcgtgggttaggtggcgacaggcggtctgacgcacgcctcgccccatcccgtcaggatgagagcctccaagcactcgtccctagccggagccggcgtgttagctcctggagatggcacgttggtcccggtcagatatataccaggcttcatcctaaccattacaagcaagacattgtatgaagaggggcgaacatgcagattgataaactgacgcgtggtggacaagaatgaccgatttgtgaccggtctgacactggtcatgtcgtcagcagacagccatgttcccacgtcgcgcctgcttccggcggaagtggaggtaggtatgggccgtcccatcagaaggtcattcggacggcaaccatacaagtctccgtctgtttatgaaaagataggataagtccccacaaaaaagagagagatggtgcatgtggtatccccttgaggtataaaaggaggaccttgcccacttagaggagggattttttttggatgattttagaggggatcgagaacgatcagagagggagagagtaagagctctctggttctccagctcttttgtagcttcttcatacatagatccaccaaaacacaggagtagggtattacgcttctcagcggcccgaacctgtatacatcgcccgtgtcttgtgtgtttccattctcgcgaaccttccacacacaccgagagcttagaatctcacccagggcccccggccgaaccggcaaaggggggcctgcacggtctcccggtgaggagccccacgctccgtcagatggcgcgccaaaccatgtcaatttatcgtatcctcagtttagttactagtncagctttcacatcctangtacaccgaacaatttagtcngtggtacctaccatcaatgatcaggnccacttgtaatcagatgaattgatgctgcnatcataccangattagcaatatactagcacggccgagattcccttttctcangcctcagacacaaggcatgcacgacgggacgtggtttcaccccctcgntttagtcctttttttcgacgcggattnacaacgggaanggctcagtggatcactataaaccatagccgtgt

SEQ ID NO: 8802 - DNA, 632 bp, Oryza sativa
  unsure (1)..(632): unsure at all n locations
catactctggttaccatcagattcgcatggctagggaggatgaggaaaaanctgcattcattacccccatagaaacttattgttatacgacaatgcccttcgggttaaaaaatgcaggtcctacttttcaacgcattactcgaatttctttgggtagccaaataggacgtaatgttgaggcttatgtcgatgacttggttgtaaagatgcgcaaccaagagaccttactctcggatctagcggaaacttttgagagtctccgctccgcccgcataaaattgaaccccgataagtgcgtgttcggtgtacctgcgggcaagcttctcgggtttttggtctctgcccgaggcatcgaggccaaccccgagaagatacgagctatagagcggatgcgcccccccagcaagcttagggatgtgcaatgcgtcaccggttgcatggccgccctaagtcggttcatatcgaggctgggagagaaggcgctacccttatttaagctcctcaaacgctccgggccgtttacttggacggaggaagctgaacgtgccctcactcagttgaaggcgtatctcagctctcccccagttctggtcgccccggagccaaatgaacccttgctactctacttagcg

SEQ ID NO: 8803 - DNA, 13438 bp, Oryza sativa
ggaaggtaagctcaggcgggcatttctacaatttaaatcggtagccgcccgccgcgtcctccccctccgccgccgccgccgcggcgggcgactgccaccgcctcccgccgtccatcatcgccgatccctcctcgccggtgctcggctcgatctctccccgtcgctcgctgggcttttgggctgtgcgtgcggcgcctcgggtttgggttttgcgggggagcctgtgaatatgattggtatagttggcctaaaaggcccgcagcccgatggccctgcccacggcatagagatttggcccgacctaagcacggcacggcctacaccctccatcccaaataaagataaaccctgatgtccagattcatagccagagtttgtccttttttaggacggagggagtaactgttatcaggtccgtgctggctcagcctgactgttaggctgtgtctaggttcagtgcttagcacgacgtgctggtccggcacggtttggtccaacaattaggttggcaaaatagagttattttaaggagattatggtgggcttgtcgccggcacggcccaacgtgtcggtcgggttgtgccgacccgactaatcttactccccatctcaaaacacagaaacttaggattgaacgtatattttagtattgaatgttttctaggcttttcatattcgtattatattgtatttggctatttctttagcttgggaaaagtggagtacaaaagtattattggttcggctcagagtttactacaatggaaaactttatgcaccaacttgatttgatttgtcgatccgtatcaaactttatacacaaattacataattcgtgaagttactcgtgtgaccacagtgcatctctactaactaaaattagcctattattttgcaccctttattttcagctatgaaaattgacctctcctcattacaattcaaacttcagccaataggattgtaggaagctcttgtttgaggattcaaataaacttctactagagaattaatgtagaatctcaacggtacgtaattcctatgcttctcaagcaagaaataggaaaatgttttgtatcggcaatgtagtgctctgaggcccaaaaaaaggggggggtaaatgttgttgaagtaggaatgtgatgcctttgtgaggaccataagtggagcatggaactaaagggataggttaagaaagtgaggaaaaaatgcaaaaaaaaaacacctcttaagttatttgaactttgacatttcaccttataagttattttgttgcaaatgtttaccttctaattagtttttttttttgcaaaaaccaccataatgtgcacatgcttaaccaaatcaacatattttcatacattgtaagtcgtaatgtggtatttatcaaaattaaatacttctaggagtatagtcttccacttttcttggagatttcacaaatagaattgttgataagagtgtaaacatcatcgcactgagttttgctatatgtgaaaaaaatcaatgaaacataaaaataaatataatgcaagcacttaacaagattgacttggctaacttatcatgtggtggctctacatcagcgataatgggataatttggttaagcggcacttactcctgctagatatacctgactcccctatacaaaattattgatttccacaatctagttccttaatgtctacaataatctaagtagcctagtagagatcgaagccatgtgcactaccactctttgtcacagcctccctcacgctattgtatagtcctttcctcctcctatggctttgccaaaggtgagagaggagggccatgtttcttagtagtctctatttttagggttttcttaatgttgtctttagaggattagatgaatccgatttattttaggtttcttacatgatattcatgtagacttgtttagagttgtttgctttttttctctttctctctttgctagtagctacccttcctaaggtcattggtggaaagcctagaaaggattgtctgtcatgttgatgatcaaatcgattgtgccaactttaggatccgggttgtcaacttgtttggtgacattggttttttgttttgtctaaagaagagaaatggtggtagatacccgttcatctaattttgtgtgtgttagctgtggttgcgctcgtttgcacttatctcctttgacattcgaagatgcaaagtctctctattctacccgtagtaataggatgcatctcatccgatcttaggtttttatattttgggatagatataatatttaagataagatatgtttcttgaaaccgaaactctaaaatcatccccattagcataaagctgcttcatcatcatactcattcattcccacacatgactaaatagttgaagtcttcccttatttagctcctatcacatttgttttagttaatgtgttcttacttgtgcattacgcacgttattaatgcacttggtttgtgcctatctcatcttaacaagatgtcaccatcacggagaattagggcaagtactataagcctctgatcactaattctaatatgccatgtagactcatatgatgatatagaggggagaagagaagagagagagagagagagagaggagcagccgccactcatgcaagaggcaacctccgcacaaatttcaagaaatgagaaagaaagagagaagtggattggtagcaagtgtattgggtgtagtgtaagtagatgcaatctattgtatgtattacctataaattaatgtgtggatgatttggacaaaattagatgtgaccacttcctccattataaaacttgcccttatgctcaggaaattaattttgataggtactacatgaagtattatcaccaagaagtattaaattaaaaacatgagtataaagtccaaatgttgatagaagcacaattaaaatcactttagttgattattgccagtttcgttctagccaagaaagtcgagactttcattaaatttttaccctaaaagtctataaaattatatatatgcctactatcattcacctctttttttcaattatgaaaattgacccctcctagatctaattaaataggagtggacgttcggtcaggaccgaaagttcggtccgatttgtttaatattttaaaagttcggtctttcaaatctacaaaccgaatttatgtgaccggaggttcggttaaccaaaacttcccaatccgttgtttctatataatttaacatatatttattcatgtattccatagcaaaaggcacagtattgcggggctgtctggttcccagccattacttgccaataaaaattgccacacgttgtctaaggtgaggtgatcaaattcttagtcataacttactaagccacacttttttgagtcgttgacatgtgggacccaatttattagaagggaattttgtcacaactgtggctacaaacaaacacctattaaatttgcctaaccttaggtgtgacaagctgtggcaaagtgtggtttgcaaccaaacacaccctatctacaactcatactcattacacatgttttactcaatggaaggatggattaatgtgacatgtttcttgagctcctagacggtatgatttttgaaaaaaaaacttttgatatttgattttatttaaaaaatattttagttcattcgtttgtatcgttaaatagtcatcacgaaattattcaaaaaaaatataactttagtgattgctgacatgtgcattgcgtatgctatttatgcacttggtgagcgcctatcaactttctatccttttcttggtccttataagatgttgctatcactaagaatcatgatcaggaaattaaactacatgaatgctacatgaagaagtactagtaccaggaagttaaagaaaaaacgtgaatataaaatcaaaactcttatagatgtacaattgaaatcactttagctgattaatgccagtttctttctagccaaataaaaagtcaaaaattccattaatttttcaatctaaaagtctgtaaaacattactaaccgatgtaacccgtaggccgtatatcacgtcgtaccgtattgcccattactattaataaaaacgattatctaataatgtgatttagtaagataagtaacactccgtattaacaaaagacaaatctgacgagcagacaaatcatattgctaattgctgaatcaagagaaaaaaatataccaggtatgaaaatagtgaaaataaaccaaaagcagatacttagtttcgattttgatatatagttgtcgataaatttcctccaaaaaaattatcaaatgtaaatacaatagaattataatgtaattttattgcaactacaatgcaacttgtatgtaactttaacataattttaaaattttagatttacttcaagatttgtgcaagtttggaaaaaaatcataacgcgcacacaagtgatgagattcggtctcgcgacctccatttcacgaaaatagcgtgttattgtgattttttttaagttgtatacaaattagttatatgcaaattctagcgtagttacactctgcttgtactatatttacatctatcacattaatttgataaagaaaattatcgataaatgtatagctatttccctgtggttttgatccatggttttcgtagaagaaataaccacaaaagcttacgaattcgaaagcaaaccaccaccaccaccccggaaacttagacacacacacgctccctgtcccccctcctccccactcccttaatggccacctcctccaccgccgcgcgctcccctggcggcgaggtaaaaccagccacctttactaaccgaatcaattagagaaccgtatcaaatttcaacatcgacataattctcaacagagttgttaatagtgaaatttagtaagcccggagtaatcatcggcttagagttaacatcggcttcgaagtcctgagattagccgatgagagttatcaagtcgtcagttgtcggattcttgctatattcggttaaggaaattaatctactaaaggaagcttatccaaaaaagaccgagttcaaagagaatgcggcatggcaagttatctattaattaggaatagtttgttagtttcctttttatctttaggaaagtgtgttcagtgtcctataaggactttatgttttccttttatctttaggaaagtttctttattgtcctacaaggactagtatctacccatgggtataaatatgtacacccggggtcattgtaaactaacacacgttcaataacaatctcggcgcatcgccacccttttactttcgttttgttttgacgagttcttgctttcgggttgagcttcatcggtttcgatcttcaacaagaggtaaaacttgttatggcggcttgtgttctcgggattagtgcttccatctttatgacactctaatcttgtttatgtaattcgtcgagttatcatatatcctacataatctctgacaacatcgaaatctaacctacaatcggctaacatctgtcaatagaaggcagccgattaggttaaataccgatgttgacttagattatataggatatccaccactctatgacacatccaacagcttgattgtctagatattgtccttcttttcatacttatagctgcatcagttaagtttgatcttatgagtcgtgattagaatctcaatctctagcatgtttcttggttgccgattagggtagtatcggggtttcagccgatcttacctgatttaactactttttatcctatatacttgattgacatgttaaatctgccatttatgttaagatcttactgtatttaagtatattaggcttttgtttagtatattctacttgctttaatatcttaatatagagtggtatcggagtattagccgatacatgctagatctatctgatcagctatgctatgaacgtatatagtctcattattaatatatatttcgatctaagtgatttatactgtttcggcatggcgaccgatctaacccaatcacttgatttaagtatatatcgatataaggactacatattgttaatatctacagccgactgagtagatttagttctttcttacttattcatgactgccgatcgatgcatatatgacatcggctcaatgataaatgatatgttatcggcacctagccgatcggctatcgtttatggatttaaccacggtttcttgtatttgtttcttgttgattgcaggatcaaatcaactggcactctcatacacccgaaggcgagttttggacctgcactggagttaagcagatctcccaggcctcgtgttttacatcaacaagagtttattgcatttttaatctctaagagcaggtaaaatagcaggctataagccagctgcaaatatattttaaggagataaatgaggagagagaagagcagcgggctacatatttgtagccagctgtagcacggactccaagacgcagtgtgcgtatgacatgtgggaccatgtattaatagtgtagtatgtaaccattgtatgaatgagctattagattggctatagatgaattggagctagtagttggctatactattaaacatttaaacttgctctaagactctgtttagatgagactaaaattttaagtttctatcccatcgaatgtttggacactaattataaatattaaatatagactattaataaaacccatgcataatcatggactaattcacgaaacgaacctattgagcctaattaatccatgattagcctatatgatgctacagtaaacattttctaattatggattaattaggcttaaaaaatttgtcttgcaaattagctttcatttatatgtaattagttttgtaagtagtctatatttaatactttaaattagtgtctagataaagggaccaaagttaagtctctgggtccaaacaccacctaagtaatgctgatacgtgggccaccagtcggcagtcatagtaaaaaaaataaaaaggtggtgtatagtcgagtatctcccctcttccccctggcgtaaaagaaaaatctcccgtctcgtcgtcgcctccgctccttgcgccatctcgcggcgccgatctccttctggcgagccgagcagagcagaccagggcaggggagcggaggggatcctaggtgagcatccacatcctcttcctgattcatctctctccctcccaccgggagtacttctgtctggagtttgctcgcgttctttaatcctagcttctcttctagatctggaagaagctcttctgttaagttctgagcctttaaccttaatacaagtgacagtttgtgtttgttcagttgaatccgcccctgatacatttagtacaaaagaactgttttgcatcatgaactcattgtcttccttccttccaaccagtatgaacgattcggctagaactcactgttgtcgggatgtcaagtgcgagctgtttcctttttgcaactttatttatgtagattaggatgcgtttatgcatgcggaatcttggacatgtctaagcaatttctttactttcacgataggtgttgcagtttcttttctcgtggacggtctaaaggtggtgaagaggctgtacagatcacgatcccgcaagtgaggtttgaggatgatgaactaaagggcttgtccgagctactgcggcaggagatctgataaaaccagtcaagaggcgagtctcagaggtgctaggacgagatggatgaagttgctgagattgctgatgctatgggtacggttggcattgataatggggcaagccggaagttgttgtcgaacgagagtttagaggagcgaggagaagagcatgatgtgcaggctgatggggcgcactcgggtgagagtgaggtgatcaaccccgctgaggaggtgggtggagaagccacctcacagccagaagacgtaaagccgcgtgtttccaaggtaaagagttgacacattttgcagttgctgaggtcttctatgaaggtttttggtgacagttatggtaattttgtgttttgtagggaagccaaagtcattcccctaaggttactaccaaatctcagcgccagagcccacgaagtggagataagagtcaagctaggaaaaacagtcccggttctacttatcccaaggcacccattgcacgagtgtctgacccagatttggttgatagctcttcatgcaatgatggtgctgatattaagaaagtaaaggtcttttccattatgttgtattatatagtgctgaaatgcttagatcctgctatgtgcagtgttaggagacatctttatgcccaataatttaatataacatgaaattgcttttttgatgttttgatccagaaggctgaaaagagcagtttccgtccagttgccagggcgagtcaatcactggaggactcaaagtatgctgtttgtttgttgacagtatttttgtggcttagctgtttctgttttctcaagaaaaaataacttgtttggtgatggtctacatatccaattaagctattctgctttaacccattgattaagaaaaagcagggctttttttttgagtgaaagcgactaagcaagggggccttatgattgttgcatttctgatgttctgccccctcaaattatgccaaaagaattttcttgcttactattctcttatttttgcaaccataagcttttccatcttgtgagacctcagtcagtttaagcttgtttgaatactctttgcttataggcttattttttttgtgaaccattctaccaactaccaattgaagctcatattgatagtgtttcttgcattgacacattcctcatcaaacccagggaaaagaagaaaactcagaaaacatcaaaccaatgttctgtcaaaaatgatgaagaagagccaaactgtgaaaaagtaaagcctcaaagggttggcagcactcctgcgtacggatttgcattcaaatgtgatgagagagctgaaaaaagaagagaggtaaacttgttactagataacatttgcaccgaatttagtctcatacatatggacatcattcctttccttacacattctgcaatcaaatagttctactcaaagcttgaggagaagattcatgcacaggaattggagaaaagcaacatgcaggcgaaatcaaaggttcatacgttatgtctcttttcatggaaatgaacaatcaatcagttgtaatattcaagtcaaccagacattttcataaaatctttgcattgtttgtttctttataccatgcaggaaacagaagaagctgaactcaaaaagctaaggaagagtttgaattttagggcaaatccaatgcccagcttttataaggaaccacctcctcccaaggttgagttgaaaaaggtaattctctcgcttgagatatacatgtaaggaaaggaaaatttaagattatagaccatttacctactgattcacagtaggacctttggcagtcttcttttattttagttacacaatctatacttgctaaaaccagttcctgtgctgcctgtagttatatgtacaagtacacagcaggggcaggcctccaactccaaaatttaactccagctgggtctggagtggagttgtggagcagcctgaaccatgctccacctccctagttcattttcttatagcactccagcccactccgcttccttttggggtgcagctgaaaccagctccagctccaagagaggtagaggtggagctagagctggagctctgccaaacaggccctactttcacacattcacatatagtcatgaatggctctacattgttcaaaattttggctaacttaattactttaggtagccaatttcatggctgtttcctataagtagctagcaagctgttaacttttcatagaggtgatcagttctgttgatcagctgttcaggatattttatttacttgtattattatgtagctgttggcccatctattgctacgaatttgaactcagtcatgtttctttgatgagttaatttttagatggtttctttgatgagtttgttgcaagtttaccatctgcaatttgctgatctttgaaaaagataagtcctttcctgagaaaaagacatccataccaacttaagttaattcttggcttgctcccaccagatggttggttctttgctgagcattggaacttttgcttagcaacatgtcaaatatttatacttactagaaaaaaatgcccgtgcgttgcaacgggtgaaagctcttttaatcttattactgttatatggtttagttaaggtgaaattcactgtgacaattcgcttggatgcattttttttttaaaaaatcatgagctgcggttaggagtctgatcgtctaaaattagcatgcgagttttcttaaagagatttcttatacaactcttcttgggtttccaaaaacgaacgagctttaaaaccgacttaaatacggacatgtatttccaaaaacaaacaaacttaaaaaccggctcatatatggatgacgtaccaaagtaccggtaaaaacatcttcaattttataatagtagagagtagagatttacataatttttttaataagacaaataatcaaatttaatggttaaagtcatctgcctcaaaatatttatgacaagatggagtaatgtatatgtatattatgcaatagaggagaagtgatttaactggctagcgatcacatgtttcctgcatgattgatttgtggggtagcttttgcaagagcaaaaatatcagctagcaaaagcaggtccaattttaatcgtttaaatccaaatatgtgggaccactgcaacgctcggtttctggttgaaagtcggaaccccatccggtatctttgctgcgaccctgctttgggaccgacatgagtcggactctgcactgctcgtgcagcttcacacgtccagggctccaggctatgcttcgcagggacatgtaagaccaatagaattcgaagacagctgacggacggaagattttgaatgatttaatttttataataggtaaaaatatataggtaaagattaggataagatacatctagaaaacataaatggattcggatgacgtaccaaaatcttgacaaaaacatcttcaatttttataatagtagagatgtgcattttctgttcttctgataaatgatacttatttaccgtcattcattgcagatccctaccaccagagctagatcaccaaagcttggccgctcaaagaacacaagctcagtaagcactgaagaaagtaccgttccttcaagccgcccagctcgtctgagcctggatgaaagggcctcccagaatggtgtgaagaaggtgcctgctgcgaacacggtgaggaagccccaacggaagtctctccccaaactgccatcagagcaaacagtcactgaacaggtagaaaacaacacgtcggctacagatcccgttcgggagctgatccgtgcccaagttaccccggatgatcaatttggtggatagaaaagctaccaatttgagccgcccaaagaaacgcgcaagttatgcctcaacttcctatatttcattctctgctatttctgctgtaaaactgctggatatgccactactatgtactaaaattagtcctcatcaccaggagtttcgaagaacgcaagtagcccctgtaatgtttatcttgtcaatttttgttcttgatacaagagaggaggaacctactgttgttatttgtagttggtaacaattgcatatgaccatatcctatttcctaggctagaagaacttattatttccatatgaattaccctgcctttttctctttagcaaataagcaataaactttgtgcattctatcttgttaagttggtgtggaactttggcttaaatgatttctgttctggaagggagatgagagccttgcagttgctgatctagctagaacatacttggctgtggcttatttatttcacaagcgttgctgatacagtgatacacatgtacaagaagtaaacaagatcatcatgtaggctttgcaggctcattttacaagatcgactacaccttagctgcgtggtgctcttctccagattcatttttacaggtggccggattcagctgcgagccacggcgagggtcgccgggccggcgagccggcgacgtcgacgacggccggtgcctcgccggagagaggccgccgtgattcctcctcgggtgttcgttgcttcgtcttctttacaggcggcgagagatcaagagcatctgttcactcaagacgccgctgtgatggaaggaggctgagctgcccccatgaacggcggcggcggctgctcgccgccgtggtcgtcatcgtcttcctcggcgtcccagaggaagccggcgtaggagccgaggacgtagctgcaggagaagcgagacatcatcaagaaggaattgcctgagaaggtggcggcggcgcgtgggctcaccagtcgtcgggggcggcgtggacggcgcgggtgaagtaggcgtcggcgcggtcggcgtcgcgggtggtctcccagacgaggcccgcgtagagcgcgagggcgtcgccgtcgccggggttggcgacgatggcgcgctcgcagtactcctgcgccctcgccgcgtcgccctccacctccttgaggaacctcgcgtagttgccgagcagcagcgggttcgccgggtcggcctggatcatacgccggtagtgcgcgtcggcgtcgcggcggccgccgtcgcccttccccccgctgccgccgccgccgccgttgcacaccttcctcccgccgcctcctcccccgacgccctcctcgacgaccgccgcgtcgccctccctccccctccccgtgtccgcgtccagcccggtgctcgtcagcagccgccgcagcggcacggccgccccgagcacatcctcctcctcctcctcctcttcttcaacctcctcctcgacggagatggacgccgacgaggccacggacagcgcccgcggccgcgcactcaccgccgccatcaggtccccctcggacgtcgcgcggcacagcggcgggccccgctgcctcgccgccgccggcgacacgggcaccaccaccaccaccgccccgacatgctccgccgccgacgcgcacgcggcgtggccgagcagcggcgacgacgcgctccgcagcagcatcgccttcgccccgatctctcgtctcctctcctcttggctttctttgccgcgcgagagaaatatcgcgagcgagtgcgagtgagccactgacagggtggggggcgggggatatttatagggcccgcgcggccgtgggtgattggacgtttgggcgcgcacgtgacggcggccacggtggagggcggggagtgggcgtgatgggggtggggcccacggggtggttgtcgggtgggcccgggaggggga

SEQ ID NO: 8804 - DNA, 14358 bp, Oryza sativa
ctgattaagcataattacataagctaactcctaagaaacatcatcagctctagtcgctgtggctgctaatataagctatgttgttcactattcacttccaagtatgtgcagcagcataaagtagttgtgtatgtacaaaaaggagttgttataaagaacagaagggcatgtcaagtataactgttgtgatataacatgacagttaggaattgtaccagtacgccagcaaagatgtctcaatgatctgatggttatcgcttcatttctgggaaatgaaaattaagagagatgccaccatagcttcaaattctgtcctgaaggcaccgtcttgcacttcaaaaaagtagctacttaaccagtaaaatcatgtatcgtcattatctctacagtcagccatgtcaataaatgatggccgatttgccaaacagctccgtaattcaatcaagggagagatttttcttcattgcttcatacactaggtaggtaatacttgctgcaggcaccactttaagaagatttggtaggattcctttgtagaatccagaaacaccctcatgctgtagcgttctccagaatacatcagacatacctctatatgcagattctgaattggctcgttgagcttgcagtctacaaagatttaaaagtactgttgagaaagagtgtgtgtttgcttcttttctttacaagtcgacaatgcattcttaccttgtcctgataacctgtaaagggtaaacacatgttgcccccaaggctcctgatacagtcccacagcccagttgtactagaggaccaggatctacacaaccatgataaaattcaagaatcaagaaacggagttgaaaagcaaaagggtaggaaacagaaacagtttctgaatggaggctcaccactatccttcaggatatatgtcttggatacgtctttcaatgtctcatatacagcaagatcaattccggcataagggacaataccaagcaaagatggaaccagacctctatagaatgctcgaggaccctcgtgcatcaatatatcccttgacaatgcaccaagactaggtactttaccatccacacatgaataagtctgcagtcgtgttttcactaaatctacgggataaattgctgtttgtgctactgcaccagccaaaccaccagctacaagacgttcagaaggaccaacttcgctcttattttctcctttgctcttcataatatattctttcagcatttcataggcataaaatcttattgcgctttctggagcaactttcacaacattcaatccattccctctaaaaaatgctaacatgccaccctggctccatatatccttaattgaatgcatgactgtagttcgtgtagtctgtacttgcatgatcactttaaggcggtcaagaggtgcagttgcagtacgagatgcagcacctgcaatccctcctgcaatcagatatttacttgcattgaccgacttacttatgccttctggtataacagcctgttcacctatatctacaagacatactctttcccagtgatgataaatattctcaatggttacttcattaggatatagcaaaagaaagtccctccactcttcaaaagtaataattccattgttgtccttgtccacatgctcgacaaaccgtgcaagctcctcatcatcaatctctatacctgcaaacaacaagctgacattgcttgtaagatatattatggatgtgcaaacaataaaatctctaaataacccaactatgaatatatttaagacttcaggcaaagcagaaccaaggaagcaaacaatgtgtatgcttttttaaatttgacagaaggtatatttttggtagaagataccataaattaataaggtatagctaaataatgcaaagtcagattgtgctctcctgcaagctcaacatccataggaaagaaaattatttttggtcatacttgagacaaaaatatgatcacatgaagttaagaacttaagatgatagtgttttcaactctgaatgaagaattgtaatctaatatgaattgctccgtgatatggttgaaattaaaaccatcttaactaaatgttcaatgcaaaaaaaacttcctgaacaaagaccgccctaccacatttaatctttcttctcagccttttgagaaatattctattacaaaaatcatccacgtcaagctttggcatgagaaggtatagctgatataccagttttatcattattagttctcaagtcaagctagtatgttactccgtaccagttcaaaacaaatcataaatataccgcctacctaaattcaccttaaggaattccacttagataatgcattggccagctacaattacctctaaatcgaattcatataccccgtgctaaaatttgaaaaaggaacatggtactcaccatggccatctttcactaattatgcaaggccaaaagtttgggcccaattgattggaagctgcttcagccaccttcttgaagtgattttatcatgtgagaatgcttcgacttcacctgaggcactcaaattcggttgcctatactacgaaagtcttagtatgggaacatagtcttggatctatatgctgtatcaataagggattcagtcttctgaaactaatagagttcgccttgaacagggaataaggaaaataactaaaacgtttgcactcttaaactgcctccagtttttggactctgtgacaatctaatatctaacaagaaactgataagtctttgaggctatatatttgctctcataactatatatcacaagattaacgaagcataaaatccaacattaatcagtcaaaaaatgaggaaccaattcaacttattcagtggaagcaggttattgtaatgaatctaataaaatatggaactcaatatgtggaactgcttaacaagagaggatttaggacaaatgcaacgcatcaataggattggattctatgagcttcaacacttatatatggtagatgaacacctaatatgaaaacctgtgagcggtggcaaatacaaggcttatcctgtttgatgtgatggcaaatacaatgtcttatgttgatcagccctagttccagtgaatctaactacagaataattacattcagcaggcaataatatgcaatactgataggaaaatgatttcagagatccaagttcacattgcactagtgaaacgtgatcccgtaggatcatagtcatgccactactaagtggttaggctcaatccttcctcaaatattgtgggaaaatggacaaaatctagtagcatgttaactgaaaattttcagatgctcccaaggttccactactcaatgtcagtagatgacactgttctaaaactcagccctaggctaggtaccagtgtaccacctaggtgactattgggcgctaggtgcccggtggccgcaccaattaggcattatatggtgctttagtcaaccgaactatccttgagggctcttgtgctcatattttagtgttctattgtcttaacttttatgtgatatgctcactaattgcttggtttcactagtcgcgttggacctaggtactggacatgccgaccatctagtgcctaccgccttattgaatgttccctacaagtaccattaagctccattggtatcagtacattgttcgccgcataaggacttcttcccgtcttcaaacattacaacacacatctacccatcgagtaaaccaaaaccaaaaaaaaggaacaattccaatgtatggctacaaattcaccacgagcatccagcaacaatcaagtaaagtaataatgcgtttgaaaccacatttcgccgaacacgtcagaatacggacagcggagcgacgtgtgacagcacgggaaggaggcgatcaatggctgcggaaggtgagggtgaaggtgaggcgagcgcatacataccagccttgacgagcgcgtcccagagctcctcggggaggatgcagccgttgtgctcgacgtcgatggcctggaagatgcggtagagctcgagctccttgtcgtccatgtaccgcctgaagtcgtcgtacccgacgcggccgtcgcggtcgcggtcgcaggcgcggagcagctcccgcgcgtacttgcactcggcggggatctgcagcgcggcgagcccggcctcgatctgcgcgtagtccagctgcccgcgcccgtccacgtcgaagaaggcgaacatctcccggatccgcgcctccctctccgcctccgtctcgtgcagcgccagcagcacgtgctccatggtcaccgcccccgccttccgcgccggctcgcaccctcccgccgccgccgctgcagccgtcgccgcctccgccttggcgacggggggcggggaggcgccgccccgtgggtccaccgcgtggaccgccgcgccgggcatggcgccggcggcgaggaaggaatgggggtgagggggaggcggcggcggcggcggcgccggtggtggtggtggtgggttgggttggtttggggaatggaatgggaatggaaagaggaggaaaggttggagaaggggaagggaatatacgtggatgtgagaggctgcatacggtatgtatgtatgtatgtatgtatgtatgtatgtatgtatacgtattggaataccgtattttttggggctcatggaatacgggaaaaatccgtatgtgtgggaggggcgcgcggctggatcggtatgggcagccgggtgccgtgcgatgggggacggatggttagatatccacgtggtcacgtggagatcttttctcgaataataaacaatactatttgaaatgaatgaattcttccgcagttccattccaagaagcctggaggtagttttggaaatataaagaaaaaaagacaataaaaacaataatattgcattgacactacaatatttatatcttatatgtttactattttctatataccattattaatcctaaacaacattagacggagtagaaaagattttttttaaaatataatactagcactatgacataatcacatgaaacattttcgataagactttattggcatggttctttttctgactgtgagaaaaaatgaggggttgataaaaattatgctcatgttacatctcgtgtctcgttagacctgtcatggcaccgccacctacatcacttgccattgtccataggacttagctacattggtgtcaccgacacgtcgtgtcacattgaactcgctacccttcactggattgtcttctcctcagtcgctctctaagcatgccatctcccaaacacccttcggaccttcacatcacaaaccctacacgtaaaataccaacccgatagaaccgttgaatagcatcgatagtctaaggtgaacgttttgtatccatagaaagcactcgtcgagacagttcaattgagaggtagaaaagaattagatatttgttggtatgttggtatgttggtatgattcggtagagaagaagcaacctgataaaagaaacaattttagggcccatttgaatcacaggaatgaaaaaacggagaaataggaaaaacataggattctgacaggaatgtaagtgtaaaacagaggattgcaaaacacagaaaaaacataggaatgaccgtttgattggaccacaggaaaaacgtaggaatttgaggagagataaagactcaaaggatttcttccataaggttctacctcttgttaaaattcctccaaaacttatatgggaagaggcattccataggaatttcatatgattccatagggttcattcctttgattcaaagggttttgtaggaaaaattcctataggaataaaatcctctaaaattcctataaatttcctttgaatcaaagggggccttagaaaagaaaatctcatatatttatatttttttcccttgagtgctaagaccacctcctgcatataggtcgggtggatggtccaacctcgtgcgagttgtgaatgctagtagtccccttcgtgtatcttgctggtgtctgaatacatttgatcgagccagcgaagtgcaagtgattctgatttcgagactgatggacagtgatgtatgatggtgtgatcacgagatttgtttctactccctccgtctcataataagtgacgtttttgactttttatttgtaacgtttgactattcgttttatttgaaaaattaatgcaaatataaaaaaagataagtcatatgtaaagtacttttgataataaagcaattgacaaacaaaataaataataattcaattttttttaaataagacaaatgattaaacattgacaaacaaaaactcaaaaagacaagtaatatgggacgcatgtaatagctgctgctaatactacttaaaatacctaccgtcctgtacaaccacctcgtgcttattttcagccccatcgttttgtacgcatgtgagaatgagctgtgatagataggtgcctaattcaagaatcatatctaaggtaggtccaggtactccggttctaatattaaacaaattcctagtacaagtatttcaaatagcaattacaattattttgagctagtatgattgaccaatatcatacttggctgagtctcatattgtaggaaaagttttccacgcacaagaaacgacaaactcattagcacataatttattaagtattaactatagtataaacttaaaaaatagatttatttaatttttttaaataacttatatatagaactttttttttaaaaaacatactatttaacaatttgaaaaacatgataacagaaaagagcagggcctggaaaattttcactctccctgcaaagattacaaataaaccccaaaaatgaaaattcatgatctacatgatgtaggctgagtttttgtttagataatggtgtaggcttcagtttattacaaagaaatattttcaacggggaatccatggttaatagtgacctgacgatcctattcatctcgaacgatctttgtagcgtcctgcccaatttgcaccttaaatatttcccctggaatctcaatcatgccaacgtttggcttattttgtttggaggatgtatggacactgagaaatggggaataaatatggaaagggataggcttaatacagaagaaagggaaatgaccaaagactatggcaaaagcaggaaagctgggaagcatcagctggtccaaagcagagcaggtctggctaccattttctccaaaacttccatgttacaactgaaagaccagatcagcaccaaaatttggtgcaacaagcagcatctgagagggtgacactctgacagggaggttcctctgcaacagagctataacatgagaaaagtgcttcttgatcttcagagaatcacacagcagtgagtaataagcattggcatagtcagaggcaacttcaagccttcaagccaagaatatacttgaattccgacaataggtcagggaaattacaatttacaaggataagcacactggcaaaaggtaatagaagtactaaagcttctgacccaatgtgtcacctattgatttacctaactatccaggagtcaagtcaagtctgaacagctaatgagctagtcactctccatttctccagcaaagcatacctataactttcagtgctccccggatggatcttggttcatgcaaaatgctaggaccggctgaaatcttcagactttcagataagctggctaaccaatttcagactacaagcatagcataggggtgatagggtcagagtaatgcgaggtagctttcactgctgaagctgaatgagcaagtcactcttcaacaaagcatacctacaattttcagtactaccaggatgtatcttggttcaggcaaatgctaggaccagctgaaatcttcagaattccagacaagttggccaaccaaattcagactacaagcagtgcatagaaggtgataggctaactgtaatgtgagatagctttcactgctgaaactatcaatctagaaaaagcaccgacctagtgaaagaaaattcaaggtaaacagttcacttagaaatttcaaattctggtcactggccagtgatatagaaatttcaaattctggtcactggccagtgatattaaaaaggtaaacatgcttctgaaacttactgctcctactaccttttcccagaatgtgacgttgttactgtcaagtatagaaatccttgtccatgtattaaaacttggagaaagcagcatggtttgactcaagattacaagtctgctctgtcttgtccaattcaaagattggaaaggagatatacagttcatgcagaaaaaatttctccagacaggcacattgaccatgtgtagctgacaaccaccactcaaagctgtcttgaatcccacaggtaaaacctactctactaaagtacgtaccaagcttttgacacaatgtgccacaacaccaagttgtccaagacttcagtagtatgtatattcaggtcaaatctccaacaaaacatgcctattatttcagtactcccatgaggaaaatcatgattcgtgcaaaagaatagcatcaactgatcaaccaaattttgactagaaataggcgtgacaccctattattgggctggaaattacatatctagaagcaccacccaacagtgcaaggtttccaattatgcagcacaatctgaatcttgctactctatgtggtgagaaagggaggcaggttccccttcgtgccgatcactggagcctgagtgtcagggaagaatttcgctcctgggagctctgtcaccgtgccttccttcgtaacacgtaccgggtaggtcagcaggtgcccaggaaggtcatcgttaagctcatcgctcgcgtagaggtcccagtacttgtcagccatcttgttcaccctctgaacacactccaggctctctgggttcaggaagttgtcatgcagcatgccaaggtgctcataccacaacgacatccggaaaccgtggatttgtcctcttgcaaccaggcccttggtgttcaggtggcatggctggaatgcacccatggcgatctcggagtctctgcccccatccatggacctctggttgatgttggcagatccaacaatgatgtactcgtcgtcaactgaaacaaaccaaggatattaagttccaacaaatttatctttatcaacatgaagcatgtcatcaaagcacaggtactgaaataagagccagtgacaatatattgtctatcttacaacaaggaatgaagtaattgcgtatgttgcctagtgacaaggaaattgaactgtgatgtaaaagtctttcctaacatgtgggtgtcgaaattggggcaagtagttatgagtgtataaacataaaatgggacattggagatccataagaggtgctgcgattctgatttgtgaattcttaaagatgttaaacaatgcaaaaaagatcatgtgtcagctgcaatctggagtaaatttagagaacttgtgacaataatgtttttaagcatacctatcatcatcttggagtgaacatagatcatgaaccggcgtgccttctgtgccttagcatagtctgtgccatccaaagggcgacctgcaggttcatactcaccattcaactttacttccctgttccctaagcagaagaaggtaaggtaatccctcgggtcagcattgatcctcttcgcctcaagtgcaacggcaatatcatagtacatcatctccattgtcctcctctgccaatccagtattgcctgcactgatccactagcaggaggtccttcaggccacattggcagcacaacatagactgcaaaacgctcaccagcttcaatcttgttcacaatcttcagagaaatctctctgggaatcagatgcaacgcctcaatgtcttctggtctgatgccatcggctttccatgcaaatgagctgccaaggaagtactgattctcgatgtagatgaagttcttggcgcggcgaattgcgtggatgtatgcatcttggatgctcctgtcaatggtgttgttcttgccactgacaaggcctgatcttgcagcagcctctggagtgctagggaagccaaagcaggcgccgccatcgatggaccggaacaactgaacactccaggcctcaccgtcatcggggaacatcaccggagacggcggaataatgaggtcggccatggctttgaggtctaggaggaggtccttgtcaccgccttgcttcctccaccgctgctcgaagttgtagagcacatcccaagccgcggggccttcgatcttggagtggatgtcgtgccatggctccctcggcccgcccttggtgacggccgcgccgtcgaggttgggctggtggaagtcgctgtggtgcgccgtgtcgagcgtccggaagagggagtggaactgcgtgtcgtagcggccgtcgcagaggtcgaggccgccgacgaagctgacgatgcggcggctgccaccgccacgcggcactggcatgtcgtggtcgacgatgacggtcttctggtggtgggtgatcatgtaggcgatctgcgcgcccatgatggcgctccggccggcgtcggggttccgcgggcagaggacgcagcgcacgtcggtgccgcggaagtagtccgccgtctcggcgtcgtgcgtcgacatgaacccccacttcatgccgagcgactcgacggaggtgcggtcgtcccagaccagcaacagcacgcgcacgccctcgctggccttgcgcttgaggagctcgccgagggtggcgtcgccgccggggcgctgccgggtgccgtcacggatgagcgtgatctcggtgtacacggaccagccggtgaggtatatgaggtgcttggcgttgctgatggcgtcgaacacgtcctcccagcaccgcccctgccggtagtacccgccgccggcgagcgggatcctgggcgcgaacgcgtcgggcacgtgcgcgtcctggtacagggtgaccctgcacccggggcgctgcgagaagaaggtgtacggcacgccggggtaccgcgcgccggagacgcccctgccccacccatggcggtcgccggcgacgtcgcggaactgcagccgcacgtgtatcgtcggcccgtgcgagatcctcctcctgccggcgtcgaggatgtcgaggcggcgctcgatggcctcgccggacaggagctccctgacggggaggtaggcgcggccgatgagcgtggcgccgatgggctgcgccgccttgacggagaacaccacgtcggcggcgaagtgggcgcagtagatgtggaacacctcgtaccaccgcgggttcaccggctcgtcgtcgacgacccgcgtccgccccacccgcgcccggccgaggtcgatcgtcgcgtacagccgcgtcgcccccttcccgagccccagcgagtcctcgaacccttccacgaactgcacgaacggattcaaaaatcaaaccaacaccaaaattcgcgcctcctcttggattgctccaaccaaaaatctctcaccactaaattggatcgattttgagctcgaagagagagcgggattcgactgaccttgcggaagatcccgggggcggcgccggtggcgcgggtggggttggagaggtggtcggcctcgaggatggtggcctcgagcgtgccgtgcagcagcaggtgagccatggtcgctcctcctcggctccgccgccgcccgccgccgccgccgccgctgccgctgacgtcacctgctcgcggcgcgtccaatacgagcttccctccgagacgaaggggacagtgcaccaacaaggcgaaaagcgtccaattaggagagggaaatggaaaaggagagattctagccttttattttgatttcctttgctccaaagaaaaagacgtggcgtttgggatagttattaatgtcggatcggaaaatcccgtaaaaaaagttggaacagaaaatatttgggaaattggaaagaagttaaagggagaattttgggaagaagttaagggctgcttcatacagaatattaactaatttatgtggagtttctactatgtaaataagttagtacaataacagactataagccagctataaacatatatggagtaaataaatgagaagagataagagcagcggacaatagatttgtagccacctgtagcacagactataagacgcaatgtgtgtatcataggtgggaccagatattacttgtatagtagtatatgtttataggtaactattgtatgaattaactattttatgatttagagtcagtagttggctatactattaaacttgctctaatatagaggatttggggacggatcaagacaagaaactaataaaacatgggaaggctttggtaaaagaaaaatacaatattggcagggattaaactttgttgtctttgaaccattttgaaccattttaacaaaccaattaacttaagtcctatttggcatgccttcgaatttgatattcggggtagatttaaagtttgtatgctaaattatattgtgtaaaagaaaaaaaaattctaaacttcatataaaataggaatgaaatgatttattcaaatgttatcaatgtaattgaaaatctagatccataaatttgtaaagctagtaatatccaacttaaaacaaaaatgagtccaaagccgtgctaaagatgggtgagggttgtgaacactgaacactcaccttccgacatagaaaactgagcaatgaattagtgcacgattaattaaatattagctaaaaattaaaaattgggttaatatgattttttaaaaacaactttcatataaaatttaatgtaaaaacacacagtttagcagtttggaaagcgtgcgcgtgtggaaaacgaaggagagaagtttggaacacccacagacgaactcagcttttattggggagttaagacctttgatctccttcccgtttgcatggttataatttatgggacagtagaaataccccgtagcaagtcactatagtaacatgcaacgacgatgataacttaaacacactagtcatatccatattcatatctagaagtggttttgttaacgacgagtatctactgatggacccacattccatattattccatagattcgccgctatgtctcatgacctaaagttgtattctataaatacgtcgtttcctattgttgaaattgactaatgagtactccctccgaaaaactatatcctaggtcaagattatcatatcttgatctaggttgatttttttgacggagagagtatccaaattcattgttttaagtggtatcaaatccttatcttgattgtttttttttaacggtggaagtactgagtagtgattactcggagatgagaaaaatcggtggaaatgtgcccactaaccacgcatctaatcatctaggagtatcacactatcacacacacacacaccaccgtgacaccaggtcaccaacaaagtgtcaaccacaagacagacaaagaccaccagaaggcacaattggggggtccaggactgcccaccacgagcataaacgaggcgtacgcatccgcatcgcaatcgcaatcgcaaccacatgccgttcagtcgctgtagatcgtggagctggaggtcaagctcggtgtagtacgagattcgccaccacgcacagctcccggtgcacaagaaagcagaacggagcccatgcatggaaaaacgatcagaattcacaagaacacaggtgtgtgtacctgtgacactgtgagcttttgattcgcatgttgattgatctgctgcacatgttaattaaccgtgtggcatgaacgcatgcatgatgagcaaacgcttcacaggaggaaattaacgatgcattttatagtggatgcagcgtggaggaactggccgatcggagcaatagtttcttattcccaaagacggggagacagacgtaaaggaatccaatgacttgcgctttcggtatctagcttgggtctattcttcagagttattaaaagattgtgagaatttagttgactagtgagaacttagaaaggactactttctcagtttcaagttataaaattttctattacccacatttacatatatgttaatgaatatatgtcagtatttattaacatatatatgaaatggaggtaatagtaaattgttatgcatagtacgtccaatcaataggtccagcacatacgtatatatgtatagcagtactcatttagaaaaagaatgggctacatttaaggtcccacatctttcaacgaaaaagagttaaatttttgttacactctaaattacatgtaattacactgtaagtttgaaagcttatattgtatttataacttagtactcactccgttttaaaatgtaagtcattctagcat

SEQ ID NO: 8805 - DNA, 9373 bp, Oryza sativa
tataaatgttaataaatatatatatgtatctagattcattaacatatatatcgaatgtgggcaatgctagaaagtcttataacttaaaatggaggaaatacatatacagcgacagctctagtaaggccggtgcaagaacagaaactacatattttctacaactaggtattcatgcacgtatatttatgtagtcatataaagttctgtgaagatttccaacaagacaaagtacagagccaactcaagatcaaatgatcaatcgatcgagccctagctagcttagttttcgtgtgaccaaggtggcatgctggcattgtaccagcagtacagcgtacgttctggtagaagcgagtggcgtttggtgctgacccaacccaaagcacgagaaagccccccatcgtagttaattcgcactgcttaaaaagttcagtaaatttaaccaccactaccaggactaactttattgcgctgctgtcctagctaaacctgcccctcatccctgggatacttcaggtttcagtgaaataacccaagttagagctacccatgcattcataggatttgagtacttagtagttagtagctagtgtggcagtggagatccaattaatctaccacaattcgagcacatgtaatgtactacccgcaaggcagagctagctagctactcttctcctctcaccgaaccggatgcatttgccccgttgagtgcttggcaagggagtgatcactaaccactggccagacagtgccttctagttgcacgggaacaggattagcaaggggattaactcctagatgcaggttttgggcaagtccccaacaactcaaagcagtatgtgtaattgtgtatgcatgatataatgcagcttgttgaagcaaaggatgcggtgtagaacactgtacctcttgtggactttgtttctgacagaggtgtggcaggtctgatcatcgtcatccgtttcctgtaaccaaagccgcccaactcggacttgcccccaccgtttacctgcaaaaatgtgaaacctgcagaaaatgagatttaatcatcatcatcatcaataactgtagtgtcagtataaatgctgagagtatacagatcagaatttatatataggggattattgcacggtgtatatagtttgttatgttgtgtacgggcggtgtaccttgcagtctgccaggctgacaaagagcaagcagccctgaaagaataaatgacaaagaattcataagaagatggggtgcctcttcctttgaaacattaatcaatacatttaaacctaagtcatcaacaaataataataactagcatgatggcccgcgcagattgcgcggctagcatcattatattttctctcatataatagcatatatgttttctcattatattattcaaatatattaaaatgacaacataattttaaattttgcaataactttacaaaactactaatgtgtaatattcatattgcattttatatacgtgttagttattaattatttttaagataaaattttagttatttgtaaattatatatattcatatatggactctagactcgtcttttaatatttcttttttctgtaaattgtatttctatatagactatatgttcttcttctaatattatttatttttatttctgaaattttattatttctaattgtatttctatgtggactctaaactcatctttcaatattatttaatttttaatttcgaattttagttacttctaaattgtattcctatattagcattaaactcttcttcccattttttcttaatttcgaattttaactatttgtaaattgtatttttatacggactctaaactctacttttaattttattatgtttattccaaattttagttagttttaagtttctatatggactctatactctacttctaatattccttatttttaattccgaatttcagttatttcctaattgtatttctacatggactctatactctacttctaatattccttatttttaattccgaatttcagttatttcctaattgtatttctatatggactccggtctcctcttctaatattccttattttttaattccgaatttcagctatttcctaattgtatttctatatggactccggtctcctcttctaatattccttattttttaattccgaatttaagctatttctaaattgtatttctatatggactctgctttttctttttctccgattaatgtgagaatttctaggccatgagagcgaacgtggaggctcctttttctattcctttaattatataatagataataataatttagatctccatcctattcttgaagtgtggcagtagatgatgaggttgttgattataactagtaattatcatacctgtcacataattgtgaaggtttgagctagagggacccttaagattttcttccttgaatcgctagtcctagcatttgtactgacaatgtatatatgatcagtgtggtgtactagcgtttatagtgctcacctgtcaacggtttttactggacgacaggtcctgacagtccttggcaaccaccacaaacctgcctgcacttttccatgtaaaaaaaggagtgcgtgcatgtgtacgacgagcagcagcagaagaagcttccatccctgcaggaactcactgacacacgtatctgtgtggagccgatggaactgtaaaagcacccggacggaagccccattcaattcgatcggccggacaaacaatggcaacgaactcactccgccattaactccgtttcacctttttacggagagaagagcaagttcttctgctgctgcaatgctgtgtgcgccttccttgccgatgcgccatggatggatggatgattggctgcttgattggggcagttattgcaggccaactgctctgtcgaaagagtgtccctcggaaagtggctttagaagttggagtaaaccttgcagtgcatggcatacatacagcatggagtggtattaccttggttacgaacgcccatcaagtccatttctggagtagtacacactgtccaagcttcagtgtttgtacctggaaagaaatgcacattagccatatgcgcaaggcaaggcaaggcattgagcaaagttagattcatcagttactagtttagctagttagcacatacacactactggacaatgactagcgagtgagcttagctagctgatcggcgacaagtgacaaccagctagttagcaataagagctggtgatggttagctcatctcagttcatccttaggttttcctccagtgaaggccataaatgaggtcgccaagggcgtaggtgggggagtttattaccggcgtactggcagagaaggtggttatgccgctcgccacagttcaccgacagcccaccccagcagcccatgagggccccccatcctctttccatctatctctctcttccactaatctcaccaaagagtcttcttcacttccttctctaggcttattaacagcttatttctgatctctcacatgttcagttttatctcatccctcctgctagatattactgttgctggccccaaccaccctgcatggattacaacacaagtttatcagtaccactgtggttcaaagtagtgtatgtactggactcgtggagttatgaccacaaggaaattgaccagaaagttaattacaatgactgaaggtgtgtactcacttggtcctggcagagtagaaggagagtacaccaactagatctgaaccctggtgtgctactgtaccaaaaggctaaggccactgacagaggagatacgtgacagacaagtcccagttgagttactgtccaacccccaaatctaaccctcttctaccaccacccccactcgtgcgccacagcgctctcacacgcgcgccacactcatgccatgtatgtctatatatatgtgcatctatatatcttagccacattgaacgcacgctacactgcaagaaaggcaagtataggggtggcaggtagtttatattcactggaaaccgagaacttcactcctcccagcactccacactaggaggatgctcactgtctgactgactgactggctgctgctgctgctcattccttctcctactctgcctgcctcctctgctgtgtccttgggagaattcttcagggacagtatccctgcagaggtgagatcatgggacagtcgaagaagaagttccgcggagtcaggcagcgccactggggctcctgggtctccgagatcaggcaccctctcctgtaagtctctatctcactagtgatgatcactagctagctatgttgctctgatgtgttatgccactgtcgtgatagatacattttgatggatagctagtggttctggtttgttgttgctttctttctttttttctttctctttcatggtatgttagtagctaactcaaggtgcttgggtgcgtgcatgcatgaatgatggatgatgttttttttgctacgtgcgttgtggcagtaagaggagggtgtggctgggtacctttgagacggcggaggaggcggcgcgggcgtacgacgaggccgccatcctgatgagcggccgcaacgccaagaccaacttcccagtcgcgaggaacgccacgggggagctcacaccggcggctgcggtggcagggcgggatggccgtgtcggcggcggcagcggcagctcgtcctcaatgacggccaacggcggcgggaacagcctgtctcagatcctcagcgccaagctccgcaagtgctgcaagacgccgtcgccgtcgctcacctgcctccgccttgacccggagaagtcccacattggcgtctggcagaagcgcgccggcgcacgcgctgactccagctgggtcatgaccgtcgagctcaacaaggacacggccgtgtcgtcggctgcgacggtggcagcagcaacagcagtgtcgtccagcgaccagccgactccgagtgacagcacagtcacaacgacgtccacgtccaccacgggctcgccgtcgccaccacctccggcaatggacgacgaggagaggatcgcgctgcagatgatcgaggagctgctgggcaggagcggcccgggctcgccgtcacatgggctgctgcacggtggtgaaggtagcctcgtcatctgaattccggaagaacaggaaagaaattgaaaatgcaaggttaaaacagcatgatcaggtcaccatctaagatcaaggatctggtagggtggttggtgcacaggcagttaagattgctacatatgataggtatatctctattactactacatatccagcttaattaggaaacaattataagatcgattactactgtgtgaagtgaagctgtgtatttattaaagacttacttgtatgtacaagacgtccccgtcattatagtcatactggtgaaagctctgctatgtatcaacgtcatcagagatcagactacatatatataagtggtgtcaacttctaataaaagtaaataaaaacattgtaattgtgtacttttgtggctttgctttttctttcagactacttgctggattttcatcaaaagaagatgaggaatatgatgaaggtgatatttgtgaataagacatgtttcctaaatggttttaaaagaaaaaaagacatgctttataggataatactcctacaatcatatctatgaactgttcatcttatccaaagatagtagtactccaagattggaaaattatggatgattgtcatattaaagacaaacaagcaggagaaatatttttcttcctgcatcactccaattctccaaccacatgagtccactcaaagggttaattgatcaaatgattaatgcaatggaaagaatttggtaagatagacatggtgcaaaacatagtttactggaaaaaagccgtaatttccgttactacaattcagtaaaataaatccatactccaatgttctggttctgttctgtcttctcactttcatcaagggaaccacctagtttattaataggaaatacaccaattcctgcaggaaaaaggtgttccaaaggaggccttagcatagtaaaaactataatgttttagagcagtcgttgccaccagaaaaagattcacttgtgtccacttaggggggatttgctgatagttaaaagcaataattatgcaataaacagatggccataactcacaaggcatcaactaaattgcgacagtgcaccagactacatgcattatgtcagtgtgtttattcacacacaaatatatagcagcacaccacacagtacaagcagtggtgtttctaactgtgatgccaaccctccgaaagtaaaaatggtgacaccaatccagcacaaacaacttaaagaacttcaagataacatcatacgtggcatatcaaatgaaaaagaatgaaagcactgaaatggatggcaaagatcatggtccccatattatttccccttcctaatttcacaacatacaaataggagcaatgaagcgcgaatcagctccacagttggttctataggttggtaatgcatgaagtcaatgcgaaagggcccagtcagttagttggtcagtcataaagtacgatcatgtcaaaaaaagaagaaaagaaaattaacaatatgagaggatacactattctaaggtcttggatgttgatgaaaacaacaaaggcactacatttagtagtacacgaaatgacaaaatggcatatgattaagaccttagtgaaattcaacgatggccagaaccaaaagctatgcttacatagtgagccaacatttaagttttgatgcttaaaataaacaaattggttttcctttatcatcatgtcctttcagcagaaaagtgctcaccaatttgtgtctcaatccatcaaaacctaataaatgggtttcttgcataaaaaccatcaaactcaaatatgacaaataattctcctaatatgtgctgcagaacaaattgttaggtgtatgatgttcgcctcataatttagagatttgatactcatgctactgctcctaaattttggaaaagtaacagctcacaactagtttcgccttgataccttgtggtgccacagtagctggttaaggacctcccatgttgcaaaagcatgcattgaatatgtccagtaggatagctgtatcggtccccacaacattaactctgccctttgcttcaatctcattcgaatcaatctggtgatgtcatcttaattaagattgtaaagcatatagcaccaagttacgctgcgctcttgacactgtcatccgccagatctacctaaaatagatcaacacatggtccatgtacatgccaattaatccattaatgtcattgtcaagtggctgtggacgacagaagtgtagcaaattagcaatgagccaaaaagaaaaggaaaactggcttgtttcaacttctgactaatgagaaagacactcaagtacacaaacatgcgctgaaaacaacatatcataacttgtatcagtaataaataagcatttcaaatgagcaacattccaattccagggggctttccgttctttaaaatctagtaaagaagttaccatctggtgagcttttgtaattattcttcaaagcatgggtagattagttggttaagatatctatttagtgaagaaactacaattctactaaaaaatatgtaaaagagatacagcatgaaagaattacccactagtctatcaaaatctgggaagatgtcaatgaaatatggattcacaatgtacagaacaggtggcctgcttggcttccatgtgtaaatatactctctagactctagactttatccagtcaatcttgtagcaaaagatttaggaatcaagtctgacacaacaatttctgtaaacaactaccccttttttggcctctgtaaacaactagcagtagaccagccagtgaccctaaatgcaaagcgttggcaagtataactgctactgcatgacaaacccttgcccctctgagggcatagtaccatggcctggtggtcctagttagttgttacattttgatgtacttacgtccattcaaaatgattacatgcttggcatgtcattatcttggttcatttagcaaccaaatctgtaaaaagtctaatttttaacaatcagttacataaaagtcaaagatatgcatagtcgtcttttacaatttacactaccttattaatccccacttttatattgtggggtatatgtgcagacaaactttagtaactttgactgatatactggattgaacacatggaagtgataccggtgggtaaattgccaatgataacattatacttttgccagattttgatcgtaaagtatataatatattaatgactaagtttaaaactcaagggctgaacatcaaacagaaaaaattgtaaaaataataaaatgtataaaactatacaagtctagtttgctttcactttttcaagtcaagcattacaaaccagcaacagcaacaaaaaaaaaaaaaaagaaaggccaagtcagcttgtttccaaaaattgtttacttggatagctgcagttttgagtttcatcacttcaactcctcaaaactatgaagaccaaccatttggagacatatttagtatattgctacccaagtcattgcagagaagcgagtttctcaatataaatgaccctgtggccaagaagtagtctaaatcatttcatttgcatgttgttaaccccaatgtagttgtcagtcacccgatgcatgtgtttcagaagcatggtaattgagtaaagcgatacaatgaccagctggtcaatttaactaacagatttaactgtgtaaactcatatgaacaatcagtgactgcaaggttcaactattgacagacaagaacacaggtgtgcagcaggcactatgatgtatcacatagaccagaggcaatgctgatatgcatttcctttcagatttttattgttgaagtaatgaacaaatggcaaagtaatagaagtgcatattgtctgtcaaccacagtttaaatgtagcccaattagttctcaagtaaattcaatttatccaaataaacaattcctataaaaaaaatttaaccacccaatgatcaaatttaaccaagctacaccacatctttcgttgttttgttctgtacatatccaagaacatccaaacaacaagtttgaatgtttaacccatataattaaatttgcaaaagtgaaaataaaactatattattgcaattcagtgaagggaagtaaaggagaaatctagccagactggtggaaacaagataattattgctgttcccggcaaagactcaaatagtaatagcttagaacaggttggcaagtggcaatataa

SEQ ID NO: 8806 - DNA, 29482 bp, Oryza sativa
ggccggccccccctccccccccccccccccccaaaaaaaaaaaaaaaaaccccaatcccccttcccccgcttgtgatttgtgaagcgaaagcgaacggagcacataaacacaattatatcctcccccgcgaatattcccatcgtctccttcctcctctcccccgcatatcctccgcctccctttcccccctctcctcctcaaccctatttcaccaccacctccaccgctgccgcggcgagaattcgatcggttcttggcagccgtagtgcagttttgtgcagttttcttctctcttgttgttgaggatgaagtttgggaagagcctgagtagccagatcgtggagacgctcccggagtggcgggacaagttcttgtcgtacaaggatctcaagaagcggctcaagctgattggtgggggtgggggtggggaggagaggcaggcgaagcgggcacgcgttgcagcggatggcggcgaggaggaggccgccgccgcggcgatgacgcccgaggaggcgggcttcatgcggctcctggaggccgagctcgacaagttcaactccttcttcgtcgagaaggaggaggaatacatcatccgccagaaggtgcggcggtgatcgatcgccatttgtgcttcggttcgaatcttcttcttcttctcgagtttcttggttctgatttgggaaatcgacgctgtgtgtgtcaggagctgcaggacagggtggcgagggcggcggggagggagtcgaaggaggagctgatgcgggtgcgcaaggagatcgtcgacttccatggcgagatggtgctgctcgagaactacagcgccctcaactacaccggtgagtgtcccagtccacgcacttccccacccgccgcatcgcaacacccgtagttttcagttttcacatgtctttcactaattatattattgcaaagggttcgttagctgttgcttatgttgtttgttaactcttcttggaatgttctgtgaattggggaggtagtaataagagaggttggaaaaactggttaacatagtagtttagtatccttattagaattttttttgattggggaggtagtaagagaggtagaaaaaaattggttaatatagtagtttattagtgttctcagaaaggtaatttagcacgcatcatagagcaggcaggagtaatggaagtttcctgaacataggtcaagaaataggcgacttattgtggttgtgggcagctatggtttcgcatgtccgctacgcagcactcgtgtcgctgtcaaggagaatggatccttgtatggcaattcagtgcgcacacgtttttgctctctattgatgaatggatacttgaggttgggctcagcagctaatgttgggggcactgtatataaacagtttgttttctcgtgcgagacaagcaatttatagtatggccacatgagtgctaacattgtttatggtggagcactctgttcctttctgctgcaatttgaaatggtaacagtgtgtcatgcatccttctatcgtgaacagattttcctttgactcgctataagaaggtactccctccatcccaagatataagtatttctagctatgaatttggacaactgtgtccagattcatagccaaaagttgctatattttgggtcggaggtagtatataacaattgtaaacaaataggtcaaaaaatttatccttttcaacaggctgtaatacagttcgtcaccaaccaaatggtgcatagaagtttctacaagaaatatttgactaataattgacttggtatcagatattatcttggcaatatttttcactaaaaatacagtctgattcagggttcacatgatgatgcagtagtgtgtagtatagtatagtgaccttgccctctactgcagtgttccatggtagtctggtagattatctgcttccttacctgtccactggcagcatatgcagtgcatatgcaaagtaatgatgtacaactgtactgctttgctatttttcggttggcctttgttatgccttaatgctgagtggttgattttcctctttatcaatgtgagattgtgagtggcttctaatatctggaaattttcattcctagcctgggggttacaggttaatcatacaactcaattaaatctaggtcggtttctgttggcagttgggacgaaaattactcacttgaatatgatgttagagcatcatttctatcataagctccatagttgttttagaaatattgatttagtaagcagggcagcgtatgcctcccctcaccaaatccaaaattaaattcactatgcatcatttcaaagattgcctgaaattccgtagatgcattaataatactatatgcacaatttgcaaaaagttgggtgtacagtcatctgcagttagataaataaattaacttgttctaaattcccaggaagcattcacgcctgaaatactgtagtagacaagtttgcaggctaatttttgcaatatgttataaactatttcaaagacatttatagtttttatttttagtacggcgcaaaatacatatttggtaaacgggggcacatgcttcattgccaaatatttttcatcagttgacgagtcttctgattaaaagtcatgcctaacgaaacaagaaagtgcaattcatgttacgtttgtgatttgcgttccagctattgaaaataaaagaaattagttttgcatatcatctaaagatatggtattgctcaacagaaatttgtgtagctaatttcatgatcttcattagttgactcttttatgcttagctgagatgtgattgatggtcctaactttgcatgctattcgtcatcctagtgcttctttagtggactactttttaaagtcagttttttgctagctgcaatgaacttgaggctaatgagtaccttggttactgtgttattatgtgcttgtggacaatggtttcggtggacgtactgtgaaccagtgacctgtgaccactctttgtatcagcatcttgcttttttctgtttttcctttgcaagatgcaagttgatggtgtcacagacctatatggctatattgggccaggttaacacacactaatttggggagtcgacttttcgaatgtgaacacattctaaagatgaggatgtcacacaaaaagtaaatttgttgttttgcatcatgcaagcttagtatgttttgctcaaccaacagaacagaatgcaagttgcatgcttcttatatgcctgaagccctgaactggaatgtgttactgttaataaccatcattggtgctttgcaactgcacaatacatttctgctgccattttgctcatatcatgctggtctatttcgtatgcttatgcgaataagaaactatattagtgttgtacaactgtctgaaagttttctggttatcatttgcaatatgaaatgttatcctatctcaaccaaattgactagcatctcctttagtggcaatgtggtaccctttacacatcactaccatgctagctttcctgatatgaaaatttactggaccatgcctcacgagaattcaggttcattagctagggatgtgacaagttacaaatggttttggtgcctcagacagacagatgccacagcctgtaagccatacaagggcgtattttctatttccatcagtttgggcagatatcacctaaactaaaatgtttagtctgattgaaccactagcaatagctcatgtcagttatccctgtttattctcttgagggaaaactctttaagaaaagttgtgatattggaagtggattggatgctatttgaaatttggaagatgtaactcttgtactttgttttagattttcaccagttgatacttacgttccatgttgctgtttacaggattagttaagattctcaagaagtatgacaagaggactggggctctgatccgtctgcctttcatccagaaagtgctacagcagcctttcttcaccactgacctcctgtacaagcttgtgaaacagtgtgaggccatgctggaccagcttctaccatcaaacgaactgtctgtatcgagtgaagatgggagaggcgatagcactaacgaggacaagccttcgaatcccagttcatccttggttaatggtggcactattccagagttagatgagatcgagtacatggaaagcatgtatatgaagggcacggtcgcggcgcttaggtctctgaaggagatccgaagcggaagctctactgttagtgcattctcattaccacctctccagggcgacagttcgccagaggagcagcaggaactgtggaataagattccggtgattgagcaggccgccaaatgacacgaccggcatttcactacatggttatgtacactgcatgaccttgatcttgacatttgctggagatagtaccggggatctcattcccctgtcatatattcagtaatttgtatgattccaggattcctaacagttgtaaaatggtggacatgttcagtatacattgtaaaatcatagaaacccatcataaccatcagacagaactgagatgttttgattcactattgtgagttaaatcctgtactttttgctgatctacatcctctttcatgaactctcggtacagaattagttaatgttgcagtataacaattctgattttgacaatctcgattcggagatgattttgttaaagttgtgcaacgtcttgttatgagttagcatcatgtgtagcacacttccactgaacttgtttgttgcctggaaattgagttgattgcgcagtttttactggaatgggaaaaaagttttactggaggggaaaataagatgtctgtaaaatttattcagagacggcaagtattgctgtttaggtgatcaaataagatatttgtatccttttgcacaatcaaattgactatcatatagtgaatctgtttgtgatcatgtttatattatctttgatgaccatgcttatttgatctcaagagccttgtagtttactataatcatgttccaggctcaacaacgtgggcctaactaggctcaactttgatttgcacttgtttaacaaaattgaggaatgttctatacctgtttttagtggttgagactgagacgtaaatgaaaacttcaaccaaagttgagaatttggagagacgcaaaatggaccttttcctaattttgtaaacttgtagggactaaaataaattaagcccacagtttagcccattttcacaattttgtgaacctgggggcccaaacgagattaagcccacatacatttcggctcactttcttgagggcccaaatgaaatttagctacactatgcagtctggcccattttctttcgccacaagtcagagcagagcagttgcggagtgggaaaccccaaaacccccacgtcctcctcctccgccgccgccgccgccaccgtcgccgtcgacgagccatgccgccgcggaagcgcccgccgccgccggccaaggcgccggaagccccaccggaaaccaagcccaagatctctccgcccgctaaacccatcgccgcggcgccgccgccgccgaaggcggtcctctcggacaccgtcctcgccgccttgtcgcagcacgagcgccccatctacaagctcgtgttcgccggcggggacaagggcatgtcgcagacggagatccggatcaagaccgggatgccgacgagcaccctcaccaagcacctccgcggcctcacctccaagggcgtcctcaaggtggtcaacagcgtccacaagcgcgccgagaagatctacatggacgtccgcatcgacccgtcgccggagatcaccgggggaacctggtaccgcaacggccagctcgactccgacgccgtcgcctccgcgcggcgcaggtgcctcgaccagatcgacaagctcggcgtcgccacggcggagtccatccacgagggcatcagcagggaatgctccaacctagcctactcgaccgagcaggtcagggacatcctgcgcaccatggcgctcgacagggaggtcgaggaggtgaggagcaccggggcgggggagttcggcgacctcagggcagggagggtgtgctaccggaggggcggcccggtgcagggcggcatgatggagaggatcccgtgtggagtttgccccaggatcgatgagtgctcgccggatggcgttatctcgccgagcacctgcgtctactacaagaagtggctgcagatggacttctaggtggtgagctctcttccgcgccgctgtttatggtgcgatcgcacgcacaattcagcttccaattgctcaattggcatttgatctatgctatggaattgccacagttcatacattgcggcatgtgatcccggataggcccatgagatagacatactagatgatatcatctgattatcttatgtttgtatttaaattagtaagatttgtttctataatcattattacttagccttttcccctgttagtctttctcatgtatttatctgcaacaagtttagaaacctgtccaacatcaatattccaaattctagggtgcgtgagagtttcatccattgttactcaatcataatatgggacctgagcacaataaagcaattgcttctttacaagcatgatctaaagcattctgctattaacaaaaagaatgatcaacatcggtgaattgaggcttagtttgtcgcgatgtaaagtttcgccattatatgaaatctgaaaaccctgatggctttaatgaatagtaacctgcacatgcaaatcttattgtatctgtgtttcccaacgtggtttggactaagcattaaataatgttaatctgtcacaactcacaggtttgttgtacatacatttgtaagtgtgttgtcccagtagttatactggttgtgaacatatagatattgtttctctgaaaccatagtgcattctccagtcctgtttgtccaccacatttaccacacagactgattttggacgaacctataattgtttaatcatgtggaatttgtgtacactagttcaaatgctcatatatgatctggatggatttcacggtgtagaatagtttactaatagcgccaatttggttacctgtgactataagaagtggtctggatgtggatggatttcacagtgagccagtggggtctattgatttgtgcaaaagacggaaccagatgttctgtgtacgcatgaacaaatcagatacttgaaaaatgacagtgctcagtatcacatttctacatcactatgtctctaactaactgctgcttaacattgtgatacattatacattgtatagccacacctatgtacaaaacagaatgaaacaaagaaaatgtttttttatgttagagcataaggaccacaaaaaccatgaatgattgcagagctctttcgtgagcttgtatgcaaattggaagaagctcatgagagatcatgaccttcatggaatggtctacacctagtgaatcttgatctttgatccaaggttcaaaccaacccaaatatctacaccaacaaattgttcagttagctccttactttttctagtacctacccaaagcagcatcttgcattacaatagaatgtgctatttatgattaggaatttagaatttatgtctattctttgtatatctcatctgtcatctctgatattctaaattttgacctttgattgatcccaaaccactaagtttgtagtgatgctatagtaatttaggtttgaatgttgagagaggctatataatactgttactaaggcatgatgtgccttctttatttttttttgtttctcacaatgtcatcaaaacaattctaaaagtcttctcaattcttttagtcaacttgagggaggacggtggcgtgctggagataatgtatgacaactattttatcaagttgttgatataaatatttgtccaattgtccatttccttctttttgtctgtgcgtgtgtgttgtgtatgatacaaaccacacaaaggatttcatatattaccgtgaacacttctaaaattatttctgtggaagtcaaggtggcactttttctttattaccttcagtttagcccaataagcttacaagatattccaatgatgtattttgcagctttaatcttctgtgtagcaagctgatcaactaacatgtattcagagaaatgggacaagctgctgataggctaattcatgaaaataattgttttgtccaagaacatgggagttgacatattcttcttttatggtttgtactgtcatttggcttacatgttagttgtgtcatcatcttcatcactcatcagtctcaaatcaccttaagatgtgtgcactgcatctgaaggtgatgcactcttatgacttataagttgtgagtctttcatagaactatccacaattccatattattcatattgatgcactgttggcgaatcctagattttgcttccaacttggaggttgagttccatgcttgcttctgtccatactaggtgactgaatcttatgttactgcaaataaaatctcgaggtaatttgcattttatctggtaaatatacaaccgggtgtccttcataaaggatttttctgacaatgcttaacttgtgttgcatcctggagcatcatttgcagccatttctgaaggtgagtaagtgacttccattggaattcaatcaaaatttgaaaagcgacatctgatgaagatctcagacgcctttaaagtgacaaggtatcttcttggaacctgtcaaaagtggattatcctaacaacatgttaacaccagagacttggtcttgcagctccacgttgggcgttttcttgtacgcttctatggttgtgctgggccaagcgcaaggaagagcaacagtctgagtcaggtcatgtctcatgcctcctgctgctgctgcattgtcaaaccgggagaaagtgatggccatctctgaaacaaggtactcgctcagctgttgctgattaattttcttgggaagacgtgttaagttgtgttctttacccagcttacctgctaatcttttttgtgctctttaccagcttacctgctaatctttagcaatgagcgcgatctgcacctggcggctgtgtttaatttgcctttgcattgcatacatattgaagcagctccgaagctacggaaaaagtgcggttgctttaggttaatcttcgctcaccagtgacgttttttattccgatttaacccgtgttgtgtagtatttgttagtgcttggttatatatgtcaactttgaggtgcagttctgggtgaaaacggaaatactgtattttccatcagctgtaggcttctcatttggttctgaccacatgtgctgtgtacgcatatgaactacttgttgcaaattgcaatatggggtattgacttttgtcatcaacatcacagggataaacagtccattgaatagtacttgttggggcaaggtacaatagtcaatagaattaaaaaaaaactagttaggagaaaaaaactgggccatgaacagcgataagcggttttgtactaggtggtttcagtcgtaaaatttaataaaatataagtttgaatatgttcgttttgaccggttcaggggctgggtttgccaaatttcttgaaggttttccgaaatctgaacttctaacgtcacaaaaaaaacaataacgagccctcagctttctagtcattttgggactgctaagactgcttcgtggtccatgtatatctataaacctataacatccctttcttctcttttatcgaatctttcacataggtagggttcagtaaaccattttggttagggttactattatcccacactttagcgattattgcggtaacaatcccacactttagcgattattgcggtaactgcatggttaccgtgaaccatgcagttaccattaggtatataccgtggttttgaaaaaggttattttgaaaaatgttatcacacatgataaccatgataaccgcacggttttgtaaaccatgcatgtagatagagtgtcaccaccgctcacgtctccttgatccaatagatgctcgctagcctcaacacactgccgcgcccatggcttccctctaaatttgccacttccacccatccacctctatgtgttttattggagtttaagtcattgctttcacatgatcgctgctaggggtggatccaccacctagtgacccgggcaattacttgggctcgttaggtggacacgtgatgctaaattttcagctaccgttacactccatcaacgaatggagttaagtttcccaatttaccttttctcgcactaacattttcctaactattaaacggtttgtttttcttaaaagaatatgaaagttgctttaaaaaaatcatgttaatctattttttaaataaatagctagtacttaattaatcataacgctgatgaatcacttcgtttttcatgcgtgaggcattagttcccaacttcaacgtctgaacacagcctagtatgtttgaaacaaattgagtcaaatcatcacgtatggacaaaaagtgatatttcaaaagtttcaagcactttcttatacatgcgccaacttgttgaattcattggttagcgatgaatggtgtcgaattatttcgtatggatcaaacctcacagtaatcgctttatcataaaatctaaaataataaattgaaaaaccaacttttccattctctcttcttatagcatcaccaacagctatctaatgttctatcccctaaatctctttttaaaacctctaataagaatttaaggatttaaaatacacttctttccaacatatagcctaaacctagctccctaaaataaaataaagtgggccatcctctcttcgccggcgatctcgctcgcacaacttccatgcaccgatatcgatcgcgctcctcccgtatgcgatcggctttttgggagaatgtggctattccctagacgtggagaatgattggggattctaaattcttttcacttcaataggataattgttggatcccatttttcttatagaaaaacccattttcggggattaggttttactttaataagggaagagttggtcaatgctcagatatatctaactttgcaaacaaggccctgttttatccaacactgtctctcccggccttccacaatactccctctatcgaaaagtctaagtcatatttcatttgtcaccaagaccaatgagaaattaacttatccactgtgacaaaaccaaaaaactatatacatacatgtaatcaataagagcaaattttatagtgcagctgactgctacctccaattttagccatatcatttactcattgattaagaggcaacatgtacaacaatttacctccaacatacaaaccccaatatttcttttggttcattctcacactattttattttgttctttgagtatgtgtagacataaggaagagtatcttcagacttacttccttctaacgtatgtcactgacatatgttctctctagatagtggacccatatatcagtgacttaaagtcagaggatctcaatccctagcataaggggtggctcaccctcttcttggttctcttttccacctcatcactttgtcatatgttgtatttttaaggatagcattaagaatcttatagtacttgttctaaggattaagatgattttttgggttgcagttaacagtttaatttagtacatatagactataaatatgacaaaaggaatcataaaattaaataaaaatatgtgctagacttttggatggagcaagtagcaaatgtgggcaccctttgtctgctcctggcctcgtctcaaggctcggttgctgccaaaactcgaaaaacatacaaacaaaaaaagaaaccgcttcgtgcccgcggtctcgctaacctttttctgctgctaacacttttccacttgacggtttgacgcgcgcgcgcgatcgcgccgtatacgccgccgcgcgccggccggccagatcgtacagcgggaccgcgtccggctactatacgtgcgtgttccccaccaccaactctgtgtcgactgcatgtcgacctctctgtggctgtggttgcatgggcgcgcgaacgcgtcggcgaattggattgttcctggcgcgcagctgatgcgcacagtacggtactgtacatatgcgagtgtacgtgcgttgcaatatgtgatatctcgaggtaccaaatgttggatataggtctaacggtttggttttggctaagtactagattaatagcagaactggaagaaggacaccgcgcgtgagctccatcgcgcatgcactccaacgtacttactccatatgatttttctccgtttcgatcaccagcttccgcgcatcgtcctcgctacttttctggagcggggcctttacgctctcgtcacgccgcactcgtataccattaccacctagcagctagtacgtagtcgtacatgcatgcacccccacccgcccagtcaccagcgacgcgcagacccgaaacgttctgaaaaaatcgcaccgtcaacccacaccgcacacgcgcaacgctgcatcctgccatcctcccctcccctccgccacgacgacgacggcacacgctcgccctcctctgcactactgtgcagtatcccaattgcggccgcgcgccaatgcagcgaccagccgaccacgcgcatgcaactgtacgagcggctcgacctgatcgatcgcgtgctcctcgtcgtcatcgtcgcgcgcggaccggtcgacgagtgatgggcttccgcgtgtgtgagcagcgatcgagctgactttgcaaccgagccgatcgacaggccggccgggcggccaatggcgtacgtacgtgagacgggccagcgtgagaccgggcgaaatcgacatcaagtgtaaaataacggcaagaggggtgtggccgttttttttttctattctctctctctctatctcaaggcggttttgtaatcgctttttgggcgctacgaatggccggggagattttcatgccacgtcgacggccagccggcttctgcctctctgcttcctcgtcccgtctcgccttcctgtggcctgcaggtggggcccaggggccggagggacgtatacgtgctagctgttccattgtcaaaaatgttggttgcatgatgttggcgttgtgcgcgtgtgtggggatctggtgtggccgaccataatgtcgtctatctctgcttgtaacttgggaatagattagtagtggtaggacgaatacgtgcttttggtgtacacgctttgtgcgttgcatttagctcgctggtgattagccgccagcatgtgtggagaaagaagagcatttatatatgaagtttgaatattttgttttgctctagctagctaggtacggtggattgggtcggaattttgtggtctatgtactgaaacttaaaacggctataatcacattgtttgcatgtctagttaggagaggtaatggattaagatctatgggtctttctcataatcttacatagccccttatatgtttttagtagcaaatagataaaaatttaacacacccaattttagacacaatccttctagattgaaaagttaatcccgttactcctcctacttagagtgtgttctctctcgtacgcaaaacagaatatgcattaacgcatgattaattaagtattaactaaaaacctttaaaatagattaaatatgatttaaaaaaatgcatcgcttagcagtttggaaaacgtgtacgtggaaaacgagtgagatgaagttagagcaagtttaatagtatacccaactactagctccaaatcatctatagttaacttaactagcatggtggcccgcgcagattgcgcggctagcatcattatattttctctcaaataatagcatatatgttttctcattatattattcaaatatattaaaatgacaatataattataaattttgcaataactttacaaaaatactaatgtgtaatatttatattgtattttatatacgtgttagttattaattatttttaatatcaaattttagttatttgtaaattatatatattcttatatggactctagactcgtcttttaatatttctattttttaattccgaattttttgtaaactgtatttttatatagactctatgctcttcttccaatattatttatatttatttctgaatttttattatttctaattgtatttctatgtggactctaaactcatctttcaatattctttaattttaaattttgaattttagttacttctaaattgtattcctatattgactttaaactcttcttcccatgtttttcttaatttcgaattttagttatttataaattgtatttttatacggactctaaactctacttttaattttattatgtttattccaaattttagttagttttaaattactatatggactctatactctacttctaatatttcttattttttaattccaaatttctattttgttttcttaattgtatttctatatagactctatcctctacttctaatattctttatttttaatgacgaattttagttattttataattgtatttctacgactctatactctacttctaatattccttatttttaatttctaatttcagttatttcctaattgtatttctatatggactctagtctcctcttcaaatattccttattttttaattccgaatatcaactatttcgaaattgtatttctatatggactctagtctcctattctaatattccttatattttaattccgaatttcaactatttctaaattgtatttctatatggactctgttttttctttttctccgattaatgtgagaatttctaggccatgagagcgaacgtggaggattctttttctattcctttaataatataatagatagccaaattatataatagttacgtataaatatatatactacactattaatatcttgtcccacttgtcatacacacattgtgacttggagcatgtgctgcagctgtctataaatttgtagctcgctgctcatctctctcttctttcatctcctcgatatgtgtttatagctggcttatagtttgctactgtacctgctcataggaggattaacttaaaaacagtcttatagtatattgtttggtgtatctatatagtccaaacacgtattttcataaaaaaattataaaagtattttacaaaacttaaataacgaatgaataagtgtgacaagtcaataacattttatcgagaatagtagagatttttttcttgaaaaaaaacagtagatatttcatttaaactatgaaaagacgacggtagataaatattacacgagcagccccgtgaatgcaattcaggcacagctttgacaacatagatacgaacacattggatggaccgagtggcacgtgccacgcagtatcactcttgtcctgtcgccttcgatttctcaagttgaccaagccgctctttaaatccctaatggctaatgctgccaaggctgcctccccctcttctatctatatatctcacttgcacctcgcgacccattttagcctcttgctgtcccactcaaaatctctttcgtgtccacctcaccttgcaccacctgctccgccgccgccgccgccgtcctcgatccatccatggccgccgcgagcttcgacggcgccggcggggcgctcggcgtgcacgcggcgtcgcgcaagatcgggaaatcggcggcgcatcagcagcagcggaagccggtgatcatttacatggtgtcgcccaagatcatccacgtcgaggcccacgagttcatgtcgctggtgcagcggctcaccggcccgggggcggcggccgcgggcgacggcggcaagaaggcggcgtcgtcgtcgccgagggaggcgcgcaggggggcgccgccggtgcgcgtcaaggcgcgggccctgaaccggcccgccggcggctcggccgtgtccgtgtcggtgacggcgacgatgcggcagcagcagcagctcgcctctccgtcgtcggcggcggcggccgggccgtcgccgtcgccgtcgacggggttcctgttcaacgacctcagcccgctccgcggcgccgcgctcaagggcgaggccgccgccgccgcgccgctcgtctcccccggcgccggctggcttcagcacgtcggcgaccacttcttcagccccgtcggcgcgccgggggcgctcggctcgccgtccgccttcctcgacatcttcgggccgctgccgtcgcagcaccaataatgatacaaatctcaccggagcaacggcgacggcgacggcgacgcagtcgctgtgcatgatgcatggtcgccaattagggttttcctctcgcgaccttgcacttgcacggcgtaataatcgaaaaagaaattccgaaatgagcttaaaatcatcttggtttgcatatgtataggcttgtaaattaattagttcatcaaaattgtagataatttaggtggtttacaaaattttcccttaattgctcgcatggctctacacgcatgagccatggctgcagcaagggaagaggtcgatcgagttgtgttctattgatttgttcatctgattatacatagatgattaccttttctttaatccttttttgcgattacttgtccttaatttatttgcttgtgcaacttaatttttttgttacagcatagaccatatcatgatatgggatattatccatgtggttttttaattgttttgtgcagtacttcttgcacggcattgtaaatatatcttgatgcacttaattatgatgaattaattgtttttttaagctcgttgtagtgtcgtgcaagtagatcaattgacagtgatttgctcttgcagctggagaattaattaggcgcttgacacaaatattattgttatatatagttgtacagtacaagttgttgatgcctacctagcaatatatataagtgaattttcttttcctagctagctcgatcgatcattctgtcttggacatggaaacgacgacttctaatgattgctcgatcgaggagattaagagcagatcggtgtctgattcacagatgatcgatatctcttgatcaacattgacagagagccataaatggattagttagatacaattcaattagttgccaaaaactgacatcttaagccagttgtaattaacttattgcagttggccggatgcatagagtacggcaaatgggacccgagcgtatagttgtgtgcatttttctgataattgttgtgtgtgcattttaaagacaaaattctcaatcagtatatatacataggagtatatggaatgaagttctatactatattctgcacaatctcaaagtcaaatttcattgttttcgaagagagggagacaggccaacattaactcctcaaaatagtatattcctaccaattctctagttttggtctcgatcacctaattcggtcaagtcatgaatctttaattgacttattaaaaacctcatttatagcatgttctttttaagcaatggaagaacggactaatgcgacatgcttcgtgagctcctaaaacggtgccattttcaacaaaatattttctatatataaattttaaatctgtttttcaacttcacaatagttaattcattcgtttgtaccttcaaatagtcatcacaaaatcattcggctatttaggggaaaaaacatgcccgatttatggaaacacaatgcccatttcttatatttttatcggtgtaaaaacaatattcttaaatagtccacatttgccttttgaaaaccgtctctattatctgtctgataatggtcttcagttagtatagcattcaaccacctaccatgtgcgcatcagttaaaaaggcaaggtgaaaagttaaaacgtccgaagggcatttggtctagtggtatgattctcgcttagggtgcgagaggtcccgagttcaattctcggaatgccccttttaattttttttacgccctttctttccagagttttcacaagctcactgcatgcaattatttgatttcttttagtttcattttgatttattgttttcagttcgtatggtgttttggttggacactaattaagacaggcataaacatcctttcgtttattttccttcaatcttttgcagattaacagtatgctctccatctatcctctagggttttgggataaaagcacgcaattacgctgttaattccgatgagccatagcgtttctactctagctgaaatccagattgttgctgcattttcaccgtgcagtgaaatttctgtgaagagctcgacggagaaatacaagtgatgcaaggccagaaaaaggcccgtaagcccaatcctgatatgggccacatggtcaggcccagtttcttcacagctgaagaagtggagaaatgcacccacggagggagaattcttcatattcatcactggagcagataattttttttctagtaattttatcccccggaattgatcaattactactagttcatctatattttttttctatattacattattacacataaatttaaggttggcgaagtgtttttttcttaaagaaaaaagttttacttggatcagccaatacagcagcgagagacaacaaaatgtcagtaaatatagggataacacaaatcgacccgctgacaattcattcattctaatttaactaaataaaatttagttgaattataatagatacaataagtctgatcggtaatgctagctacactggcaccagccagccccgatccacacacacagaacagatgatttgctacagctacagaaggaccgtgcagcttgctgacacccagcacaaacgatcaatgccactcatgatcggtatgtatactcatctctagataaacaaacaatcgatctattactagttaattacatgttagtaaaaaaaaactagtaaattacagtgtagggtccctatcggagactatgattgccaaattgaaagtagtgttctctccacaccgtggatggatatgttcgaccatccaccaacaccttatgatttttatgattaatcttatgctaaggtcaccgactcaccgtcacaagattgggcaaacactttggtgtcacaatcatcttcagaataaagcgtttgcacgcaactgccgtcccagcagaaaggattaagcaactgccgcccttagcagtaaaatatcttgattctggtaaggacggcagttgctctttcaggcttctcttaaattttaaaatcaccctacctattcaataaaaataaatcctaatactacttagactaaataagtacttattaactaatttaataagctagaaacttaatttattttccgttgtaacgcacgagctctaggcttgtattgaaataaatacagttgcatatcttgtgccaacaaaaaaaaaaactgcagatcttattttgtctagagaggatctaaactgtaagatggtacactcatgcacagctaataagtataaatcaaattaggcttaattaacttttattctctctatcttataatataagacgtgcacacatttcaatattcaactttaaaaacatttgaccaataattattataatataaattaaattttatttgttaaaattaaattattggattaacatttaaatttactttaagatgattataattttgttgcaacaaaccttatatatgagaaattttaagttaaaaattagttttgaagattgtactaagtttgacaatagcttatattttgggatgaagggagtaggtcctacctactactccatttcaaataatgcaagcggttagagagagatttcttcctcttgagttaaacccgggagctgtaacgtcaaacgtgcacgcctgccactgcactaacctttgcattcataagcttgtacacatatatttcgttgctcttgcactgatatatggacgtcatctttaaattaaaccatcacgctgaagtttagaccgcatttttttaagaaaaagaatttcactggaaaaattaattaatatagcgacttctacaagatatccagtttaatccactaattacgaatacggaaaattcccagcttcgaaaccaagcttttaattgtagtttcagcattttccaacgatcaatgtacgttgctttccagttttgtgtgggtgaagctagctagtgggtaacattgaagaaagatacatgtggccacgctttcaaattcactgcgtgacggcaccggaaagctccatccccctcaacccatgttattattcagctatccactgaaaaaaaaaaatcttactccctccgtttgacaatataaatcattatagcattttctatatttatattatttgtctagattcattaacatcaatataaatgtggaaaatgttataatgacttgtattgtgaaatgaaaaaaatattagtttcgcaactttttaaagtgaagaacgacagaagaatatcacaagtgatcttaatgttttctcacttcaagtgtaaatagaaagcatcaaatacctttgtaagtaaaatttcaaatagattcttacgaaattggtgtgtttggagcatgtaaactatagcggactagcggtgttaagcctctataagcaaaaggttttttttttttattttcaaagcacactactatagtcgtagtctcgtagattctcatatatacatgcatatatgcgcgcccatccctacccgctgttgacaagtatatacgtcgtatcataagtcgttgaaagagtgattagcacgttaagtctactatttaaacctagtattcacttatttaaatatttatattttagaacagaaagagtgttaaatatagaggaaggattttctatatgagaatatgtggatatcgcatacagttctacggacaaaattactgtatggattgtaaatgagactatgacaattataaatcacgtgcatggacaattagacgactgttcttgaattttactaactccttgagcgtcccttaaccattaaaaaatgaagggaaagaataatattaaagtccgcccggttcttcgtataaactattgtgcacagaaattctacattatgaaaattgacatgcatgggctaattttttttattttgcaataaataacggaaaatgttagcgattgggcgctcgatcagcgccagaaaaatcgtgcgcccgccgcttcttgcgcctccgcgcgcacctccgtgccgtccccaccacgttccccaccacatacgccattgcaacaaatcacccacatattacgaaaacgctctattaagaaaatccgtttcattttttgttccaccaacaatgtttcagcaattatactcgtgatgtttcattatgtatagatcaaatgttgcggtgaattgaaacatcctttcgctatttgatgaaacattatttttatatatggtaaaacaacttaaaaaagacaaaaaaaaaacattgattcatacgttgcagcaaaatgtttcatgagtggtgattttgttgtgtttcaacttttaaaacgattgaaacatttttttaatctacgtagttaaacaattccgaactacttcgtgcagcgtccgatttatagacgcctctagataacaactgttttttccaaatgtcccttaaccacatataatataaaacaaataaaaaggacagttagaaatgggcgaacatttcgacatgggcccatccggcccaataaagaactaaaaaagaggacatggacatggaggagctcgcatccccagtccccgtcacgtggacgcccattggccctcccgccccccatctccaccatggcctacacgtcagcgaccgtcccatctatcactccatcccctttgggaaatcccaccacctaccattccccatcctctaccctaactcactgacatagcgggcccacttccatccgggcccacctgtcattgtaatgggtacgcactatgtaggtgagaaaggagagtcccttacccgtcgtcttcctcctcgagacgccattgctgccgaggttgcttgccattcccggccattccaatccactcccaccaccaagcgcgagctcgattatttttttaatcgattttctccgatttaatccgtagaaaattccccactcctcctcctcctccaccgccgccgccgacgccgcactcctcactccgcagaagcaacaccaacgccgcactccaacgccaaccgcctccgcgcgcggcccgtcgccatcgtcgagcaccttcacgcttcctcctcccccgcacggaacggagacccctagcgccgctataagagggagagaggtgggcgggactcatggcgcccgcggcagcgtcgctcacggcccccaacgcactcgcggcgacgtcgttgcccttcttgcacggaaggaagagcggcggcggcggcgtgtccgtgcacgccggggcgccttcgccttcgcgggcggtggcggtggtggcgcggaggttgtgggggagcgctagcagtagcaggaggatggtggtggcggcggcgacggcggcggagatggcgcccgcggcgagcggggaggaagggaagccgttcgtggaggagatgagggcggtggccatgcggctgcacaccaaggaccaggccaaggaaggggagaaggagccgcaggcgccgccggtggccaggtgggagccctccgtggacggctacctccgcttcctcgtcgacagcaagctcgtcttcgagacgctcgagaccatcgtcgaccgcgccgccgtcccctggtgtgagtgatcggaaaagctcttcctcctccgtgctctactttggaccgcttggaatttttgtggatgacgtttttttttagaaaattttgaactgaaatgatatttgattggttcatacggcgacacccatgaaagttggaaatatttctcaccttctgttctagaatagtcaaatagtataattgtttagccagaaaaaaattggatgcacagctttttgtgaaggaaaatgtcaaattgaagttggatgtgccatatggtgggagtaggagcacttgcaaaccccctgttttgagtttggtttggatgcttgagaaaatatatgtaatccaagttaaggtattaaaagactttgagcctatgattatttcatgtcatcgaggaaattgcatcagctttggataagtcagctaccgatctgaaatttaaataaaaaaaatgtatatttccccttctgttacatgatatgctcttccactgaccataagaccagtgccatgtgcaggtggatccaatttaagtaacattcagcccacattttttaaaataaaacaaaggcatttctttgtcattgagaggcatccttgcctggcatgctgctagcaaaacatttggcaggcacagaatatgtttttgggagggtcttgataaaattgtttaggtgtttcgaaagtgttaaaacgctttactggcaacatttctttaagagtatcatcaaaatatcaatgtttgcctatatgtatcaagtaagaagtacaggaagccatgtgcatgtctatttgcagttggttggcacttggcggtataatcatctaaagtagtaccttactattggttcctattctatgggcaaacttgtatcgaccttctcgagagacatcctatattcctattcatggatgccttaaatcactaaaattttcattgtggctccctctgctgtttagaggtggcatccccagcacagttattttctgtatccacactcctgtattgcttcccttaatcatgtataagtcttgtattttggcattgtattgtttcgacacttggaattagaaatccttatattacattaccacttggcatgctatgtgcagaattacctcggtaggtttgtacttgcaaacagcttatgttggcaccatggtaccccaattttacatactcttgttctgttattctgctatggtctggtatgcaaataacacaataaacgttgcctccaattttggggggtgcacatcatgcagttattctgctagttgagttatgggcagcattttctttataacaggatttcttttgaaggaaatccttgagtctttataacagaatctttctggaatccgccttgtccttaacccttgagtctttgttacaccctttcatggacctacgttgtccgtcaatttgcctccactagctctctgtgtattggatggttggatgtgagaagcctctttcttattgatgattactttgcattttgcaaggaaaacatttcactagcaaagaaaattaaataatatataatgttaacaatgataccctttatatcttctagcttgcttgctgaagttttatggtatctggattgtctgcatttatctgtattggtgaaactctagatttttctatttgttttacatttgagttttagaacaacacgtagcttcgtgtttggctagttgaccagttccacttaagtacttctccgtttcatattatagtcgttttgattttgttgtagtcgaactttttaaaatttgaccaaatttgtagaaaaaatatagcaacatattcgacacaaaacaaacatattatccaaatatattaaatgttagttttaatgaaactaatttgatgttgtagatgttgctaaatttttctataaacttcatcaaacttctttaagtttgactaggaaaaaatcaaaacgacttataatatgaaatggagggattagtaaataattgagaagcaaataatgagtacctttattctactcctacataataccgtgtgcaatttgtttgcacctgaaatcttagcaggatagagaacttttgtagttttgtttatgctgtatggaagtatggaacaatgagtcataattacttgaacgtccacataaaatctgtaatattctttttagatggaaaattgaaactactataaaacagctagaagatttcttccatcaatatttgcaagaggctgcttattgacttcctatttatctgtatgtatttcagatgctgagttcaggaatactgggttggagagatcagaacaactgaagaaggatctggaatggttcaaggaacagggtcacacaattccagaaccatctgctcccggcactacatatgcttcctatctggaagagctggctgaaaaggactcccaagcttttatctgccatttctataatgtgtattttgctcatacggctggaggccgaatgattgggaagaaggtacagtttctgtcttttttaatgatgaattttttatatcattcaaaagctcactatcttttggtaacatagttcagaatggattcctataaatgcgtagaatattagctatcgaagcaacaaaactgacactaacagaaagtttgttctttgcttcattgcgctttcctgactgtatagtgtggacacttttgatgtgagatggtttcttttcttaggaatcagattgaccggttgctttggatgcttatattggtattttgttctaacaaaattatagagtacgctagtcgagataatgaaaatactacataaggcagcgagtgctttggcacgcagtcccttttaggatcctcttgccactactgttctcaagttgtgctgctcatagacgtcaaggtttttcaacccacctgacattattacaatgcggttttgtttgggcatatgaatagcagttttccatgcttgccacctcatttggttcaacttgtttgaatttcttaaacgtttaatcatgcccttgttatcatcttaggtctctgagaatattctgaacaagaaggagctggagttctacaaatgggagggcaatctgtcccagctgctgcagaatgtccgcaacaagcttaacgaagtcgcctctgtaagtccaggagctctatttgccacgccactatctcccccaattctttgatacgagcagtttgaaatgttgctaataaccaagctttaattgttccatttgctggccttgcagagctggacccgggaggagaaggaccattgcctggatgaaacggagaagtcgttctcgtattctggagatctcctccgtcacatattcacctaagcttaattgatcacggtgtctgctatctagtcttgataaacgctgtaaatactaaagttcacgtcagtcagacagactgttactggacactgggcagaggtcatttacttactcaaccagttggccttgcctcccatcaaattgccaaattctaataatccttcggtgtgccacttgtctgttgctgtgctagcatctccttgctaattgccaaatgggtaatttaactgaaagttcttgcgttttcaggcgactgaaatgtgacaaaacaaatagcataaatgttgttgatctcctcgacgtattctccaaacaggcttatcagttatcaacatatgtaactcaaatttcgagtgcaaaataatgaagttctccctccacaccctaataaacatacaatttcacctcctcgcaagaaaaaaaaaatcagagaagtcctttttttttttttttgctagttgagagcaacttactagtatagccttggtccaaatttcatccctgaacttttatatcatcaaacatactacgtctttcaactaaaaaaatgtttgcttttttatgtgttgtttacgcgtagcgccaacaaaaagaagatgccacatagaagttgtaagttgtaacaccctccacaccatgcaagctacaaccacttgtctttttttggtttcagcccttatcagccaattacatttttatttaaatactcagattttctttattcatatataagtctaacattttatattacgcactctgaaaataaaaaaacttatataaacacccaccctcccctttcactatacctatacgtcactcctccgtctcccgtcgggcggcatcaccgcctctcccctccttagcgacgcctgcaagaagacgagctcgagctcctctctcccctcctcggtggcagggacacaaatcgaggtggcgtggtgttgatagggacaacggcaatggatctaccctatataacgacctcgacgacggatctgccgaaagcggtggttggggttgtgaaatagctggcactggtgcagattgaggcgccaatgactggcgaagcttcccggtgacgtcttcccgtgacggagtgtcttgccatcgtatatgcccttattcttccctgccattcccctcgccgtctttgctaccattgcagagtccgtcctcgagctcgcccgatctgcacgacgatgacaaccatgacctcgtttatggctataagggcgagaggcctcttcccaacgcgattactcgcctaatcctcacgcgtggctctatcgagaacacatgtgcctcctgtaggattcgtgcaccctagcagatccctccttcttgacgcgaatattctcgttgggcagggcgagaccgcacgtcagttaggagtgttgggcaatggtctaagaagtacacgaagcttaggaacaaattcatatcaatctaaatgtggttaactcgaccataattctaggaaatacatcagacatacaacaattcctaatatataacttgtatatgtagcggttgccaacgttgtgatcggaggcggtatataataataatcatagtttgagaactttctaaaatctccaaaactttagaatttgtcagccccgggcatgaaaatatttcacttgaaaatgccttttagaaaaatgtaaaattgtattcaaagttcaaacaactttagaccagaaatttcgcaatttcggatttattggtgaccgatatttttttagctttccaaaattgttaaccctgcatatagtctattataccacttttggtttcagtttgtttgtttttttcctccatttgcattagttatcccattggctacaagctaggcctgcacgcttaccgccaaaaatatcccctcgcaccaatcgtctcctcctgcatatgatgacgagacgccaccggaaagcatctccgcctaggcatctctgatctctccagggaggggattttaatctctcaagagctcgtcccctccgttcacatatcacttaaataattacaaaaatactttaaaaagtgtaagaagatatgatatattgcttttacatgtcgcgacgagagccctacctaggctctgtgcactgctggttgttcccatccggaaactgtgcgcgcggaaaacggagcaatccattagcgagtgattaattaagtattagctattttttttaaaaaaaatagattttttaagggcaacagcaatgtttatgaccgagttcggtagtaacgtggacccgcatgtcaggcggtagtagcaggatatgaacgccacattgtatgtgtaagatgattggatataacatgggccccactataaaaactcaccaatcctcagctgccgtgactccaactgcgagaaaacaatacgttgatacttattgacattgtacaaataacataacttattatttgttgctcggtagtagccatatgacctagtagtacttcatccgtttcacaaggtaagactttctagtattgcccacattcatatatatgttaatgaatttaagcatatatatttgtctagattcattaacttctaaataaatatgagtaatgctaaaaagtcttacgaagagagtagctatttactactttcacaatgtatcttacctagtagtaaggatattttaatgcctaatacccacttttcatcaacattgtggatgccctaagtaactttcgtatataaaccttttacaaaaaacactgtttagcagtttgaaaaacgtgtgtacggaatacgatggagaggggttggaaacctgggtgccgaacagacccagtcgttctcttctgccggctcaatttgtcgtcgtcgtcgtcttcctcctcgatccatatatttctctccccattcttcgattcctcggcgaccacctgtgcgcattgcgttagcttttgtgtcgtgttgctggctagctatagcttgctgctgcgccggcgagtgatggaggtggagagccggtacgtcgccgtgaggcaccacgtggaggggctcccgtcggaggacgacttcgaggtgaaggcggcgagggtgaggtggtggccggagtccggcgaggtgctggtccggaacctctacctgtccgtggacccttaccagctcaaccgcatgaagcgccgcagcgcgtcgcacctcgccgtcgacggcatcgtccccggcgaggttatatgctgttcaccctctctatcgcaggctagccttcacacacttcgtcgtcgagctcattttttctcgtgtgttcgtgaagaggatcgacgcgtacggcgccggcgaggtggtggcgtcggcgt

SEQ ID NO: 8807 - DNA, 34860 bp, Oryza sativa
atgggcactggatcctggataaaaggaaagctccaaatgaaccctgctatatgtacgacttctccatccaatcggcgtatgaccgaaacggcagagcaacacactacatgacggcgtgaagcttggtatgacgtatagcatgttgctaacactgcgtacgccgtagtcgtccaaaagtcatcacatccactaaaacatagaacacatcatcatccactaacaataattacatatcaaatctcgtgcaagcatacaacatcatcatctacaatttgttgaattctacaaatcaaaatacaagcatatttaatcatcacccccacatcatttccataatattttaacatatctatttattatttttataatatttagaatatattcatacatatattccgtagcaagacacctcagtatctcacttagtggttgaaaaaaacaaggcaaaatgaataatttaacctcatgtttcccatcatataactaaatctgaaatctcctaaccgctctatatttttttacaacccagagtaatccagcattcaccgttttaccccagaatttccaccaaatgtcatataggactagcaaatccagtaaattttaaagccatccaagccagtgtaatgtaacatatgctcgacagcaattaaaaaaaaactgatacattactcctagcctcctaggatgactaatgcttgctaaaaagactatgaccaagctaaaactttcaagagtgattttgctatgaggtataagaagctaatacatttttataatgcaagatttagtacaacccagcattggtttcttaggtaacactgtaacaggaggtatagggtgtgtttagttcctgaaaaaaattgaaagtttgggaaaagttgggagtttcgaaaaatagttggaagtttatgtgtgtaggaaagtttttgatgtgatatgatgtaatggaaagttagaaattttgggtagttgaggtgaactaaacacggccataaaacaaattgttacctcccaagaatcgtaaaattcataaactgtcaacttgaaataagccgatgaacataattcatattagaacagaacactacatagagctgtagaattcaaccggagatagattacattgcttgaaacaacaaactctgcccaaacccaaagcagagcaacactctagcagtgtgcaggaatggcaactcgatcacacactcagagcaacactctacgacgtgaggtaggggatcatgtacgccgacgacgccaatgtcccgatcaccttcgcctccgtgtccgggaagaactcggcgcccgggagcgccgtcacggcgccgccgtccttctcgacggcgaccgggtaggtgagcaggtgtccggggaggtcgccgtggagctcctcgccggcgtacagctgccagtgcctgtcggccatcgcgttcactctccggacacactccaggctccccgggtgcacgaagtcgtcgtgcagcatccccaggtgctcgtaccacagcgacatccggaagccatggatctggcctctcgcagcctgcccattgacgttcaggtggtgtggctggaacgctcccatggcgatctccgagtcccgcccgccgtccatcgaccgctggttgatgttggccgacccgacgatgatgtactcatcatcaactgataaaagaaaaacattgaattcggtgtgaaatttagagcgagtttaaccgtagtggttgaaatttgcaactagtagttgttgttacctatcatcatcttggagtggacatagatcatgaagcggcgcgcgttctgcgccttggcgtagtctgtgtcttgatccgggcgatgtgcaggcacgtactcgccatggctcttggcctccctgttccccaagcagaagaaggtgaggtaatccctcgggtcggcgtcgctgtgattggccttgagcgcgacggcgatgtcgtagtacatcatctccatcgtcctcctctgccagtcgaggatggcctgcatggcctcgttgccagggtggccctcgggccacatcggcaccacgacgtagacggcgaaccgctcgccggcggcgatcttgctcacgatcttgagggagagctccctcgggatcaggttcaccgcctcgacgtcctccggcctgacgccgccgccgggcctccacccgtaggagctcccgatgaagtactggttctcgatgtagatgaagtccctggcgcggcggatggcgtggatgtacgcgtcctggatgctccgctcgatcacgttgttcttcccgctcacgaggtcgaggcgcgccgccgcctccgggctgctcgggaagccgtcgcacgcgccgccgtcgatggagcggaagagctgcacgttccatgcgtcgtcgtggtggtcgtcgttgttggtgccggggagcttcaccggggacggcggcgtgatgaggtgctcgagggcggtgaggttgacgaggaggtcggcgtggccgctctgcttccgccaccgctgctcgaagttgtagaggacgtcccaggcgatggggccctcgagcttggagtggatgtcgtgccatggctccctcggcccgcccttggcgagctcggcgtcgtcgatgctcggctggtggaagtccttgtggtgcgcggcgtcgagcgtccggaagagggagtgggactgcgtgtcgtagcggccgtcgcagaggtcgaggccgccgacgaagctgacgatgcagcggatgtcggagccgccgccgccggtgccggccggcatgtcgtggtcgacgatgacggtcttctggtggtgggtggccaagagtgagaccttcgtgcccatgatgaagctgctgccggcggcggcgtcggcttgccgcgggcagaggacgcagtgcacgtcggagtcctcgaagtaggcgagcgtgtcctcgtcgtgcgtctgcgcgacgctgagcttgatgccgatggcgtggagcgcctggatggaggagacgtcgttccagaccagcatgagcacgcggacgccctcgctggccttgcgcttgaggagctcgccgatggtggcgtcgccgccggggcgctgccgggacgggtcgcggatgagcgtgatgtcggtgaacaccgaccagccggtgatgtatatgaggtgcttggcgttgctgatggcgtcgaacacgtcctcccagcaccgcccctgctggtagtgcgcgccgccggcgagcgggatcctcggcgcgaacgtgtccggcgcgtgcgcgtcctggtacagggtgaccctgcacccggcgtgctgcttgaagtaggtgcacggcacgccggggtacgccgcgtcgccgacgccgccgccccaccacttcccgccgccgtcggcggccacgtccttgaactgcagccggacgtggatggtcggaccgtgggggagcttcttcttgtcgtcgccgaggatgtcgagcttgcgctcgacggcctcgccggacaggaggtccctgacggggaggtaggcgcggccgatgagcttggcatcgacggacagcgcgaccttgacggagaagacgacgttctcggcgaagtgggcgcagtagaagtggaagcgctcgtcccaccgcgggctcaccggctcgtcgtcgatcacccgcgtccggccgagccgcgccctgccgaggtccaccgtcgcgtacagcctcgtcccgccggggccaagcccggtcgtcttctccaacccgttctccagcccttcccaccactgcaaacaccaacaccaaccaagcacaaagattcagaaacacagcaagaatcagggaaaaaatgtcggcgaggtggatgatcgctatggatggcatcgacgagtgaccttgcggaagccctcgggggcgttgccggtgaggcgggtggggttggtgaggttggtggcctcgaagatggtggcgtcgagcgtgccgtgcatcagcaggtgagccattgctgctgctccttcagtttcagtgtgtggctgtgtgcacttgacaaggctgggaagaagctcgcaaaacaatggtgtggcatgaggcttgacgggctgccaatttataggcaggcgctgctgcacatcgcggagctgaccgcgtacgtgctagattcagaatttcagaggatcaatcacaacagttactaaaacacacacacacacaaaagatcaacggcaacagcacacaagctcgtgaagcacgttcgatcgtactaggaaaatatagtaaattggtggggtcaatgcccaatgagatgttctgtagtttgttcactacagacttgcaggcttcgaagttcaaagtgtatatgtctctgacatctcagttttctcggtgtatagttttcttctgcctcttgacccgtcttccccctccgatttcggtggttcgccaccggcgagggtcggaggacgggtccaaccgtcatcgtcgggtcccttaatagtatagtgtagttaggttggttctttctcgtcgggtcttttatgtaagttgggttcttctcgagttgggaatctgctggtgagattccatggttgttagagtggatggcagcggcggttggtggcggtggagatgtgggaatatactatctgtggaggaatcaggcggtagaggcatcacctctaggcggcggtggcttctcatggcgccggcttgatgtcttctcggctagtagttcaggcctctgtcctagaagttctggtggtggcggtcaaaggcacctactatgcggccccttagcctgatcgtagtccaggatctcctgacccgtggggttggcaattggggcgtcttcggttacatcgcccgaaggttttggcggtggcggttggcggcgcctgctgtggctaccgttctacttggttagaggttgggatctcctgaccggtgaggttggtggcttagaatgacctcgactgttgcagctacttatggtggccagcgacttactaatggagagtacaatggtgacggtggatgggaacttccactggctaggttctagccgtcgggatatgcaggtttcctcatttccaacctcatgtgtcggcctaagtagacaacagttcattcgccatcattcgagttcttcggtgtttatgggtggctggatttggattcttcctctttgtttcctagcagtagtatccatgtagggtttgttgttcaggttgagctcaagctcctcaaatttaatggcgaactccatggagaattcctgctaagctcggcgaagcccataccaaaatctatggctcagcaacaagcctccaattttatgttgtttctgtggaggcaaccaaacggaatcactggttcgtcaagcggtgtgcacgtcaaaggagacccaagatgcaatcatcgcagcaatgtcgcatctcactgtcaatttgcacctctgctactgcttagattcaataggaagtttgttacattaggctgtgttcttttctcctctttcccaactcacttccctcgtttttcatgcgcacgctttttaaactgttcaacggtgtattttttttgcaaaatttatatatataaaagttactttaaacaatcatataaatccattttcaagttttttaggctaatatttaattaatctcactataatcacgtgttttgttttccgtgctgggaggcaagcttgagaacctaccctcccgaacacagccttagtgcagtttcttgtcatttggaaatagatggttcgatgctttttagctaatcggtttggtgatgtgctagagcttgttcccctgaactttatcgttattaatgaatgtttatgttttaaaaaggaaactgaggaattttagagaatttaatgataataaactaatttctatgaaaatcctgtaaaatttatacgttctaaataagcatagattgcacatagtcgagaccaaaggtgaggtaatgcataccacaaaccaaaactagtttgcttgaaccttgtatctcaatgggaatgggcgagataggtgtgctttgtgctatgactagaggcattatctaccgaaattgacacacgctagactgatttgccggtggaatcagccgaactaaaagaaaacaaacattacaaagcacatatgaccacgatttgttgatagggaattcgacgataggaatactttcatgggagtcaaatcagacaactccatcctctaagaattcatttctattctcaatcattcaaaaatgcataaggattagcaacatattctatgctgagtggtttatagatctcgactcgacctcaagtccttatcgactcaaacatgagccactaccgcaatgacttacatcatccacaagaccacaaagtgtaacctataaatattccatatctcttcattcatcatccatagggaatcatgcgtgctaatatctactatctccgtcttaaaatatactcgctctatttcatattgcaataagttgctttgattttttaaaactatttaaatttgatcaagttcataaacaaatttaataacatctaaaacactaaattagtttcgttaaatctaatattgaataaattttaataatatatttgttttgtgctgaaaatactactatgttttttataaacctatagttaaacttaaaagagtttgacttaatataaaacgaaaaaaataataacctgatactgaaccaactttataacttttttagtcatattgccataagatttctccggatatacttttatatactcttgcataaattgttatggaactttggatgcgcccctaaaacaactgaaagttgcattgcacgggaatgatcacatcacatggacgcggaaactgccgggcagcatagaaatattataacacgttgatctagaattctagatccaagcttgccgctcgtgtaaagcgtggggggtggcctggatcgagtaacagcaacgacctgcatgcagattggaatattggatttggatatgataaaaatgcagatagcagcatttgacgaggtgcccacttggacactcgcaacgctttctctattggcggagaggaatattgtaataagcgctgcattggcattttgtttgtttattggattgatgatgcattggcatttggcagttttggtatggttctctgcagctgcgcttcgcctattggtgccaatcctatgcaagttggcacttggcacagtggaagtccagtgccttttttttttttttggagaactcagtccaatgcaagtagactgcaagatccccccctatcctcgcccaattgggcccatgaaaacaaacactatgttggaaatggagaaaggtgatgcatggttgaacgtgattatattattgattggatgaagagaggtttagtactagtatataataacagatacaatagcagactataagctagctctaaacacatattgagaagatgaaagaatatagagatgagcgacgggctacacatttgtagccatctgcagcatgaactctaagatgtaatgtctgtatgataggtatgaccagataatatataatagtatatatatttataggtaactattgtatgaattggctattaaattgactatatatgacttagagttagtagttggctacttggctatactattaaacatgctttaaatacctaacggtgactattaaaactttcacatgctaactactgaatttggagtatatattactagatgtcagtcttatttttttccccctttccttttcctagcaataagtcaaatttcatttcctgttatttcaaatagtgcacagctcaaatagacacatcaaacatgtgtagtataggaatggcactttgtacaatgtaatcatggaaaatgatcacgcaacaccacacatatacgcacacccgggattgtattttcgtgttttcttaacacaagctcaaactgacggagacagagagcagagataaaatccattaatttcgcttagaaaatccctaataaaaatatacatacatatatataatctaaacataattaatggtcattcctaatgtaataaaacatatatagctgaccagtaaaataacatatccatatgtctcaaaagataataaaatagacactgatagttgttttgtttcccgtatggcagaatggcacacgttttatgattttaagttaaaaaatggttatgaactacaattatttgtacatgttaattgaccttttatttcaaagtagacgccatgcacctacccacccacgagcaccaccacctctgcctcagcaggaccgtggcgggtagggttgtaagcgggccaacccacaaatttatttataggtcaaatagatgataacgaatggatttttgtgtcgtgattcgatttgcgtatttagagagatgcaagtggatcaatctataaactcatttatatgtcaaattaataggtaacccgcgagtcaaatccgtggattacctactaattttatctataagcgggttcgcagccaagcccgcttactcgctagcggcaggcaaacggcagcaccgttttgatatcgcttgccgccatggagccgcggcaagcagaacactcttgttttggctgcaaattaaacactgcatttaaactgacgttctttgctaacaacatatacttctcaattcttttttgattgctcctctggtctgatctgactatatatgtatttcactttagtgaaaattatctttgaagagtttgtaattgagcaacatgcatgcccaagaacccaagtgctccactgctcatactaccacaacgacatctgaaagcagttggcatgccctcttgcaactgtattcaggtggtacggctgttgttcatccactgtttgttgatgctggcagatggccagatccaacgatgatgtgctcgtcgtcggctgaaataagccgagcagtgaattcgatgaaaattcagagggaatttgatagattgaagcattgaaatttgttgtgctggaatattgagcaaacctacgtctgggtcctctgggagtgaacaacatacaccatgagctggcacatcttttgttttttgtttttttgtctgacgaggagttagcaatttcttaccaaagttttgcatgtttaaatttccggttaccttattcagaaatccataaccaccgtttaattagctttgaaagggagtgtcctatgggaaacaaaaatatggctaccaccttaagggtgtgttcggatgcctcttttcccaaccatttctctcgttttacgcgcgcacgctttttaaacggctaaacggtgcgttttttataaaaagtttctatatgaaaattgcttaaaaaatcaaactaatccattttttttaaaaaaaattagctaatacttaattaatcacgtgttaatcgatcgttccattttccgtgctcagtatgctggaggggaatgagaaccagctaacacaccctaacggtggtcaaatacgaaaccctcattttttaataaatggttacagttgactttttaacaaatatttaaccattcgccttattcaatttattttgcaaataaaaaaaatttaaatcatacttagagaacatttgatgatgaatcaagtcacaataaaataaataacatttgatgatgaatcattatatttaccaattgcaaattatctgccaagtttctttttttttttgattgggggggggggggcacaagctcaagttgtgtcacacgaggctctgtccttgacttaattctaatgtataggatctttaatatttttaggttcgtcattgtgtgatagtgtagtgtgtgatacacacacgatagatgtgtctatttgagctgtactatttcaaagacgaggaaatcaaatttgacttgaagctatatcaaaaacaaaaacctaaaaaggaaaagacggacagctcatagtttagtcgcatgtgacagtatttttacccctagtcaccgttagattagaaacctaactctctcaagtcttatccattattaaattagttcaaccacagttggacctcatcttttcgcttatacttatacttattagctaaaatttaaattttcaatcttaaatttaaagttgattttgggtttttcatcgaagtttattttccagtctttacttctagatcgctaagagcaagtttaatagtatagccaactactagctccaaatcatctagggtgtagctatatttatggcgccatatttttcatcaaaaaatagtcggcatgtatttacattggaagttcctaaattacatatgtaattttagtgtatttacaatgtaaatctcaagagtacatatgtaagtcttaaaattacatatgtaaattcaaaaattacatactaattacatatgtaagtggggtataaatgagttgtaactactctctaagtggcttaaaaaaatgactgtagcatatgtcgccacaattatagccaatccgatcatctatagccagtttatatagtatttttctctgtactattaatacatgatcccacatgtcatacacacattacgtcttggagtccgtgctgcagctagctatagatttgtagcctgctactcttctctcttatcttttatctctttaaaatatatttatagctggctaatagtgtgctattgtacctgctaacacgtatataaaagttttattcaaaaattacttttcgtttgcaaatatatcgtttgacttattacacgaataaatgaaacgatgggctaagttcaaaagtgtcgcaattaacaagcatatactccctgtgtactactccctccgtttaaaaaagggcaacctaggaggggttacatgctcctagtatctgtccagattcgttgttactaggaggggatagttgtctttttatgggatggtcacatcgttattttttttatggggagtacgttccaacttccaacttccaaggttagtgtactgtgttttgttttttttttcacgtgccaattggcaattttcctttcgtacgtgtgggctctcgtctccgccaataagaaagcgttgcaaatgtcccaagttggcaattttccttgcgtacgtgtgggctctcgtcttcgtcaatgctgctcaagtgctcatcatttgttggattaggcggtgcttggatctagggacttaactttagtctctatgtttagacactaatttagagtattaaatatagactacttacaaaactaattacatcaatgaaaactaattcgcgagacaaattttttaagcctaattcatcttgcgaattagtccaagattatagatgggttttattaataatctacgtttaatatttataattaatgtcaaacatcagatgtgatagggataaaattgtagtcgtatctaaacagcgtcgtactctactccactctaccccaaggtcccccacgctttacacgggcgccaggctttggatctcgatccacgggctgctgatcaaaagcacgtggtgccggtttctgcgtccgtgtggtcaccgatcagctccatgctggttcctgtataattttggcccctggctaacaagccaatttggagatggtgagagtgatactccctccgtttctgattgatcacctaactaaaaataaaatcagaatttatagattgattgttactccgtacataaccttgtcttcttcgtgtgccgtgcaaaattgtgtatataacctctccggcaaaaagaaaaagaattgtgttggcttattagcgcatgattaattaagtacccgtccgttccaaaatataaatatttttggacttcgacacattcttcgagatactactttgaccaacaatatctataagataaatatgttttaaataaaaaattgcatattatgatagtttgtttaatgataaaaaattgcaggaattcaaccatgcggatacagtcactactacttacgcgccttcgacatgtacttaagaaataaaaacactgaaattaaagtcatccggccccaccctcaccctctctagctgatgattagtcgattactgttttcctatagccatcgttatacacgagtttctgtggtgttagcgttgatcttttgctaatctctgaatctagcacgcggtcggctgcctataaatttggttgctcgtcaagcctctcatgccaccattaattgcgagctgcttcttcttcccgttcttgtcaagactgaaactcactggatcatcgaggagtggcaatggcggagcagcagctgatgcatggcaccctcgacgccaccatcttcgaggccaccaacctcaccaaccccacccgcctcaccggcagcgcccccgagggcatccgcaaggtcagcgaccgattccatggagctagatcgatcgaacctcgccaatgtttttctacttcttggttgccttctcatggtgtttgtgtttatgcgtgcagtggtgggaaggggtggagaagacgaccggggttgggcagggcgggacgcggctgtacgcgacggtggatctcggcaaggcgcggctcggccggacgcgggtcatcgacgacgagccggtgaacccgcggtgggacgagcgcttccacctctactgcgcccacttcgccgacaacgtcgtcttctccgtcaaggtctcgctgcccatcgacgccgcgctcatcggccgcgcctacctccccgtcggggacctcctgtccggcgaggtcgtcgagcgcaagctcgacatcctcgacgagcacaagaataagctcccccacgggccgaccatccacgtccgtctgcagttcaaggacgtcgccgtcgacggcgacgggaagtggtggggcgccggcgtcggcaacgccgggtacgccggcgtgccgtgcacctacttcaagcagcacaccgggtgcggggtcaccctgtaccaggacgcgcacgtgccggacacgttcgcgccgacgatcccgctcgccggcggcgcgcactaccagcaggggcggtgctgggaggacgtgttcgacgccatcagcaacgccaagcacctcatatacatcaccggctggtcggtgttcaccgacatcacgctcatccgcgacccgtcccggcagcgccccggcggcgacgccaccatcggcgagctcctcaagcgcaaggccagcgagggcgtccgcgtgctcatgctggtctggaacgacgtcacgtcgctgcagatcctccagtcgctcggcatcaagtggggcttcagccagacgcacgacgccgagacgttccagtacttcgaggacaccgacgtccactgcgtcgtctgcgcgcgccaccccgacgccggcggcagcatcgtcatgggcgtcaaggtgcccttcgcttccacccaccaccagaagaccgtcatcgtcgaccacgacatgccggccggcgccggctccggcctccgcagcatcgtcagcttcgtcggcggcctcgacctctgcgacggccgctacgacacgcagtcccactccctcttccggacgctcgacgccgcgcaccacaaggacttccaccagccgagcatcgacgacgccgagctcgccaagggcgggccgagggagccatggcacgacatccactccaggctcgagggccccgtcgcctgggacgtcctctacaacttcgagcagcggtggcggaagcagagcggccacggcgacctcctcgtcaacctcaccgccctcgagcacctcattgcgccgcagtccgcgatgaagctccccgtcatcggcaacgacgaccacgaggcgtggaacgtgcaggtcttccgctccatcgacggcggcgcgtgcgacggcttcccgagcagcccggatgcggcggcgcggctcgacctcgtgagcgggaagaacaacgtgatcgagcggagcatccaggacgcgtacatccacgccatccgccgcgccagggacttcatctacatcgagaaccagtacttcatcgggagctcctacgggtggaggcccgacgacggcgtcaggccggaggacgtcgaggcggtgaacctgatcccgagggagctctccctcaagatcatgagcaagatcgccgccggcgagcggttcaccgtctacgtcgtggtgccgatgtggccggagggccaccctgacagccaggccatgcaggccatcctcgattggcagaggaggacgatggagatgatgtacgccgacatcgccggcgcgctcaaggcgaagaggatggacgccgacccgagggattacctcaccttcttctgcttgggaaacagagaggtgaagaggagtggtgagtatgtgcccggacatcacccaagagatggcacgccatatgccaaggcacaaaagacgcgccggttcatgatctatgtccactccaagatgatgataggtatgctcaaatctagccccgcaaatttcaacccttcaatctagtagtaaatcctttccaaattcacatcaaattctagctgatataggataaactaactgggtggtccacgcaattgcgcggctagcacccatataaaattatatatttttaatatgattttacttaaaatttattaaataattatctcattgtcttaaaattttgaaaaagaccaaacattatcatcccttgctacccttacttctgtcatatcattttttttattaccttgctcgatctaccactgtttctattcattcttcttggaacctttaaaaattagatataaaaacttatagttttagagtttattgttctgttggccttcttttttataatttctaaaagtcacatatactcctctacaaccatccactgcatcttctctttattgtcattgctattttaaaattcgaacataattattgtttaggttcgtttttttactttctaaaagttccactaaaagtcagggactttgtcactatactcctctacgactcgcccgctgccgtccttcttttttgtcattgagattttaaaatcaagcatgattaccattgggatttatttttttactttttaaaagcccgaaccttttaaaaattgaatcttataggttttagagttttattgtctcgttgggtttcatgttttttataatttttagaaatcccgtcaaacactgccactatactcctctacaacccgtccgctgcataatctttattgtcattgggattgtaaaaatcgaacataactaccgttggaattcattttttactttctagaagacccaccaaccatcgtcagctctaccattgtactcctatacgacccgctgcctctcatttttattgtaattgagattttaaaaatcaaatatgattattattggggtttattattttactttctagaagtccctcgccaaccgctttgactgattgcttcacaacctgcccgtcgtccttctttttaatcgtcattaggattctatttggtgttttattaatattttttagatgtctcatcaaccgccaccactctacttctctgtaggcttgttacttaattaatcttgtcatggtcttttctttcaatagtctaatttttattaccaattttagctatttataaattgtattcctaattaaattctttttttctttttctaatttcagaatttattttatttattattatgttcttttgatatttttattttttattttcaattttagttgtttcaaatttgtattcatactttaactctctctttaatttgcctaatttcggattttattttattctttattccgaattttaattaatctaccatttagttcttatatgtactcttatttcaatattgcttatatttaattccgaatttaagttaattttaaattgtattcctacttgaacttttattttcttttcttttttctaattttatttttttattctgaattgtaattaatctcgtattggattcttgtatggactcttctttcaatattccttatttttaattcggaattttagttatttataaattgtattcctagtcgaactcttcttttttctttttctaattttgaaatttatttttttattattccgaattttaattaatcacgtattgggttactatatggactcctctttccatattgcatatttttaattccgaattttagctatttttaaattgtatttctaattggactcttcttttctttttcttttgattaatgtgagaatttctaacctccacagcgaacgtggtgtcttctttcaaggctgttttaataatataatagatagatagatagatagatgttctaatgtgcttatcatgtcatttggtacctgtacttttcaaaaagtttttaaaaattgttcgtttgtttcagtcgatgacgagtacatcatcgtgggatcggccaacatcaaccagaggtcgatggacggcggccgagactcggagatcgccatgggagcattccagccacaccacctgaacatcggtggccagcttgcaagaggtcaaatccatggcttccggatgtcactatggtatgagcacctaggaggcgaaccgcacgacgacttcctgcacccggggagcctggagtgtgtccggagagtgaacgagatggctaacaagcactgggagctctacgccagcgaggagctccatgaagacctcccggggcatctgctaacctacccgatcgccgtggctaaggacggcacggtggcggcgctcccgggggcgaagttcttcccggacaccgaggcgccggtgctggggaagaaggcgatcaatccgttgatgacccccgatatcacctcgtagatcaggtgaaagtttgtgctggtggtgcatgcggagcaaaagtttgctagtcctacactggagtgatgctgcttccatcagaatgtgtttgtttttcaacggtgtaagttgtcctagaatgtcaccctctatgtaatgttgaatcttaattccattgtctaaaataaccaaatttgtaatgttactggaacaaattttgtaatgatgagtatgcacctgcaaatcgatcacccagaggaggccaaccaaataaaacatgccctggagactattggagctgaagttgcaaggctggccataaaaatgtttagggattaggactcatttggataatgggtaggaatgggattgggatagggaaatgagtgaagggctaggatgagataggaagaatggagggctaggattaaaagtaacctttgaaaggtacgaacaaaattcccaatccttctgaaacgggccctcataagtacattcttctgctagctttggtggaaaggaacaagtccattttgactccctcaaatattgcttcaatctaatttatatcactgaaccgcaataccggatatcttcacccaaaaaaaactattaaaaccggtgtagtttgactccctcagcggttttagaaggcggtttcgctaacgtggtgctttgacttggtccaacctattgagtcatcgtgtggggcccacctgtcaatgacccttatatctcttatcttcctttcctttcccctccatcggatctacgccacgccgccgcccctcttcccccttccactccactccgccccttagggagtcactgacatgtggttctcacatactgacgcatctggttggaccaagtcaacgtgccacgttagcgaaaaccactctcaaaaccgctaagagagtcaaattgcaccggttttaatagttgataggtcaagatatccggtattgcggttgagggatacaaatcaattgaacctatattgagggagtcaaagtgatcttattccttgttggaaatgcaaggaaaaagaagatagcaacccaggtcaattttagcccaacaggtgcggggtaatttgggccaacaaatgggttattttgatagaacaggcctccagctatacgcaacgaggaacatatcagtttcttttctgaaggaagggggaaaatagctctagctgaagtatatcctcgaataaaatttagaaatatacattatatacatgttttgaaagattcatgaaaatatacgcgtaccgcagttcagaaatacgcgaccggttgttttcctcggcatggagccgcgagaccgacggctgaaacatgcggcatactggccggtgccgcacagccgatctgcgtgaccgtgcggtgccgcgttgctggcgggatcgacgcagtaccgcgcgctcgtgtgtcgcgggattgttccggccatcggtctctataccgcgaaaaaaaatcggtcacgcattttcaaaccgcggtacaagtatagtttcacaaatctttcaaaatcttgtatataatcataaaaacgtaaaaaaataatgtacattttcaaattttattcgtgtatcctccagtaaaaaaaataccaatcgtttcggaaatattttattgggtgtagataaagatagtgtgtgtcgaattagcataataatttttttgtgtttaacacaaaaaatagcgatcaagtcaatagattagggtattcatatgtgaactactacatcatacagttaaccgtaacatgaatgtctacagggcccagctgttcttatctttgatagttcaacagctagcgttactaggcaggcagcccatgcgaagtattgaatcagggcaggacgttgctgttccatctcttcccatcattgaggtcgtatgtgatttcctttttattttaatgtttcataacgcattcatttgcttgcactataaaagcaagaggccatcaaacaagaaactgttcatcgcagcctttgccattgcctaaagcaaacgtgctgtagaataaatgagaactgttcactcgagcagtcgagcttaacttgtggcagaagcccagaaagataccagagacaattgctacaccagtttgcatttagtggtcactgtttcctggctgaagacagaatttttggaacgcatgaattttaatttgatttcgactcataaactacttcaagaaagaaattgtatttcagacgagcctactattggcgtgagcaataaaatgcatatatttttccagcttttttttaagaacatatttttccagctttaaattcgagatgacagacacaggatttcaagggtaagtagtcacgcaacaattgcagataaaattcaccggaagaatacgagataatatcaggagtggatttgttgagggaaaaaatgggttgagaatgaagtattaggccaagtttagaatatgctaggtataatatagctacgtatactattttttttttaagaaattgttgcgtattcacgtgaacaccaagaactccctaggtccatccctgagaaacttgtatagattaaggtcccgttcgaataaactaaaaaaagtggacaaacttttgataaaagtggcacgtttttcaaactgctaaacggtgtgttttgtgcaaaaactttctatatgaaagttgttcaaaaatatcaaattaatccatttttcaagtttgtaataattaaaacacaattaatcacacgctattaacacctcgtcttgcgtaaaacacttaatcttttatcttcatctccaggagattcaaacaccacttaatttgattcatagatatattttttttgccatagttgagtaaacatgagcttttacgcacaagaggtactcgacagtcagcggaacaacagtagatactagtactagattagataaaaaaagagtaaagtgcacacgcggtccctagacttgtgtggtgtgtcaactagctaggtctctgaactctcaaaatgaattttttggatctctcaacttgtctcaagtgtcatataggtctaaatgggttccaacccgctccatgtgctgatgtggcaggccatggtggcgcctacgtgttagtaaaaccgatatgtctgccacatatagaaaaaaaataacatatttttttctcctctcttttttcatttattttttcaaaattaaaaacatcattttctcctctctttttaaattttattttttctacatgattgacatgtggatcccactaacacataagcatcaccgtggcatgccatgtcatctcacggagcgggttgaaacccgtttggatttctatatgacacacatgacaagtttggggacccaaaatgtattttaaaagtttagggacctagataatacatatatatacaagtttaaggactgcccgtgcacttcactctgaaaaaaaaactaagaatctagctccagcttctagcacctatcatccaggaaagaactcgacttgcctgttcaaacagcctactccagctcaaaagtatcagcttaagccaaataaacgacaccaatcaagggttagccaaacatcaaccacatcaggttgaatatttaggttgattttctaaccagaaaagctggagctggagccatgtgaaacactccataacaatagcaggaccagggcgtgcaccgttcatcatgcaaggaatatacaatttttcttaaggagggcttagaggacccagcacagcaatggaggagagaagtccacattgtctccatcttaaatcttggcatgtttctgggggaggaggagatggaacttgacaaaattatcaccactcattcactcacaaaaagtcactataaggatctcaggctgtgtttagatccaaagtttggatccaaacttcagtccttttccatcacatcagcctgtcatacacacacaacttttcagtcacatcatctccaatttcaaccaaaatccaaactttggatccaactaaacacagcctcaagctttcaacacggtagctctatgtaatagtgtgcacgcatgcctgccgtttgtagccgcacatgggcgctatctatgtgcagacgtgcagttaacctgggaccaaaaggaccggacggaacaactcagccggagtagcccggcagcgagagtggacgttgccacacggcagaaaggctttacacggtaccaagattccaagacccctcaatgcatcaaatcatttctatcgatccacacgtctacatagatcaaaacaatgaaaaatacaaagtacatcgagtagtaagaatgagagaagatatatctgattgcggggtgtgcatgttgaggctggtttgttcagagagaacctcagatcctgggagaaagtcaggtcaggatgcagctaaagctaacactaaacaaggcaacaactactggtctactgctgctacaacagtggtgctaccacctggatgcactataatatatgcatcgtcatctgcatgtaatgtaactacccgtcgacagcctcataattatgcccggccaactctcctggcccttctcccctaacgttttcccaagtttccatgccaacgcttccggtgtccccccaagcaatattggtgatcatggccaggcacgtactgacgtacgtattcacacatatagattgttaattaccacgacttgacaaagcaaattaaggctagctacagcacagcacagaactatgacccattcttaaatggatcaaactatggacaacagtggctagctacgctaaagcacaagcaagcaaaacgtgtgcgcctgattggccaatcgatcctcacaatttacccattgaaaggaacgacgttattagaaattacagaaaaatgaagatccagccgtgttcatcgattgtccacgaaacctcgaacatttgcagcccaaaaatatcctgtacaatgcagcgagagagcaattaatcaaggggtcattttcgatgaggcataaggcgcgtatactgatgctgacctgccgctcgctcgcgcactcgataatcgtcaagaaattggccacgtcaatcacggccacgctatcacacgccagcgaccgacgcagtcgggcactatgtgtgtacacagggttggtggatccgtgtgcatatatgcgaggatcatatcaatgcccggtccagtgatcagctcactcactcactcactccaggccagctgatttgctgattaattcccatcggttgatgcagcatggctagtgagtaacgagccatcaccttccttagacgtttgtacgtacgttgctaccttcaactgctacatctgcatgcatatatcgatactacctctgttttagattataagactttctagcattgcccatattaatataaatgttaataaatatatatatgtatctagattcattaacatatatatgaatgtgggcaatgctagaaagtcttataacttaaaatggaggaaatacatatacagcgacagctctagtaaggccggtgcaagaacagaaactacatattttctacaactaggtattcatgcacgtatatttatgtagtcatataaagttctgtgaagatttccaacaagacaaagtacagagccaactcaagatcaaatgatcaatcgatcgagccctagctagcttagttttcgtgtgaccaaggtggcatgctggcattgtaccagcagtacagcgtacgttctggtagaagcgagtggcgtttggtgctgacccaacccaaagcacgagaaagccccccatcgtagttaattcgcactgcttaaaaagttcagtaaatttaaccaccactaccaggactaactttattgcgctgctgtcctagctaaacctgcccctcatccctgggatacttcaggtttcagtgaaataacccaagttagagctacccatgcattcataggatttgagtacttagtagttagtagctagtgtggcagtggagatccaattaatctaccacaattcgagcacatgtaatgtactacccgcaaggcagagctagctagctactcttctcctctcaccgaaccggatgcatttgccccgttgagtgcttggcaagggagtgatcactaaccactggccagacagtgccttctagttgcacgggaacaggattagcaaggggattaactcctagatgcaggttttgggcaagtccccaacaactcaaagcagtatgtgtaattgtgtatgcatgatataatgcagcttgttgaagcaaaggatgcggtgtagaacactgtacctcttgtggactttgtttctgacagaggtgtggcaggtctgatcatcgtcatccgtttcctgtaaccaaagccgcccaactcggacttgcccccaccgtttacctgcaaaaatgtgaaacctgcagaaaatgagatttaatcatcatcatcatcaataactgtagtgtcagtataaatgctgagagtatacagatcagaaatttatatataggggattatctgcaggtgtatatgttgtgtatgttgtgtacgggcgtgctaccttgcagtctgccaggctgacaaagagcaagcagccctgaaagaataaatgacaaagaattcataagaagatggggtgcctcttcctttgaaacattaatcaatacatttaaacctaagtcatcaacaaataataataactagcatgatggcccgcgcagattgcgcggctagcatcattatattttctctcatataatagcatatatgttttctcattatattattcaaatatattaaaatgacaacataattttaaattttgcaataactttacaaaactactaatgtgtaatattcatattgcattttatatacgtgttagttattaattatttttaagataaaattttagttatttgtaaattatatatattcatatatggactctagactcgtcttttaatatttcttttttctgtaaattgtatttctatatagactatatgttcttcttctaatattatttatttttatttctgaaattttattatttctaattgtatttctatgtggactctaaactcatctttcaatattatttaatttttaatttcgaattttagttacttctaaattgtattcctatattagcattaaactcttcttcccattttttcttaatttcgaattttaactatttgtaaattgtatttttatacggactctaaactctacttttaattttattatgtttattccaaattttagttagttttaagtttctatatggactctatactctacttctaatattccttatttttaattccgaatttcagttatttcctaattgtatttctacatggactccggtctcctcttctaatattccttattttttaattccgaatttcagctatttcctaattgtatttctatatggactccggtctcctcttctaatattccttattttttaattccgaatttaagctatttctaaattgtatttctatatggactctgctttttctttttctccgattaatgtgagaatttctaggccatgagagcgaacgtggaggctcctttttctattcctttaattatataatagataataataatttagatctccatcctattcttgaagtgtggcagtagatgatgaggttgttgattataactagtaattatcatacctgtcacataattgtgaaggtttgagctagagggacccttaagattttcttccttgaatcgctagtcctagcatttgtactgacaatgtatatatgatcagtgtggtgtactagcgtttatagtgctcacctgtcaacggtttttactggacgacaggtcctgacagtccttggcaaccaccacaaacctgcctgcacttttccatgtaaaaaaaggagtgcgtgcatgtgtacgacgagcagcagcagaagaagcttccatccctgcaggaactcactgacacacgtatctgtgtggagccgatggaactgtaaaagcacccggacggaagccccattcaattcgatcggccggacaaacaatggcaacgaactcactccgccattaactccgtttcacctttttacggagagaagagcaagttcttctgctgctgcaatgctgtgtgcgccttccttgccgatgcgccatggatggatggatgattggctgcttgattggggcagttattgcaggccaactgctctgtcgaaagagtgtccctcggaaagtggctttagaagttggagtaaaccttgcagtgcatggcatacatacagcatggagtggtattaccttggttacgaacgcccatcaagtccatttctggagtagtacacactgtccaagcttcagtgtttgtacctggaaagaaatgcacattagccatatgcgcaaggcaaggcaaggcattgagcaaagttagattcatcagttactagtttagctagttagcacatacacactactggacaatgactagcgagtgagcttagctagctgatcggcgacaagtgacaaccagctagttagcaataagagctggtgatggttagctcatctcagttcatccttaggttttcctccagtgaaggccataaatgaggtcgccaagggcgtaggtgggggagtttattaccggcgtactggcagagaaggtggttatgccgctcgccacagttcaccgacagcccaccccagcagcccatgagggccccccatcctctttccatctatctctctcttccactaatctcaccaaagagtcttcttcacttccttctctaggcttattaacagcttatttctgatctctcacatgttcagttttatctcatccctcctgctagatattactgttgctggccccaaccaccctgcatggattacaacacaagtttatcagtaccactgtggttcaaagtagtgtatgtactggactcgtggagttatgaccacaaggaaattgaccagaaagttaattacaatgactgaaggtgtgtactcacttggtcctggcagagtagaaggagagtacaccaactagatctgaaccctggtgtgctactgtaccaaaaggctaaggccactgacagaggagatacgtgacagacaagtcccagttgagttactgtccaacccccaaatctaaccctcttctaccaccacccccactcgtgcgccacagcgctctcacacgcgcgccacactcatgccatgtatgtctatatatatgtgcatctatatatcttagccacattgaacgcacgctacactgcaagaaaggcaagtataggggtggcaggtagtttatattcactggaaaccgagaacttcactcctcccagcactccacactaggaggatgctcactgtctgactgactgactggctgctgctgctgctcattccttctcctactctgcctgcctcctctgctgtgtccttgggagaattcttcagggacagtatccctgcagaggtgagatcatgggacagtcgaagaagaagttccgcggagtcaggcagcgccactggggctcctgggtctccgagatcaggcaccctctcctgtaagtctctatctcactagtgatgatcactagctagctatgttgctctgatgtgttatgccactgtcgtgatagatacattttgatggatagctagtggttctggtttgttgttgctttctttctttttttctttctctttcatggtatgttagtagctaactcaaggtgcttgggtgcgtgcatgcatgaatgatggatgatgttttttttgctacgtgcgttgtggcagtaagaggagggtgtggctgggtacctttgagacggcggaggaggcggcgcgggcgtacgacgaggccgccatcctgatgagcggccgcaacgccaagaccaacttcccagtcgcgaggaacgccacgggggagctcacaccggcggctgcggtggcagggcgggatggccgtgtcggcggcggcagcggcagctcgtcctcaatgacggccaacggcggcgggaacagcctgtctcagatcctcagcgccaagctccgcaagtgctgcaagacgccgtcgccgtcgctcacctgcctccgccttgacccggagaagtcccacattggcgtctggcagaagcgcgccggcgcacgcgctgactccagctgggtcatgaccgtcgagctcaacaaggacacggccgtgtcgtcggctgcgacggtggcagcagcaacagcagtgtcgtccagcgaccagccgactccgagtgacagcacagtcacaacgacgtccacgtccaccacgggctcgccgtcgccaccacctccggcaatggacgacgaggagaggatcgcgctgcagatgatcgaggagctgctgggcaggagcggcccgggctcgccgtcacatgggctgctgcacggtggtgaaggtagcctcgtcatctgaattccggaagaacaggaaagaaattgaaaatgcaaggttaaaacagcatgatcaggtcaccatctaagatcaaggatctggtagggtggttggtgcacaggcagttaagattgctacatatgataggtatatctctattactactacatatccagcttaattaggaaacaattataagatcgattactactgtgtgaagtgaagctgtgtatttattaaagacttacttgtatgtacaagacgtccccgtcattatagtcatactggtgaaagctctgctatgtatcaacgtcatcagagatcagactacatatatataagtggtgtcaacttctaataaaagtaaataaaaacattgtaattgtgtacttttgtggctttgctttttctttcagactacttgctggattttcatcaaaagaagatgaggaatatgatgaaggtgatatttgtgaataagacatgtttcctaaatggttttaaaagaaaaaaagacatgctttataggataatactcctacaatcatatctatgaactgttcatcttatccaaagatagtagtactccaagattggaaaattatggatgattgtcatattaaagacaaacaagcaggagaaatatttttcttcctgcatcactccaattctccaaccacatgagtccactcaaagggttaattgatcaaatgattaatgcaatggaaagaatttggtaagatagacatggtgcaaaacatagtttactggaaaaaagccgtaatttccgttactacaattcagtaaaataaatccatactccaatgttctggttctgttctgtcttctcactttcatcaagggaaccacctagtttattaataggaaatacaccaattcctgcaggaaaaaggtgttccaaaggaggccttagcatagtaaaaactataatgttttagagcagtcgttgccaccagaaaaagattcacttgtgtccacttaggggggatttgctgatagttaaaagcaataattatgcaataaacagatggccataactcacaaggcatcaactaaattgcgacagtgcaccagactacatgcattatgtcagtgtgtttattcacaccaaatatatagcagcacaccacacagtacaagcagtggtgtttctaactgtgatgccaaccctccgaaagtaaaaatggtgacaccaatccagcacaaacaacttaaagaacttcaagataacatcatacgtggcatatcaaatgaaaaagaatgaaagcactgaaatggatggcaaagatcatggtccccatattatttccccttcctaatttcacaacatacaaataggagcaatgaagcgcgaatcagctccacagttggttctataggttggtaatgcatgaagtcaatgcgaaagggcccagtcagttagttggtcagtcataaagtacgatcatgtcaaaaaaagaagaaaagaaaattaacaatatgagaggatacactattctaaggtcttggatgttgatgaaaacaacaaaggcactacatttagtagtacacgaaatgacaaaatggcatatgattaagaccttagtgaaattcaacgatggccagaaccaaaagctatgcttacatagtgagccaacatttaagttttgatgcttaaaataaacaaattggttttcctttatcatcatgtcctttcagcagaaaagtgctcaccaatttgtgtctcaatccatcaaaacctaataaatgggtttcttgcataaaaaccatcaaactcaaatatgacaaataattctcctaatatgtgctgcagaacaaattgttaggtgtatgatgttcgcctcataatttagagatttgatactcatgctactgctcctaaattttggaaaagtaacagctcacaactagtttcgccttgataccttgtggtgccacagtagctggttaaggacctcccatgttgcaaaagcatgcattgaatatgtccagtaggatagctgtatcggtccccacaacattaactctgccctttgcttcaatctcattcgaatcaatctggtgatgtcatcttaattaagattgtaaagcatatagcaccaagttacgctgcgctcttgacactgtcatccgccagatctacctaaaatagatcaacacatggtccatgtacatgccaattaatccattaatgtcattgtcaagtggctgtggacgacagaagtgtagcaaattagcaatgagccaaaaagaaaaggaaaactggcttgtttcaacttctgactaatgagaaagacactcaagtacacaaacatgcgctgaaaacaacatatcataacttgtatcagtaataaataagcatttcaaatgagcaacattccaattccagggggctttccgttctttaaaatctagtaaagaagttaccatctggtgagcttttgtaattattcttcaaagcatgggtagattagttggttaagatatctatttagtgaagaaactacaattctactaaaaaatatgtaaaagagatacagcatgaaagaattacccactagtctatcaaaatctgggaagatgtcaatgaaatatggattcacaatgtacagaacaggtggcctgcttggcttccatgtgtaaatatactctctagactctagactttatccagtcaatcttgtagcaaaagatttaggaatcaagtctgacacaacaatttctgtaaacaactaccccttttttggcctctgtaaacaactagcagtagaccagccagtgaccctaaatgcaaagcgttggcaagtataactgctactgcatgacaaacccttgcccctctgagggcatagtaccatggcctggtggtcctagttagttgttacattttgatgtacttacgtccattcaaaatgattacatgcttggcatgtcattatcttggttcatttagcaaccaaatctgtaaaaagtctaatttttaacaatcagttacataaaagtcaaagatatgcatagtcgtcttttacaatttacactaccttattaatccccacttttatattgtggggtatatgtgcagacaaactttagtaactttgactgatatactggattgaacacatggaagtgataccggtgggtaaattgccaatgataacattatacttttgccagattttgatcgtaaagtatataatatattaatgactaagtttaaaactcaagggctgaacatcaaacagaaaaaattgtaaaaataataaaatgtataaaactatacaagtctagtttgctttcactttttcaagtcaagcattacaaaccagcaacagcaacaaaaaaaaaaaaaaagaaaggccaagtcagcttgtttccaaaaattgtttacttggatagctgcagttttgagtttcatcacttcaactcctcaaaactatgaagaccaaccatttggagacatatttagtatattgctacccaagtcattgcagagaagcgagtttctcaatataaatgaccctgtggccaagaagtagtctaaatcatttcatttgcatgttgttaaccccaatgtagttgtcagtcacccgatgcatgtgtttcagaagcatggtaattgagtaaagcgatacaatgaccagctggtcaatttaactaacagatttaactgtgtaaactcatatgaacaatcagtgactgcaaggttcaactattgacagacaagaacacaggtgtgcagcaggcactatgatgtatcacatagaccagaggcaatgctgatatgcatttcctttcagatttttattgttgaagtaatgaacaaatggcaaagtaatagaagtgcatattgtctgtcaaccacagtttaaatgtagcccaattagttctcaagtaaattcaatttatccaaataaacaattcctataaaaaaaatttaaccacccaatgatcaaatttaaccaagctacaccacatctttcgttgttttgttctgtacatatccaagaacatccaaacaacaagtttgaatgtttaacccatataattaaatttgcaaaagtgaaaataaaactatattattgcaattcagtgaagggaagtaaaggagaaatctagccagactggtggaaacaagataattattgctgttcccggcaaagactcaaatagtaatagcttagaacaggttggcaagtggcaatataattaatttcctatattctggaaaaaaacaaaaagtagcacaaagtattgtaaaatgcaaatagagataataaagtaaggaagataagctattccatgccacacaggaaaagagcaatttccagggcaaaagagttgatttatgcgcaactattatataagcgagataggagggcgtatagtcttttaaggaggaaataaacacccaaatttcgagctaaagaggtcccaaacctgggttggggggggggggggggggtaggccgttgcctccacacctcataggctcccaccgagtgagctagtcccggttccatttgcaacagaacattggcaaccaatatccatgtcattttgtttaaaaagagtgtagagccacttcgaaatatggtaacatatcattcaaaattatttgcatgaagcaagcacagaaccaacagagctaaagctatatggcacaactctaatagatttcatataaattgaacaatggagtgaaggaaaatgaaaatcataccgtttttatttgactcatgtagacacaagaaatatgcgccagatagtttatacttttcatataaaaatatgctataaaagttgcatgtggaattgtggatcctgcaggctttcaaaacctgaacaagctctctctgaaaaagcttccagtcttcatttcatcataaagaaaattggcatatcctaatcacctattcaaggtactcttgcaatttgctgaagatattcactggtagaattcaaccagttaaaaaaagacccaccatacttttaagattcatgatctggtagaaacagttgaaagtatctcctctattggcactttcaaactgtcctcttgccatggacggaagcaacttttcaacatagtagcacggatttgcttcaagtttatctgctttagaaacactaattaaatatgaggaagaagttcttattctagaatccacaaacatgactgctaggagtgctattataacatatgtttcttcgagaactccagagtggtgaccagcttactgcatatataacttgtttgttcggtctagggattcccacaggtatatattgtagtactactgaaaatttgtcaacaggctaagaaagataaatgagctgaatgctgaatatcaaaaaactaggacagagaaatggcttgaatgtgttgtgttgcatggcctggcactcaactaaatccccttggccatcagcaatctacaatcagcaccatcaaaaactgatgcagaatgtcgttaggtttcacattgtaagatcagtcagtttactgtgactctgtgtgtgagagaacacatgtttctaatcctgtagttctcctgactcctgagaagaccaagaaaaactgatatagaatgtcgcaaggattcacattggcaagatcagtcagctgacttgtaaatctgtgtcaaagaacacttgtttctaatcctgaagttctcttgactcctgagataaggaactccactgcagttttaaaatgatgaatccttaccaagctgtcaatcactattgaaatatctgtttcgtaagctgatatctagcatcagaagaaacattatcttccattgtatactgccaaatggcttccatgcatactcatgggggaaggcataagatcattgcagaatctcccctgcaagtcatatgtgattgcacttcttgatcttgccagtacatgatatagataataagataaagtgggaaacagctgcctctagaacataagctctcatcaacaattacaatttcagcaacggtttgctcttctactgctagcttccgcttagaagcaatggacgtgagacggatgctcttgaaatcatcatcaatctggccacactttctactgccatcacccaatggaacaccttaggaagggtttctcccagctcaaaatatattggcaggaaagtctttcaggctgcagagtaatagccagattccttaaccagaggcataaaggaggataaggaccctgcatcatgcacattgctttgcaaagttacataaaatcaacagttacagtgccaaaacacaagtaatagatgaaatcatgaaagctgggatagtagcatatagccaactgtactagttcagcattggactgagaaaagttctatataacagattctactcacagcctttagcacaaaagctagccgattctactcacgtggaataaactgtagcaaggatcactgcactgcaattccacacataactctcttcaaacaccatgcaaataattagttgcttgctcaacgcaactctacaattttttggcagaaaagttaacccaacaaatccagcagaaccgactaaaatttgccgttaacaatcacaaaaaacaataacaatcacatttgcacattcgatgcagaaacctcgaaccagtcaactcctgcactccagcccattccgatttccgaaccgcacctccctccattgacgcgatcccgagttcccaccctaccacggttcagagagcagctagctttgcctaaccctgcatcaagctaaatctgcattccgtctcgaagcccgcccccatgcgaatcgatgcgggtcgcggcgttgctagcacaaccagcgcgggcgcccggcgatctaccaggaaaaaacccgagagctcagttgtgcgcgcgcggcggaaacccctctcgtggcgcaagcgtaacccccgacaccgccggcgcagagcaaggccgtgtctagtttcagggttgacgagagaggcgtacctcgcggcgcagcggaggccgccacgcgcgaggcggcgaagctcgttgccggcggcgaggggcggctcgcctgagaggccggccgggccgggagcaccacggggagagaatagaggagaaaattgagatttagccgttgtcaaaacgggtttcactagaatgccgcttccaaaatagtttcattaagatgccacttctaaagtagtttcgttaaaatgccaccatcaaatacgggcaacatgttacaatgccattttatccatttattctcagtttaatgttttttttaatatttttttctcgctgagatgaccaaaatacccttgatcttatctcatctctcatctctgtcttcctcctctccgtttggctcggcggcgcagttggggatagggatgacggcggcgcggctggggacggggacagcggctgcgcacccagggacagggaaggcggcggcgcagctgggtacggggaaggccgcggtgcggacagggacggcggcgacgcggctggggacggggaggtggtgacgtggctggggacggggacggtggcggcgccaacatgattggggcaggtggggatgttctcctacattgatggggtgcag

SEQ ID NO: 8808 - DNA, 27209 bp, Oryza sativa
cccccgtcatccccgatggtgagaggtttttaaccattttattcctcatggtgagtagatattaaccatccccgtcacctaatagatgaattcatcacggggaaacggtaaacgggcccccattgccatctctaggcgtcaatgagggtttgagctaaatgccttgtttagtttcaatttttttaaaaaaaaacatcacatctaatctttgacatatgcatggagctttaaatatagataaaaaaactaattacacagtttgcatggaaatcgcgagacgaatcttttgagcctaattagtccataactagcctaatctttttaaatatagatttttttaaaaaaaagaagtacagttctcgttgaaatattagaaaaaaaaaatctcgcttctatatgaactttaaaaaagaacacaataccatcaagacttagaatgagaaaagcatgggtaaggaagtggtgggtccggcgggtgtaaggaagtggtaggtccggcgggttggctcgcttgcatccactcagtggagcagtctagaaaggaccggtcaatcaatatagacttgtcacactgggttcaggagaaatcagacttgatcagggtggagtacatagtagaaaggaccagtcaatgtatatagtactaatcagaagatgatgctgtaacagtaatgtttcacaataaacaaaacaattattggtgcagaacatgttgctgtcgtagaagcataacaatacgagataacactacaactttttttttccggaataagacactactacctttttttttcgaataagacactgctacctgtataattgggtctgtttggcattgcagatagtagaatttatgggttaaaatcattttcgaattttcatatatccagctagagttgaagctgtgttcaaacagagccatcatttttgaatttaaaagtttttacagggaaatggtatttgattttagagaggtcatattcgaaagtttgtgctatgatagtgcagaaagtctttttccctcaaattttgtggatccaaattctttgcattcatgccatggacccatgcaagtgtcatgcatattctgatataatagcagtaatactggagttgcaaaggaacagagtacccattgctagcgaatggattaatatagtgagcataaagcaaaggagaagtctggtaacacgtaaccataaagcagtgataatcaagacaccatcatatcagaaggctaaagtaacaacacctaaccataaacatactctaagataagataactaatgtctactcagttggcaaatggcaatggcatagattttgtggccggcttcgcttggaaggaggtcgtcagacgcccccaagtccgagcatgccgtcgtcatcgtcgtcgacgaagtggtcggggcgccatttgcggtggctggcctcctccgcccgaatcttggactcctcctcctgtttcccctcatctgcaatgagcctcatcctgaaaacatccagaagatgcttctcgtgtttacccacgacgaggcgggtaccctgggaagcatacatcgcgactgtgaccaaatcctgcatgcacgcgacaaatcgaacaggtcggtcaggtataccaagggtgtgtttagctccgcatcaaaattaaaagattgattgaagttaaaacgatatgatgaaaaaattaaaaatttatatgtaataaaaatttgatgtgacattttttttttcgaaactaaactcggcccaagccaacacaaggaggtctagggtcggagaaaagtcatcgggttctgttctgttctgaccttggcccacgcctccttggggagcttgtcggccttgatgccgaaaatgttgaggtagtatggcagcgcgtagccatcggggccgcaagcgaaactgatgcagctgtgcaggaaactgaggagcccgtccgggaatccccttgtgactgggtcgccgtggtagcactgccaaaggtaccaatggtacctcagcagcgtgcacgtcgccgccaggggctccatcggcacctcatcggaatcagcaagctccttgaggttcttgaacgtgccgattatttcctgcacgtcctggcttgcggcgctcccggccgatggcggcggagtctgctccaggaggtccagcgcctctgcagctgaccatgcgatggccttgtacggcgtcacctgacagcaaccacatatccaacaaaacagataaagattcagatatatatatatatcttcttcttttcatctcaaaaaacaaacttcagttgaggcacgcatgtatgtatatggaattgttttacgaaactaagttccagcccatatagcccaaacatcatcagccccaaacccctcccagcccaaagaatttgccccataaccaatttcctctcagcccaaactgcatgctcgtacttcaattaaattgcatcagcctggcctggcccagaacaactcattggcccggcacgctcccctaggaacccatctcacaactgtatccacgcccacagtatgcccagggaccaacgggctgatcagttcggcccattctcgaaccctttccgatcaggccatcctctcgtcaaacagattccatcccccaaatccccaacgtctgtcctcctagcccaacaacgatcatcaacacggctaacttatacttactaataacaacaagtactttaagcataactttttgttttttatatttgcacaaaaaatttttttgaataagacgagtggtcaaacatttacaagaaaatatgaacatcccttgtattagtggacagacatagtaaatatttttccttcgagaaaacaaatggcccaacaaccaccaaagatctaccgtttcttcctccgtagttgctactgcgtacgctttgtttattgatcagaagagaaccttttttgcgaacaagcctgcacgatttttttaaaaaaaagaaaactttcttttcagaatgaagaacctacgtacgcgagaaacagatagaccatgtatcaacacaaccaacaagaacggtaaagaagagctagcgtgtgaactcctcgggagaaaaaagccgaaaagaaaagcacaacgtaaactccatagaagatacaaacaaacacagatctagaccgagagaaagaacgttgtaagagggccttactacctgcaggccaacgtcacacatgcatcaagtacaacatatatgttctcccaagcaacaagctcgcgcgatctcatgtttttaccgcaagagcagattttctcacggcatcccagacccataatcctagatctaccgtttgttacagcacgcaagcatcaacaagaaaacgaccagtttttttttccctccacgtacagatcaatacgcgcgaccgaaaagaacatttttcttcttctttttttttttgaaacacatcgaatcaaatgcgaggaaggcagaagtcagtcgagacgcacaccgcaaacatcgatccggttccgtacgtactacacatgcatgcagatgcaggtagttggaaagaagagtgcgtgcgttttctcaccttggtggagtcgtcgtcccaggccagccatggacctgggttagcagccgcctgtgccaccgtcagcctgaggggacggccggcgccggcgaagcgcgcgaccggcggcggcaggagacggccacggccagcaccaccaccatggccggcgcctccaggcaggcacaggacggggcacccgaggatgaacaacgacgacatctcgatctctcgttctcgctgatgaggagatatggccgggggtggaggtgaagtgcactactgcagtgcagccttgcgatatttataatcaggagccaatgctagggttttttggcaactatgggttatgcattttgcgagagtgttagaaaaagcagtcaaactttagagagatcacctttggctttggagtttggaccaacgtaccgtgaaatgcatacggtgtatgtatgtaaattggagatcgatgtagacggtgtatatatgcatcaacaagaaaacgactttgttagtatactactactattccatattaccatttcattaactgcatgtatatgcatgtgtatttcgacatgcagtctgtctttgtccccccgcgcgcgtacagggaaaaagggaagaccagagctgcaggcgtagacgccgtcgtcgtggtggtagcagtagcagtacgcgctgcatgcatccacggcgccgcgagcgcgtggactgagttcatgaaccgcgggtagagtagacgcacagaccgtgctagcctgctaggtgtatggatctttcaagctccggtgtatgtatctttccggtagcacaggtgcacccatccacacgttctgccatgcatgaagccaaccaaccaagcacacaaattccgtgggtccccctctctccctcccctggacaattccgtggattgtttgcgtgcgaccgaacagcagcctagaagaagcagagatcgcaaacagatcgataattacatgcatttctcggctacatgcatttcctcgcttaattactgcaacgctgcaataagtgagcgtatatatgtattttttaagttcaatttagtgatgaaataagtgagcgtacgtgtatataactaacctagcctccaccggcaaaaaaaaaaaaaaaaaccgggtcacatcatatacagacacacatttgaagtaataacaaaacaaattacataatcagcatagaaaccgtgagacgaatttattaagcctaattaatccatcatcaacaaatgtttactgtagcaccacattgtcaaatcatggcacaattaggtctaaaagattcgtctcgcaatttacacgcaaactatgtaattgttttttttcaatatttaatatttcgtacatgtgttcaaacgttcgatgtgatggagaaaaaatttgccggcggaactatttattgctccttccgtcctaaaatataagtatttctagtacagtgacaagttaaacatttttagctttaactattagtagcaaaagaaaaaaaatcaatcatatgtataaaattgatgttactagatttatcattaaacaaattatcataatatgcaattctttatatttaaaacattttatttttattgatattgttggtcaaagtagaatctcggagactgtgtcagaatttaaaaatgcttatattttaagacggagggagtagtacatatctacatccgatcgatatttgttgtttggcaagatacaaattgccttgttaagttcgcgaaaagaaaatttttgggtgtcacatcggatgtttgatcggatatcggaagtggttttcagacacgaatgaaaaaactaatttcataactcgcctggaaaccgcgagacgaatctttcaagcctaattaatccttcattagcacatgtgggttactgtagcactaatcatggactaattaggctcaaaagattcgtctcgcgatttccccctaactgtgcaattattttttttatctatatttaatgttccatgtatgtgtcaaagattcgatgcgacgtttttaggaaaaaaaatttggcaaactaaacaaggcctaactataaaatccatttagttcagcaataaataaattaataaagctacattaatttctttttcacaggagtattacaccagtagcacgaaaagcatgtagccaccatgacccatctactcgtgctgcttaatttgcaatctgcttcaggctattgcattgggtcggaaagaaaaggggaccacggaatatgtatgtcgtcgaggtcgatcggctttagcttgcgtggcacgctcgcaagcttgctttacaccggagattgcgcgacgggcaccggagattgcgcgacgggcataggctgtgtgtccgtctagcctggtgcatgaactcggtccaccggcgccgtcgatacatgctagcaatacgtactcctacgtcaccttcgtttctgtttttttttctgtacccacgcgggtgacgaaaaaacaagagagaaacggatcggatcagtgcatatcacacacattaaatacggcgcgcgaagggttgcccaagcaatgggatactttttcttttcaaaaattcgaacagccagcgtactttgtgcatcgtgtggaggaagaataaagcgatgcaaaaatcttctatgcgcgcatatatatggtgccaaaagtgcctaaaaatgcaatcaacattttaatttgaaccgcgatcatacagccattaagtgcttacaatattacttccttggtctagggcgtgtagcaattaagggatagaaaaagtctacaagtctaatagtagttactaatgaccacattgccctaacaaacgattgcgaaacttttgaagacgatgttgtttttccagcaatatgcatgtcgaaagcaggatgatcacagggaaaaccgagagatgtgtagctcgttatctggtgagaactcccaaggctggagctgccaccgatcagaaagggtttttcagatgggcggagaggattttcacatgcggttggctggcccgacgaggaaatgagttcaccactaatcagaaaactaataaacatcacagcaaacataaatttcataagcctgctagtgttaaaacaagtaccttgaacaatttattatttataacaagaatggacttgctttgcttgtgaggaaatatgtgcaaagcttattgcatcataaaggcctcttggaggagaaattagaactttatgctgattgaaacaaatatacattcagcaaacttgatgcacaaatcaagcatatatttcatcacattctcgatgctggaaaacagatagtaagatctagcatcctgatttttcattttttaaaaaaaaactttcacaagttagcaggaaatcatattgttagagtatatggtagttatagttatattagaataggatttatttgtgtggactccttccatatctgtaatccttctttatctcaccctatgtactcctatatataccggtccctaaggctcaatgcaattgatccacgttacgcaatatacctctctccctatactatccaatatggtatcagagcgagcgacctagaaccgctgctcacgcttccgtcaccgtcgccccgggagggctccgatctcccgggggcggccaactttttttttctctcttcgcgtcgtcaagtcatcatcctaagagatccatctctcaggcgtttgtgttgtcatcaatcaagcagcagcagcagcgtctccgatcgtcgtcgatctcaccgaccacctggcgcactgcccccgcccgtggccatccacgagcaaccgttgacgtgtggatctccgtcggccatgctaggcctgcctcgccgctgccgctgggggggggggaggggaggggggacggccacctcttcacctcggccggcgtcatcgggccccgtccgccgctgaggacgcccgcctgctggtggtgctcggcgctgccccgcagccatctaccctagcgtgacggggcttgcctcttcgccgcgctgaggaagccacctccatcaaccacgccgccgtccccgcactcctctacgccgctggccaccgttgacgccacctccgccagccttgccatcgatctcttgctgcccatctctctctcttatctgtatacacatgcgttcatggataggatttgggaaggtagtaattgacacacaagagggcgttgtggaataggattgatttgtgtggattccttccatatctgtaatccttccttatctcctctccatatactcctatatataccggccccctgaggttcaatacaatagatccatgttacgcaatatacctctctccatatactatccaacacatatgatggagcttgataacaatgtaattatccaaaattaacactgcatacctcaacttcacaacgatatgctgaacacattttatcaatatttatacagtccatcacagcgaaaaaaaaatcctttgctctttccgtgacatttggagcaaacttttattagaaggtgtcatatcactactacagaaaacatttttccgaacgaggacatctttaggttacgggtgaaccgtaactagtcgtgcctgcaaacatcggtctacattttcgcatacggctacttaaaagatctgcatgcaaaaatcaatttcattccagttcagcgaaaacccaccgcatgttctagttcaccacccatcacattcccattcggcgattggtctagttcgatgatgccagctgccactcagctcttgtcttgccggttaattatcgcccttctccctattgctgaccgctcgctaccacctggagggaagcctggaaaagatggggacgagagagtaagaggagggaggagtaggaaaaccgacccgttcacatgtagcgtccatgtggtcaccttgactcaatgacacgtcagctaaaaccggacataatattatcatgtgaatttagtagtatttcagtattgtaagttaaagacgtgttatatctcgtatcatgatttatggatgtgatttaaactcgaagcaaatacgagggattaaagtgaacttattccgaatgaaacaaaacacatggagcaatctgaactgcgtttggaaagtgaactgtgacaccaacggtcggcgtttggaaacatgggatcgtgcgtccagataaaagcaacaaagaatcacaaatcgattcttccaatctccacccctcgccatcgatcatcgtcaccgtcgccgtcgccgtgatccgcagcatggcggcgccaccgccaccgcctccgcgtccgcgtcaccccgtggcagacaacgacgacctggtcggcgagatcctcctccgcatcccgccggacgaccccacgcgcctcgtccgcgcctccgccgtctgcaagcgctggcgccgcgtcctcgccgacccgagcttcgccgcgcgccaccgcgcgttccacccgagggcggcggcggcggcggcggcccccgtgctcggcgtcctccacaacccggccgaccgcgagctggaccgcttcgtcccggccgccgcctcctccttccgcgccgccgccggcgaccgccgcaagcaccacatcctcgactgccgccacggccgcgtcgtcctctacgactacgactcccactaccccaccgacggccacgtcgtctgggacccgatcaccggcgagcagcacaggatccccaacgtgatggatgccttgacccacccggccgtcatctccggcgccgccgcgggtgggggtggtggctcggcctccttcatcgtcgccttcgtcggcgtgcagaattgggagaggcacttctgggacgcgcacgcctgcttctactcgtcggagaccggcgagtggagcgtccacatcaacatccacctcgacctcgatgggtaccacctcgaggaccgccccgccgccctcgtcggcggcgacacgctctacttcgtcggcaagtcggggatcctcctccggtacaggtatggcctcccgctgcgctgcggcagggacatcctgggccacggcatcacctcggccgacgtgctctcggtggtcgacccgccgccgggcgccaagcgccgcctccgcctcggctacaccgtcgtcatggcggcgccggagagcgacggcggcgggctgcggctgggagtcctgcaccgccacaagctcgccctgtgggacagggaggaggacggctccgccgccgccgccgccgcccggtgggtgtggcgcgtggccatcgatctcgagcaggtgctgccatggccggtcgggaataccaagggcaaggagcgggcgtgcttggccgcagttgccgaggaccccaacgtcatcttcgtcggcacggaagaagacggcgtcttcgccgtcgagctcgattcgctgcgcatcaagaaagtgtgcgaattgggcaaatcacaaggccgtttcttccccttcgtcagctactgcgccgagtcatttctggtatccatctcatatttctcatctgttcatgcaagtttggttgctgatttaaaatgacatggtttggtggtttttattttattctatttttatttttacagctgagcctagcaaccagcaaattgccagcaccagcggcaaattaatccaccatcttgcagtctgatcgatgttcttcggtgatttgtttcttctgcggaaagttcagggagacaagcagtttagttcgatcacttgggtcagttagcatagttcctgacgatttttttgttgtggtgttcttcttatcaaattgtgaccatggatcatcacttaagtttcaatcgatcagtttcagcatacgcgagtcattttgtttcagtcattgcctgacaccaaccatcaagtgtcctgaaaaaatgaaccgttgttgttcagtctcagtcggattcagacaaaattaccaaagcatcaagtaattgggggataattcggctcattgaattcactgtgatcatgatttgagacattcttcattttacacatttttcttttttgacatagttgagttcagagtctgtttgccccatcctgtttgaagttttcggtgttttctgaagaatggtctgtgtttcagcttaaacataaaactctaggttatctcattatcttctgaagatttgttccgaaatgctcccatgaccgtggaattgtcgcattgacacttttaatcattcagtttcagcatatacgggtcatttttttcctcatggatcgaacactaagtttcaattctgtttcagcatgtccactaaaaattcagtttcaattcagttttgcacctgagcatgaattgtcctgaaaaatgaatcgttgtgattcagtctcagtctgattcagacacaattgccaaagcatcaagtgattgtggacaattcggggatctgattgaatgcatcgtaatcatgattttagtcttccattttttatatacatttcgacatagttgggatattgttcaggtctgtttgcccccatcaatttggagccttcggtatttttcagaagaactagtctgtttcagcttaaacataaaacaagaagcagtggtctcagctcttcgagtacatccatagaaggcagctggaacttaaaaatgtacccgtttcccatattttcgttgtatgctatcgtatcctacctgtaactttacggtatgcttttgcatggacttatttttcttaatcctttctctagttcaattccaatcccaccacatttgctcaagataaattaagacgcagaacagcggggagtattcagcaaattctgctgactggaccacaatggttgctatcccgagttccacgacaatagccatgtcaaagaatgcaagcttgcatcagttacaactgtcctaacattgaagtattggcctttttctctttttttttcttaaacaaaatacaaacgcagacgctcacagtacaaatgatcatacatgcagtgagggaggcagctctcgggtaggttgggtgacggtccgggctctaccgttgccgcctccattacctactagcgtcaatgtgtataaaaattgattcatcggctgtgtttagattccaaaaaattttggctaaaaatatcacatcaattatttggacatatgcatggagctttaaatgtgaacggaaaaaaaccaattacacagtttgcatgtaaattgcgagacgaattttttgagcctaattgcgccatgatttgataatataatactacagtaaacatttgctaatgacagattaattaggcttaataaattcgtctcgcaatttacaggtggattatgtaatttgttttgttattagtctatatttaatacttcaaatatgtgtccgtatacgttaaaaaaaattggccaacgaactaaacacagccatcatcatggaatgttattaatcgcccaagactcacacgatgatgtcgactccgccactgcatacataactctacgcgagcaataatcatactccatccgtttctaaatactttgacaccattgactttttaagcacatgtttgaccgttcgtctttttttattaaatacttttgtgaaatatgtaaaactatatgtatacatataaatatatttaacaataaatcaaatgatagaaaaagaattaataattacttaattttttttaataagatgaacagttaaacatatttaaaaaagtcatggtgaaatatttaggaacggagggagtaatttattggtgtgggaaattattgcttagactgtcttgtaatattgccttttgctttccttactttgtttttaataaaagaaaaggaaaaaggacttgttaaggtggagcagatggttagctgtgaataataaaattaaccggaaataacgctacataacggtcaggatggccgagtggtctaaggcgccagactcaagttctggtcctctaacgagggcgtgggttcaaatcccacttctgacattttgttttttgttatccgtatttattttatttagtcgagagtttcatacaaaccaaaattctccgaaacgaattcatatcgacagctcaaaaattttcaggagatttgtgcgacatttcttcatttcttttttgccctaatgggccgtaatccgaccaaacgaagcccaatcgaggcccatctttcacctgtgttgctgttgacgctctgtgagactgacctctccaatataggctgctgcttttccctccctaaaaataattcacgttgatatttttacttcctttttttcctggtatttcccttttttaaaaatcgatgaaatttgatgtgaaatcattatgacaccacaagttgacaacactagctcaaccaaaaatctgtatagttggacatgaaaattgatgataacacctatgccgcgcctcccatccatgcaacatttgccattttaaattatagagtccaatttctgatggaatctataaacgtgtcgggcctgttcactttaatgctattttcaaccttactaagttgtgataaagttgccaaaaaagtggttacatttagtttgctaccaaattttggtaactatatactaaaatttggtaaggttttttttatctaagtgaacacgtccgtcattttcaaagttcaaaaaatgccctatgaatttgcatgcacctctcaagaacaccaccaagataatgagaaggtactgtagaattctatggcgtgagctgagttggcaaaattgacgagtgacgacattgggtgggggagaaagttggagttgatcattcaagatccagaaagtccgtagaaataatcacgcaatataatacataaaagcatgctaattgctttcgtagaagtgctgcttttctctagctgaagatcttgcaaacaggtcacactaaccaaacgattgttacagaggacggatgggtacgtcactaatatttttttaaaaaatacgttgagaacactcccttaaccgcacgcttcaagagcctaagatgtgtttacgttagaataggctaatgtgttgtcaaaattcactgaacattataaatgtttggtaattaactaaatccatctgtatatttattattttttaaaatatagtatgatttaaaataacattaatctgaacaagcccatgagtaaattcagactttcagcacgaaaggcataacattttaagcatggcctcatagacaactagtataaaaaattacagtcattcgggattgtctcgtctctaagatctttctatgaagtttaggtgagaggtcataattattttatagctaataagtcatgggaaaataaatgaagttaccaaaataatgatttaaaagaaaatgcaaaaaacaaaattatgattaagaaactgaaaattcaaattttagctatgaaataagccaaccagtaaaagatggagctgaaagagctagctaggcggcttgcgtgtccatacctctacggtcctagaaaaaaaagagaggagggttttagaaaattttagaagagctctaagcttcgccgtctcctcgtgctaattaatcaaacccacacaacactaatcaacgcgatcccccacatccgctaatcacaacagaacacctgtaacatattaattaactaactaatctccccgcaaaaaaaaaaactaactaatctacatccatctcgttgctcgtgcctaatccacatgactaattattggctaccatcacggccggtcgatgtcagagcagcgagatgaattgtttgtactcgtacttgaccagattaataacaaagataatttagctacaatcatggatagagaatcttgtttaacaaaatatgataggcgaccagtagatgtacactgcagcccatagcaattcaaaaatctccgtttaattgacgagcgtgcgagcgtgggaggggaccggtggtctccaggccgttggttggttggttggttatggttgatgagcgatcgggccaaccccaacatggagacgctggactgcacgagcgtcgcagtggacggtgtggtgccgcaacgaggggatcgaacgaatcaacgaatgatcgaaatcctctcggaatcggtagcatctctttaaaagcgacgctctatcggttagtaattaaacatatttatcatttaaactactaggtattgatattaatatgatgcagaaagaattaaaaaaacagattttaaaaatagtctaaaacggtacaccttatacgaaaacgacgctcggtcaatcaggaatttcatcttaaacgaaccatatgtaagccaactcactgggcaccggtagtaaccaacgggaggggagagcaccctgagtttactaggatttttcactggtattggactataaagtgacgcatttgcacgactataacaattttgttatgtgtcattaaacaattatatcatttgacgtaaaatttgagaacaaagtaaggttattttgagaaatatctttactgtatggtggagcataaatctacacatgtattagaaaataagcaaggaatttgaattagtttctcggaccatcatcgtcgatgggtctggattgggtcttaggagattttatggtggaatgatctacctctctcattggtggagcccgccgtttcagcagtgaactcgacctgtggctgcttcaggacacagtagtgtagggattgaattcggttcgctgcagtctgtagcgtgaacactatatccgtttgatcttatttcaaagggcagagtcatccaaaaagcttcatgcagaaaatagatgtaggagtacttatgccgtgtttagttccaaaataattaattcttcaaacttctaacttttccatcacatcaaaactttcctacacacacaaactttcaacttttccgtcgcatcatttcaatttcaaccaaacttccaattttagtgtgaactaaacaaagcaatgtgcagcatgtaatgtaggagtagttatgttctttttccccttctttttcctaggtctcaagaaatatgagtcgccgaaaggatcttttctacttatatttgacggctcagatatcttctctctttttgtccttttagatccgatggttattatttgttacatgatatggcatattctagttctattttaatattaacttttcactagttaagattggaggcaaaaaaaaaatgctctgaagtgaagcgaaacgaaggatctcctatagtgtgctccctctattttaaaatatagtaatttaaaattaaatttaacatcaattagtattatgaaaagctagtatcaaatttaggttgatagtagtatactattatatattttaaataagagaggtaagagttccttaacgattgtaaacttcttcattgcgtacgtttgtgccaaactgccaagcctgtcatcaactttactaaaaaccgcctttttcattgttgaccttagaccttgctaaggtatgtgcaatcaagggtgtgttttttaagtacatttacatttactctctttttttcgtgtacggctttccaaactaccaaataatatacaattttaaaaacaattataacaaagtattattttaaaggtttttatcctagttcttaatagattctaaactaatccgtcgctctatctttcgtgttgaggtagggttcccaaaacacacacaacacaacacaccaaacccaacccgagtacccgaccgcgcgcgtgccccctttcccctgaaaacccacaccaccaccgcgacacgacacgtacgacacgacgacgccgcgagtcacgggagattagccgaagaccgcagcggcgccccccgcgcgcgcgcgcatgtgatccgccccgcctccgcgcgcccgccgatcgattccgacctgtgtcgccgccgcacgccaccaccaccacggattcctcttcttttctctcgcagccatgaataatcccccgaaccccagtatctatctatccatctatctatctgctccatcctctcacgagacaagataccaataatcctgtggcttccgtgatttctcccaaagcaacaacccgagccgtgcttcccttcccctcttccgtccgtttgttttgtccgtctctgcttgtgtttttggttggatcaggacagcaacggccgaccacaactgctgatatgatgatatatcactgctaacacccgaaaaaaaaaattgggcaacgagaggaggaaaaagaaatccggcaatcacctggcgggaaaaaagaatgaaaaaaaaaatgaatattgagagagagaaatttgatggacacagaggaagtgcaagatcggaagcttcaatggattaataattcactaatcacccagaataacaataataatgtacacgtacaacaagtacagctacaatcacctgcactgctgctgatcgctcgctcgctcgtgcatcgggatgcacgctaattacaaaacttcccgatgattagcggcggcgattagcgatcagcaagggagcaaacagaagcaacaagttccggattaagggactaatggcagattaattagctggagctagtaggagcaggcgaccctgagcatggagcggccgcggagcatgccgcggtacagcgcctcccggttcgccggcatcgccgtcgccgccgtcgccgccgcgttcctgcacgacggctcggccgccgccgggcgggacgacgcattgctgtcgttgtcgacgacgtcggcggcgaacctcacccgcttcttgctcccgcgccgcgccttctccctcttccgcttctctgcaagaaacacacgtcaggtgagaggagagtcctaaagaggagccaagaagaacagcacgcacgacggcgcgctatggccatccatggcggcgcttttgctccgctcgctcaccggaggaggagaggcaggggcggaggcgagcaggggcgtcgtcgtggtgaggcggcttgttggcgcggcagagggagaagaggacgagggtgccggagagcgccatggcggtggcggcgagggcgaggccggcgtgggagccgccggccgacgaggacgaggacgacatgggagcagctcaggtagctcgagctcggcgcgcggcggcggcgactgtttggggaggtagttggttgggtggttaaggcgagagggacccctgcactgcactgcaatggcagagaagcccgtaggcacgctgctactataatatactacccgctactgctggttgctttgctggagctggactgaggttggtcaagctagtttattagggtagttcagtacacttatccaactggtaaattattactactactgtaatttttaatttttttctatttttattttgggagaggtttgttttgggttggaatcattggtgcagggtacaatggtcattttgtagttgatgtttcaatttgtattcagttttccatggaagagtgggggctatatatgcatcttcggcagtggctgtatgcacgttgttggtgtagaggctgagttttaatccattattaaaaatatatttgtcatttggtaattccgtcgataaaaaaatgcataggactagtttcttatcggtggatctacatcgagacttataataaagtgcgcgagcggtccctaaacttgtgcgggtatgtcatttaggtctctaaactttcaaaatgcattttcggttctttgaacttgttttgggtgtcatataggtccaaacaagctccaacctcttccatgcgctgatgtggtatgccacggtagcgcctacgtgttagtcggatccacatgccagttacatagaaaaaatataattagaaaaaaaacatattttctcgtctctaccttcgaatttttatctttttttctgtctacctaagaggagaaaatatggtttttaattttatttttttatatatgcttgacatgtgaatttcactaacacgtaggcgttaccgtggcattgccacatcagcgctatggagcgggttagaacccgtttggacctacatgacacaaacaagtttagagacctaaaaaatatattttagtagtttggagatctagatgacacactggcacaagtttcgggatcgcccatgtgcttcactctattctatatggataacaaatgtcttgattgattgtgcgtttgtgcgtcaagtgttatagcggctgcgataaccagcccagccgagcaggtccaaattggatgctattagaaaaaaaaagtgtaaaacgcttttgggtaaatcctacaatgaaatttatattcatgaaattcatatttgtttgaaaattcggtcggtctcaaattattgatacttttatgtgcatatatgaattcatcaccaagccagtccatctgaaatacataaattgcagcatagaagatacaaagggtcatacaagaaaccactctcactagaaaagaatagaaacatgggaggtagtagtagtaaataaaaccaaataaaactagaatttcgtatttaatttaaatctgtgttcccagcattcagaacctgatgagacagagtggaattctgtggaaagctggaaataatacccctgtggaccaggtcatcagtcatcaccaggacagtttttgttttccttctttcattccccttgttttcacttgcaacacctgtaaatcctactgctggtgttatccggcacggcacgatgaattattggggggatgtctccctcttcttgctacctttgacatgaggtcagataagacggtcacccaatgttatgtctgcaaaagatttatgcttttcccccctcttttacaagtgaatggaggccaaggttatgatgaaaatactttttttaaaaaaaaatcttggatcaaattccaaattaattgaggccaagaagtaagattcagtgactgcttggcagcagggcaggtaggacaacatatgcaggctctcctgatgcttttactttgctaccagttgctttaaatgatctagtttgcctctcatttctgcagccagtatggtttttgctccaactagtaaataaaagaaaaaaaaaggcaaggtcctcgaatttgtttatgattttattacaacctctatactttcagaaaaaaaaaacaggttagagctcttactcttgctaggtgtatcatataaagcagttcaaaaaagggaggaaaaaacaataaaaaccgtttaaaaaaactaagagaaaaaaccattccaaaaaacacagaaaaatacgggggagaaaagattgaactatgtccatcagatctggttctgttgaaatgtacagtcctgtgactagtgtactggtctaaactattaactattgtaagtattattgagcggatcagcaccttacaaggtactccctccgtttcacaatgtaaatcattctcgcatttcccatattcatattgttgttaatgtatggaaaatgctaaaatgacttacattatgaaacgcaggaagtattagactttcacaagcttctcccatcaatcagaccaaatctccctagaaaaacctaaattatgtcacgttttggatcccattaattccatcgtcgtcatcacgtcggatccaatgatcgttaattgcatcagctagcttaaccaaatgaatattatttgtccagccaaatggcccttgtacctgccggaaactgctgtcctatgtagcggtttcgcgtgcaatttgcaacgaaaaaggacgcccatttggcgatgtaagctgacatcgatgcccccaaaagagcccaataggaagctaatggaggattaattaatgaaaaaaaatccttgaattcatgtttgcctctctttttttaattcaaattatacatgtatgacgtatagagcagcatgcatgatgtaggtgtactgttagctgcaactggaattatccaattccagttaaagtggaaccctaacccaattatttgagatctaggacaagcaaaccgcacttttgccactctttttctttttttcatgccgctgctagctaatggagaacacatccataatcagtatctaaaatgggtgaggtacatctatatatcctttaggataataagattttttttctaattatttctataaaactttaaaagcaaagtcgatctccttccatcccctcctcacaccacgtgtgtataaccactggattaaatgatttgtcctcaatcaccattctaactcatctctatttatatgggcatgttataacgtacgagcgtgttattagaattatccaattccattttcttggtttccttctcgcataggtatatcatcatgacttcaagaatatacaaagtacatatgacaacttaattaaaccgttaatatgccaccttcctatctcctgaagttgaactatatatgctgtgaagaaatatatggatggttgaagtagaatctaattcaatattgtcacatcgtatccaatgatcactgcaaccaatcaggatgaatattcacctatagttcccgataaaaaccgatgttttatgccgtgttctcttgtgatagcttagttagaccgcaacttacaaaagggacactatcgaccaaacgctgacgtctcttgaaagagatgttgaaagagctcaacaattgaagctaatggaagatttgttatgaataaactctagcaaatgggaatatcctagattccatggatgacgtacatacagagttctttttcccttttggaagttatgggatataggtagctatagtactagtattgcatcggaaatgcttgcttgcaacgacctagagtatccaattagagtggaactataacccaactatttgcgctcttgtacaaacaattgctcttttgaagctcttttcttttccttttatgtgtaatggaaggaacaaccttttgcactacttttgttgtctagcattgtgctgaattcactagttaaaatggttagggtactcaatgtaccaagaaaacaaggtcgacacaaattgaagacaatttattgtcttatacttttgagtttacatagatttatccccaattgggaaattttggacacctagtagccaacaatgccatttataaatccttggtaggaaagatcgtccatttctcatgtgacaataatttcatttaaaccatgaaaagataatcaccttcagttgtattcgaattagtggcgaagctttttttttttttttttgaggatcttgtcctccacatacttattatatagtactccctccgtacttataaagtaagtaatttaggacaatgtttaagtcaaaccttaggaatataaatcatgaataactctcaagttgttgagtttgaaaatgtaaaaattatatgaatagatttgtcttgaaaaatactttcataaaagtacacatatatcacttttcaataaatatttatagaaacaagaagtcaaagttgtgttttggagaccgtgtcgctgtccaaacgacttactttacgagtacggagggagtacctttgtttcattttgaccttttttagtcaaaacaaataaactatcaaaatacattcaatattagatgtaatgaaattaaattaatgctacaaatgttattatatttttctataaacttgattaaagtttagagaagtttgatgagaaaataaaaatgacttataatatgaaacgaattataaacggagggagtaatttttaaagtaatataataattaatatgatctaaaatagctaaaaatacacaagctatccgtgcccggtgacacatcaatgattggaattgggttaactaatgatctaaaaccttagaaagaaaatttagagaaaaaataccactaaaatacaagaaattggaaaatatagaattggcatgaactcatgggaaatgtttgcacgaggtatgtcgattcagctgctgtcctggtgttcttgtgttagataatcctacaacctgcttttttttttccctggccctctctctctctctctttttttaaacacctgggccctctctctctatctctctctctctcactctgatgattacttttcccaggcgtccttgttcttatcccctatccgcccggggatttgcagtacaaaacccaacacgctgtggctccccttttgtactgcgtccctgctgcctatgatctcattggtggccgaccgcggcatcgacggcttcgtcacggaaagaggagaggagaggctctccccgtcgcctgccaagtgcgaaagcggaggagaaagcgaagcatagcaaagagagagatcgctgccgtgccgtgacgcaaatcgaagggagggtcccgcgctggctgtcacgttgggagatcctatggtaggagtacggtggtggtggtggtgacaggatccgtccttctagggcgtcccgggagacgtcgctgttgggagtttggggacacttgtcgcctctgtggtgacccggcagattgggattgggatttggatccggtgcagtacctagtgtgactgcaacataagcagtcacattaggaccttttgatgtaaatctgagggtccaaaatctatcaagtattgttcacacgaaaaaaaaactgtaaaactagcatcaacattgtagcatcagatctagaccgttcattgaaaaaatggatggctgagatgatgtgcagttcctaacttgcagtcacagttaggacttcactaaatctcaattcatcagattgagaggtcatcgctgcttggtgtggtaaaaccgtaaaattagcagtgctaggatcctaaaacctactccttctttaaaattaaccaatctaacattagattaaaagtttctttttccagatttataatagtagatttaggtaatgtctccaatcttaaattgatttattttaagatagaagtagcacgtgtgaggtttttttttttacatcagacagatataaagaaattctctatttctagaggaccattcacatggtaacaacatgacaactgacaagtagatttgtggtttcggcttaccacatctgagccatgcctccactttagtcaagcccatgccccacaacagagctacacgtgtcttgcaaaaggaatttgtgtctagttaagacgatctacttacaaaccgtattgagtgaggccgtaccctcgagttccaagcagtgaaggccaaatctggaactagggagaggcggagtatggttagatatgtcaaatatgaaagaaggcggcggtgctcactgccagggacaagtgaagagagggtgaggaagatggctgatgatgagggagggagaaaaggggcccaccaccatggatgttgcaccgatttacctctgcgccaccctaatcttattatttcgttgctccacgtcgcctcgatctgaccaaattcaacaagtttgtagctagcattggcacgctcatgaccagatttagcgaggtctttgcttgtttgatggttgacggtgaaaaatcgacctgacgataatctcctcagccctaaccagccttgatctatgctgatggctagctcgtcggccgaagaagttgaggtcatatatgaggagaaatgaagcgatgacggtgcccaagagtgcttgttggcatgtgccaaggaggagcatgtcaggagagaaaggagaatatgggaaatggtgaggagggttatgctaataccccatctttagagtgtttaatgtaaaattatggacatagtgtatataaattgagataatatcgtgaactaaaatagaaattgatatgggcaacttgtaaaattaaagccactacgtgttattggagaggagtatagtctccgtctatgtgttcttatgagtggcttccactaccgttgctaccctattaaactttagtagttttcaaaatacatccactttaaactctatcaaaatttgataagcctacaaacaaatacatccataatcactaaaatttggtaacaacataatgccaaactttactaaggttatttctggcaacaattcacgtgcctataaacactagacctcggtcagctggtcaagaaacggcgatttctaaatccaaaagggatagtggagaagcgggtggacgagagacacgagacaacgcaagaggctgtagccagcatcaccagctagcaccaggaacaggaagcttctgcccggtttctccctacgtctacatccccggttgcccagttcagctcccctccacttctcaagctcttccaaccgagtagctttcatccaactgcgagagcttctagaagaccagaacaacccagagactgtgaaacatcaacctctcgaggcactcaactcttttcatcaagaagcttccttctaatcatactgcacacatggctgctcaagagtttatctgaattgggagtatccaatctacatgccacacagcagcacaaggcctctcatgagtgaccactgatgttctgataacaacaggtaaacaacaatggcagctgacagcacaccatctccttgctctgcacaaacgttggcagctattgaaacttccacaagtttctgagaatgccagttcagaaagtatggagcaagccacagtaccactgcttatggaacaagagaagactgccatgtaagcagtccagaaagggatcaacttctaacttctaagcacatatatatacatgtacacatacaatttgaggggcattttaccgtctttacactgctcaccgggtcatttgcgtattcatttaacagggtaaccataaggaagttatattggtaaagctggcagattattacatacagtaggcattgacttttttggcatgtagccaaggggcaatacaggcatgtataaccagcaccctttctgcagggcaatttcgtcgtcagtaaaggtcaagctcctctttaatttcaggagcacaaggaatggtaaattaagttaaagagtgttttcctgtgttttacagtttgactaacaaaactcaccccaggacaggggcaaaataagccttcaggaattcacgaggaccagctaactcggagcaaacgatgccttactgaaatgtcaaaagtaaaggaaatgagtcataaagaagagaatttgtccagatctgtgagaacatgagttacaagtttaaataactgaacaaattatcatgttcataaactaactcttgaattagaacagtatcataattcaccaaggatcaggccctccgtccacatataaggtattttgactatatacatggacaagtgctcccaggtgcatagctaaaatccccttatatttgtggacagagagagtaggtaacatagttcatttggagtggaattgaaactattggcaaacaatattgcagtaatgctatgaagttggctccaataatacaattagaacctgacacatgaaaagagccagctgtatattcgacagatttcaacaagcatatttgttatcagttgcatgaattgtatgggacaatgagtacaaactaagattcgttaaactctgggcatacttagtactagtttgccacggcaatgctcccaagtcctgaaatctggaatcaaggctcataacaaagaaaagataattaaattgttgtttttattcctattattttgaagtaccagggcatctagaacagaagtaccacttatacatacggttttcaaggagacaaaatagaccacaaatctcataacgtttcaagctaactattctatacaagttaataatgtttcttcattcaaagcaaacaacatttcatttcatcaccttataaagtcatatagagatcatgcttccaaacagaactgatcccattgatattccaggacatacaaatattattaacaggaaaaaaaaatatttagtcacttccacggcaggtgattccgtgattggcacatataatgaaattgaaatgtcctaatgtttagacgctctcttgtgtgcattaatgtaatagacaagatcggaggaggaggacgagcaagcagatttagctgcaaaaacagtatggaatggatttccgtctgtacctttcaggttctttggccattaacatatttgattccagatctagtatcagtcaaattcgatcttactttggccattaatatgcacacacatttaacttatactgggtccatactcatacctctgaatatcctgcagcttaactaaataataaactaaagtattaacatagtccttttcaagtctttcactttttttgaagtctattcatgataccaaggtgtattcagctatgatacaaaaaaaaagttatgcatacgatagctgtctcttacagtatgttccacttctagaagactaaagtattatagagtattaactatccatatgagcacagttaaactgtacaccaggatcagcaaattttaggcatttagcttccagtacccactgggtttctctgtcacaggatcaagggaaaaaaaggacaaaatgctcagttttcaagcttgctgattaagcataattacataagctaactcctaagaaacatcatcagctctagtcgctgtggctgctaatataagctatgttgttcactattcacttccaagtatgtgcagcagcataaagtagttgtgtatgtacaaaaaggagttgttataaagaacagaagggcatgtcaagt

SEQ ID NO: 8809 - DNA, 45615 bp, Oryza sativa
ccccccacagtgacccgactatacttatagggcggaattctagactttttagatgtattggcccataatattgaagcccatttaacatgcatatatataatctaaccctaagtcaacaggtcaaagccaaatcctccaggacctccacccatccagatccacagcaaccaccacccaagtcacgcgcgccgcgccgccgccgttcgccagtccgccgggagcctaggagccgtgcacgccactgttcgctgccactcgctgccttctctcgtcgggagattgaagccgtcgtcaccggccggcgcggcgcttgcagccgtcttcaccgagagccaccggctgcctctgtcgacacgccgccagcctgcagccgtcttcaccgggagtcgtcgtcgccgtgctgccgggagccgccgtcgccgcgccgccgggagccgccatcgccgccgccatccgttgaccatggcttcagcctccccccgtaagctatgacagcgacgatgcaaggtgagcatactacaatccctcatcccttctctgtgctcgatagacgcctacctctagttcttctccatcgagttattcgtcttccatagctgcattgttgactcactaacccacgaccggcggtccacgcgaagggatgctgccatggatttggacctgctaccacgtgatacaagtaaagcagtagtcgctgccgcagccacacccaatgttgggcatactgccgtatccgccgccgtgctgggtgctgcccctgcggtcgtcgcattgggtgcagcccctgcggtcgtcgggttgggtgctggctcctctcgcaagtccaatgcaaatgcccttcgcaggcctcctcctttgaaaaggaccacatccaagccgaaaagccatcttgcagctgttggagctccttctgcaccgactactctaaacacgtcatcttttgccggcggccttcgtctattaaaatccatggggttcgatttcaagcacgctacccctcttatatgtttcagctcttttatttaacaatttggaatatgtaagttggagtttatgacttatgagattgcattgcacttaggtactgaatgtttcagctcttaggtactaaatgatggatttgttgatgttactgtcatatattttctttgcaaattgaagggatatttctttgcacgttactgttatatattttctatatttatacttatgtacatgcattattgtttggtgatttatagtgctatgcaggtatgcgtcaacatggtctgaactttaaatttgctttcacagctttgtaaagggatttcagtatgttactaggccattgaataaattttgaactgaatttatttctctcttctcagattcacatcgaagtcaactgcgggtagtgcgaatagaagccagcaagactcgcaatcacttccacctcacgatgagagtgttaatgattctcagccaatacaaggtgatgatgatgaagatgaggctgaggaggaggatgtggactttggcaccaagaggaagcttacttctatcgtttggaaggatttcaagaaagtaaaaatctgtggtaaagtcaaggctcaatgccttcattgccacaagcggcttggagggaaaagcagtaatggaacaagacatctccatgaccatttgaaaatttgcacattgaaaaagatcaagatggcgggacaaaacaagacacttgcacagtcttctttaaggttcaattcccaggagggaggaaaaatatctgtggagaagtacacatttgatccacaaatagctaggagagagcttgctgccatgattgtactacatgagtatcctttatctattgttgatcatattggatttcaaaggtttgtgactgcacttcagccattatttaagatggtgactcgaaacactattaggtaataatgatatctattagtttcagttgtctattaaaaatatctgcaattaagaagaaaaaattaacatttatgcatttttaggaaggacattatggactattacatggaagaaaataagaaagccctagcctacatggctggaactaagtcaagagtggctattactacagacttgtggacatctgataaccaaaaaagagggtacatggctgtcacagcccatttcattgatgattcttggacacttagaagcattatcatgaggtacttgatgaacaattaatttcatttcctactgctacatatttaattcagcatgacattagatttcatttttgcatcaatctgaatttaatctaggtttaactttgattgtataggttcatatatgtgcctgctccacacacaactgaagttatatgtgaacaactttatgaagcattggtggaatggaatcttgatgagaagatctcaaccttgactcttgataattgtaccacgaatgacaaggtaatcactgaacttgggaagaagattggcaagtctaagttgatgttggagggaaaattgttgcatattgttaacgaccaaatttggttatttaggtatcggagatgaagataaaatcgaagcggaatccaagatggagatcgttccagaagcggagcaagaatcggctgaagtccgaatcggctacgatcaggatcggtagagttcgagtcggacaaggttgccgattaagccgattccgacaatgtgattcggtacacgttgtcgggttgagttaatgtgcttcatgaggattgccatgcatggattgagtcctgaaaaggtaattgtatctattaattagggtatttcatgtaatttccttagagataagtttgggcaaaagtctgccgcaaagacttatggtatcttagagtttgttagagatgagagtcgtgtccgacatggacatattttgtaatctcgggtataaatagaccccgagccccatgtaatacaacaacacacgttcaatacaatctcggcgcatcgccaccctttacttttgttttttttcgacaagttcttgctttcgggttgagctgcatcagtttcgatcttcaactagatgtaaaacttgttatggcgggttgcgttatcgggattagtgcttccatctttatgatactctaatcttgtttatgtaattcgtcgaattatcatatattatgtataatcttcaacaatatcgttatctaaccttcaatcggctaacatctattattggaaggcaaccaatcaggttaaatatctatgttgacttagattatacagggtatctaccactctatgaaacagccaacagcttgattgtctagatattgtccttcttttcatatttatagctgcatcagttgagtttgaccttataagtcgttattaaaatctcaatttctagcctgcttttggttgccgattagggtagtgtcggggtttcagccgatcttacctgatttaactactctatgtcttatatgcttgattgacatgttaaatccgccctttatgttaagatcttgttgccgatacatgctagatctatctaatcggctatgctatgaacatctataatctcattgttattatatatttcgatctaagtgatttatactgtctcggcatggtgaccgatctatcccaatcacttgatttaagtatatatcaacataagaattatatatggttaatatctacagccgatcaagtagatttagttctttcttacttattcatgattgccgatcgattcaaatatgacatcggctcaaagacaaatgatacgtcatcggcggctggtcgatcggctatcgtttatggatttaaccgctattttcctgtctttatttcttgttgattgcatgatcaaatcaactggcacgctcacgaacctaaaggcaagatttttggacctgcactggagttaagcagatctcccaggcctcgtgtttttcacatcaacacatatgcgttgtgctgcccatattcttaacttaattgtgaaggatggtatagaggtgataaaatattcaattgcaaaaatccgtgaaagtgttgctttttggacagccacgcctaagagagtagagaaatttgatgaaattgctaagcatgttaaagttaaaatggatcacaagttaggccttgattgcaaaactaggtggagttccacctacaagatgcttagcattgctttaccttatgcacatgcttttgatcgtgcaaaacatgttgagaagctctttgattgtgcccctagtaaagatgaatgtgcttttgctgtagaggtagttaataggctcaagttgttcaatgatatcacagaagtgttctctggaactaattatgtgactgccaatgtccaactcttgaaaatttgtggggctaaagagcaaattaggcagtgggctgtgtcagggttacgggtaaggtataccctctacccttcgatatacgtcacgtatcgatatggtatgttcacgcgtatacggacgttttcggcatacgttaaggaaattcatcatggagttcacagatggaaggagtcctactcggtcagaactgggtcgtcattgtgtcgtgttcggtccagtctctccgagtccaactgggagacaggtgacctgcgatataaaagggaccccccaggaggacctaaggcatcgaatctcagagccaactccaccacagcctacgaagccggagcttatcggagccaagtcgccgggagatctagtcggatcaactcgactacgatcttgtcggtatcgtcgagttccactgttccctttgtaatctgtggttttcatcatataatcccatatcaactggattagggctattacctaccaaggggcctgaaccagtataatctctgtttcctgtttgcttgatgtcgtactacgtagatcctcgtaccagcgtaccccaataccctctatatccggtctacgggtattccccgtcgacagtggcgtgccaggtaggtggacttggtgctcaaggttctactactatgacatccagctttgtcgacaacagtgtcaacaccaacctcaaccaaggagttcctacttcaacaacactggtgtggactcaggtcggcgaaatcgtctttccggtttacaccacagtgccgatctcagctggtccgccaatggccggaaacgagaatgcagtggctacaacccagggcgactccatgtcgaaggatcctcccgccgaagcggagataggaacgtcgacaacatccgagcccgagaaggatcctagtgcggccaagccttgtctttccgacaggaatcacgagccgacgaggattacttccgaggtgacaaggtcctggtgtcctatccacaaaaccaggaaacacaccctgcaagcctgctgggtctttctcaacgtccatgctgaaattcgtgcctgcaaagagcgtggaattcagcgtacctctccaactcgtgatgtctattgtccaattcacaagacaaagaatcacaacctctcgagctgcaaggtctttctcagcgccatgaagacgccaccttctaaggtccagcagtcacgcatccccatcagggatgaacacaaggaacaaggagcgacgctgatttcagatcgattcgttggggtaatcgacatagatccccacgaaccatcagtcttgcacctgctcgaagactatggatcatcgacaacgagtacgccgcgtgaggtattggctatcgacgatgtcggcacatcagcgcgcaccaatgcggaagcggaaaatcaagcgactacactggcccagcacatcagagccgtcaacgcaatactgagggaaaccccctacgatcccattctgaacgacgatctcgcacgatggacagaacgactacgggaatcagtgaccaacctcagcaacgcgttcaaagaagccgctgctgcagtgcacccagaacagccaccaactggcgatgctaatggtgaagatcctgaacaccgggaattgcctcatcgagccaccccttcacctcgcggcaccggcgatctccgcgatcacctgaatggccgccgagaggcgcgacgcacaagtgacaacgagaaccgttctcaacatcgcatctcttcacgacgtcacgataacgaagatcgaggaggccgttcaagcgaagaccgaggccatgataaccgccacaaccgctgcgatcatgacgatcacgaacggcgggtgctgggcgatactggtcgaggacgtcgccataatgacgacgatgatggagatcggcgccgagacaacaacgggcgacgacaacaaggttctcgagaacccggccgacgtcctcgtaaccgcacgccggaaccgagcgacccatcgtcatcgtcatcatcttcctcatcttcatcatcagatagacatccacgaagggcgtatgatcgccgacaacccaccgcccccagcgctgggtgtagagctttcgatcgttcacttcgggatgtccgatagcctgaaagattccgacctggagcaatagagaaatacgatgggagcaccaacccagaagagttccttctggtttactccacggtactctacgctgccggagcggacgacaatgcgttggtgaattacttgccaaccacattgaaaggctctgcacgttcatggctgatgcatctcccccctactcgatctcttcgtgggcagacttgtggcagcagttcgtagccaacttccaaggaacttacaagcgccacgcgatcgaagacgacctacatgcgttgacacagaacccgggtgaatccttgagggattatgttcggcgctttaacgagtgcagaaacacaatccccgagatcaccgacgcttctgtaattcgcgctttcaaatccagtgtcagagatcgctatactactcaagagttggcaacgaggcgcgtcacgactactcggagattattcgaaattgtcgatcgatgcgctcatgcggatgacgcactgagacgcaagaacgacaaaccgaagactggaggagagaagaaaccagccaaggatgcacctgagtcaagcaagaagaaaattcgcaagagtaggaaaaggaaagctcaatcggaagttctcgcaacagaatacgcggaccctcccaagcgcccagacccacaaggcagcgatacgaagaaagcatggtgccctatacacaagtcggacagacactctctagaagattgcctcgtcttcaaaaagtcgctcgcaaaacacatgacatcggaaaaaggcaagcgagtacacgtggttgagaaggatgctgaggcgcctactcaggaatcggactcagcatacccagattccgatcttcatgtctcacacatctttggaggttccacggcatactcctcaaagcgagaatacaagaaagtggaacgtgaagtctgttcgacgtggcagggggctgcgcccaagatgaagtggtccgagcagaagatagaattctcagaagaggaccaccccaagattgctgtcatcccagggcaatatctgatcgtagtcgaacccactattcataatatcaaggtcgcacgagtcctgatcgacggcggtagctcaatcaaccttctcttcgccagcgccttggacgcgatggggatcccacgaaacgagttgacacccaccgatcaacccttccatggaattactcctcagtcatcgtccaaaccattgggcaaaattacgttgcctgtgactttcggccaagcaaactacttccgaacggaacagatcacctttgatgtcgctgaatttgatacagcatacaatgccatcattgggagaacttcactcgcgaagttcatggccgcatctcactacgcgtatcaagtgctcaagatgccaggaccgaagggaacaatcactattcaagggaacgctaagctggcagtacaatgcgacaagtggagcctcgacatggtcgagcacacgcccagcctacccgccacagctgagccacccaagaaagtgagcaaaacaaacaagacgccgaagccggacggcgcaatcaagatcgttccactctccagtgccaaccccgacaagaccgtcaagatcggggcatcactaggcgagaaataggaactcgcgctcatcaccttcctccgcgacaatgctaacgtgttcgcttggcagccgtccgacatgccgggggtacccagggaggtgattgagcacaaactcatggtgcgacccgatgccaagccaataaagcaaaaactgcggagatttgcaccatatcgaaaacaagccatacgagaagagctcgacaagcttctcaaagccggtttcatcagagaggtactccatccagagtggctagccaacccagtcatggtacggaaggccaacgggaagtggagaatgtgtgtcgatttcaccacctcaacaaggcgtgtcccaaggatcactttcctcttcctcgaatagaccaactggtggactcaacagccggttgcgagttgttgagcttcctcgacgcttactccggttaccaccaaataagcatggcaaaagaggacgaggataagacagcattcatcacgccgttcggggtattctgctacgttaagatgccattcggactaataaccacaggaaacactttccagcgcacggtccaaggtgcacttagtgaccagctcggaaacaatgtcgaggcttacgtcgatgacattgttgtcaagaccaagacaagcgactcattgattgacgatctgcgggaaacgttcgacaacctccgacgatatcgccttatgctcaatccagagaagtgcacgttcggagtaccatcgggcaagtgtcacaccttgaaaattcaaaatttataaattgttgtttaaaaggaatttttagaatttatttttaaaagtcttgaaaagaagatctaattttaaaaataaattccaatataaaatggggccagataaaatttcattaaatactttgcttaattctataattcctagatttttctgagatttatttgagctaaggaagtatttttaataaatggaattgcatttaaaaaataatttaaattgaaaaaggttttaaaaatcttcttttggctttgggccgaaagtcggctcaaaaacctctcttttctctctcctcggcccagccgacccagtccgcagccgcgcgcgcgcgttcggtcgctgacaggtgggtcccacctgtcaggtcgtcgtcttcctggcgtcggcctccgcccgaaaccctagccgccgccgccgccgccgttcctttccaaatccggccgcccctttccgtttccggccgaatcaatagaggggaaatgatctccgggatctcctcgaccttttctcctttggaatcttcggctaaatcggtttggaaaccgatgggttcgaggtcgattcggatcggctttgagcccgatctttccttctcgtcgccggtcgccgtgggccttcgccgccgcctccgagcccctttaaaaggaccccccgagctctcctctacccgtcgcccccttcgccttcgcctctcgtcgtcggagaagccctagcgccgtgcgccctagctcagccgtcgccgccgtcgctccagccgtgcgccgccgccgttccagccgtcgccgtcgctcgggaaggccaccgtcgggatcgccaagtcgccgccgtcctcgtccgttgcttcgccgccgtcggagaccgctggagcaccatcgccgtcgtcgaaccgaagagctccgccgcttcttcttcgtcgccgccgccgtccgttgggtttccgccgtcgttttggtcgccggtgagttcgccgtgccgtccgctacccgttggtgccctccgtttgcgtcctcgtgccaccgttcgccggcgagtgtgcaccgcccgagccgtccgagccgccgagccgccgccgccgatgatgacgtcatcgctgacgttatcggggccgtccgccgtgagccgtcgtggacccgatcgatctcggccgtccgttttggatggatcgatctcggccgtccgttcgcatgaaccgccgcctgtgcgctcggtccaccgcaaaccctagccgctgacgcaataaatccccttttccttttcaaaaataattctttattgcgtcataattcaattaaaaccggtttaagtgttttaatccgatttaatctttaaaaattcataactaattcatcttagctccgatttagttggttcaagtctctaaatttttctaaaattgagatctacatgttaaaaatatccacatgtactgttcatgcttgtttatgtgctgttttggtgattttgctcttttctgcttagattccgtcgttttcggagagttcgttttcgccggagaagagtttgaagagttccaaggccagcaaggtaatgtcacagctcctttccgaggtaccgtggtggtactaaggcacatggtgacatgatgtggggctgtgtcttgtgggtacagtggtacacctctgatcagagtaaaactattcgaatagccgtgcccgcggttatgggcgggtctaacaatgtttttcgtgattagtctcacatttctcaccatagtaaatgatgctttatttggttataatttgtttagctcctggtttggaatggttaattcctggtttggagattagatctgttcagccgggaatggttgttcagaatggttgggcctatacaacagggtatgttgtatagcgttggtttaatattgtttaatacttcactgttttattaaattctcaaatgtttactaaatgctgcttttgcaaaataaaaccctattatgccatcttttggtatccttgtgcacttgcatatttgctgcgtgacttgctgagtatgtcatatactcaccttgcaatcattcatcagaggaagagttctacaatgaggctgatggtgtggaggattaggtgtagccttggtcaagctgcctgtggagtggagccgtccgcgccgtttattttattttccgctgcttagatctttattgattgagaggaactatctacctctgtaataatattttattcgtttaaattagagtattaattgtactctattatcaatttgttattgtgtgcctcggctgattcctggacgagggttcacacacatgtaagcgtttggaattttggatagaaattccgggcgtgacaagttggtatcagagcttccttgaccctaggttatgccaaatggttacccatagaagccctctaaaaatgttggaaaaatagaactgttctcctccctttctcttttaattaaaccaaactaatagcacatgcacttcataatctgttttaatggttctcgttcaaaaatttattccagtgttattagtactgtacatctattactgtactaatggctcattttaccagcaaaagttttacaatattgttttatttaatcttgctgcaataaaataaatttaacatgttgattttataactttcttttatttcttttggaacctgatgttcaaaagtacaaaattcatttccaactgtttcaacttatcttgcaagcttggtttactttatttaattaccttttactttgatcttctaaactttattcaaattaatcccaaaacttgtgctattaattggataaatgtcttaactccctcttttcacttgtctttagatgccgcgctacaagcctgagtacttgtttggtgttgagggttttgtccaggagttgcgtacaatgtcctttgtcattggatttgggactgcccctttttatgcccagattcctcatgatcgtcatgaagagaagtgccgagtcaaagtcaccttgaacagtaatagtgaagatatcccctcagtgatgttcgaagctggaggaagaaactacatccatgcaagtcaggaggtggcaaggatcgccataggagagctccgcgatcgttacagtgatcagttggccgatactgagtatcgctatcatcctcgtcaaccccagggaagtgaccgtggcagctaccttgagactgaaggaattgagaatgatgctaccacaaggcatttggttgagatgctgtgggctatggatgaaagtcgtgcggagactgtgttagcggctcaagatcgtgaagatcggaatcgtggtaagatttgcaagctagaagacaaggtggatcgtttggagaaggaactagccgcattgaagggagaagcaccaccgcagaaggccaggattcgtcttaccgcaaggaagagagctctatttgtccctcgctatcaattggcgccaaaggttcgtgtggtggagaaagaagttgccccaactctagcagatcctccggtcaacatcataagtgatgatgaggaagaagaatccaagcgcaaccattccaagattgagtgggtagcaactcaagatgatgaagatgagccgaaagagccttcaatcgacctccgatgctcggaagaactagagtgacttgttaagtcgttgtcttagatcgttgtgttagtttgcttgctttaagttgcttgtgtgtgcttcgcatgtaatttacatcagtgatgggatgtaagtgcatgtgtttgtttgcttttgagtgttaggaagttggtgagtttagtggtgtgagagttttcagttttgtaataaaactcagttaagatcaataaaagttaaagtaattctctgtcctaagtagtttccccccccggtttctcttcttgtgccctgtccagcaagatggtgaatactcgcagcaatgggaatggccccaacaatcccaataataataacaatgaagggaacccaactcttgcccaagtcctggctcaacaggtgcaacttatgaacatgatgatgcagcaacttcagaatcagcagaaccaaggaaataaccatgcacctccgcagaacaggttaactgattttcttcgtgtgaggccacctaccttttctagcactaccaacccagtggaagcaggtgattggttgcatgccatagagaagaagttggatttgcttcaatgcactgatcaggagaaggtctcatttgcatcgcatcagttgcatggccctgcctctgaatggtgggatcatttccgccttaacagaactactgctgaacctatcacttggcttgaatttaccgctgctttccggaagacgcatataccatcgggagtggtgtctctcaagaagaaggaattcaggtcgctcacccagggatcacgctctgttacggagtatctgcacgagttcaatcgtcttgctcgttatgctccggaagatgtgcgcaatgacgaagagcgtcaggagaagttcttagaaggacttaatgatgagctttcttattcactcatgattggagattatcctgatttccagaagctagtggataaggctattcgccaggagaacaagtacaattgcatggagcagaagaaacgccggattgctcaattcaagacacaacaggggaataatcagaagccgcgtcttactttaggaccccagtccataccacatggaagttcttcgtccgttgttcgtccgcagcgtcagttcttcaacaacaatgctggcaacaacatacgtaatcaagttccgcgtcctgttgcagctccaacacagcaacaacctatcaagagggagcaaggcagcaagcccgcggtgtgtttcaactgtggagatccaggacattatgctgacaagtgtccgaagccccgacgcgtgaaggttgtccctgctcagaacaactctactgtaccagtatcaaaggcccgtgtcaatcatgttgctgctgcagaagctcaagatgctccagatgtgattttgggtacgttccttgttaacttagttcctgcaacagtgctttttgattctggtgctacacattcatttttatctatgagttttgctggaaatcatgggatggaagtagaagatcttagacgtcctttgatggttagtaccccaagtaatcaagcactctctttgcaacgtagcccctctgtcagaatagaaattcaaggagtaccatttctggccaatcttatcttgttagaatccaaagacctagatgtcatcctagggatggactggttagccagacataaaggtgtgatagactgtgctaacagaaaagtaactctcaccagcaatgatggtcgagttgtaactgttcatgcattgtcttctgaatctttaaggtcgagactgaaccaaataactttggaagagattcctatagtccgggagtatcccgatgtgttcccagatgatttacctggtatgccgcctaaaagggatatagagttcagaatagatttggtaccaggaacaactccgatccataagagaccttatcgaatggcagccaatgagttggcagaagtcaaaaggcaagtagatgatttgcttcagaaaagatacatcagaccaagttcatcaccatggggagctccggttatttttgtggaaaagaaagatcatacccagaggatgtgtgtggactatcgtgccctaaatgatgtgactatcaagaataagtatccgctacccagaattgatgatttgtttgatcagcttaaaggtgccactgttttctccaagatagatcttcgatcagggtatcaccagttgagaataaaagaggaagatatacctaagacagcttttaccactaggtatggattgttcgaatgtacggttatgtcttttggacttaccaatgcccctgctttcttcatgaacttgatgaataaggtgtttatggaatacctagacaagttcgtggtggtctttattgatgacattcttatctactcccgaactgaagaagagcatgaagaacatcttcgccttgcactagagaagctaagagaacatcggttgtatgctaagtttagcaagtgtgaattttggttgtctgaagtgaagttccttggtcacgtcatctcagcaggaggagttgccgtcgatcctagtaatgtggaatccgtaaccaattggaagcaaccaaagacagtttcagagattcgcagtttcctaggcctcgcaggatattatcgaaggtttatagagaatttttccaagattgctaagcctatgacacgactgcttcagaaagatgtgaagtacaagtggtcggaagaatgtgagcagagttttcaagagttgaagaatcgtttagtatcggctcctatcttgattttgcctgatgattttgcctgatccaaagaagggtttccaagtgtattgtgatgcatccaaacttgggttaggttgtgttctgatgcaagatgggaaggtggttgcctatgcatctcgtcagttacgtccgcatgagaagaactaccctactcatgatcttgagttagctgcagtagttcatgcgttgaaaatttggcatcattaccttttcggtactcgaacggaggtatataccgatcacaagagtttaaagtatatctttacccagccggatctgaacatgagacaaaggagatggttggaattaattaaggactacgacatgggaattcattatcacccgggaaaggctaatgttgtagcagacgctcttagtaggaaaggctattgcaatgctacggaaggacaacggttgccattggaattatgcaaggaatttgaaagattaaatttgggaattgtcagtagaggtttcgttgcagccttagaagcgaagcccactctaattgatcaagttagagaagcccaaattaatgatcctgatattcaagagatcaagaagaatatgagaagaggaaaagctatcggtttcttggaggatgagcaaggaactgtatggttgggtgagagaatttgtgtccccgacaacaaagatttaaaggatgcaattctgaaagaagctcatgatactttatattccattcaccctggtagtaccaaaatgtaccaggatctcaaggaaagattttggtgggcaagtatgaagcgtgaaatcgcagaatacgtagcagtatgtgatgtttgtcagcgaatcaaggcagaacatcagaaacctgccggtttgctgcaacctttgaagattcctgaatggaaatgggaagaaatcggtatggattttatcactggtttacccagaacgtcatcaggccatgactctatttgggtgatagtcgacagacttaccaaagtagctcatttcatcccggtaaagacaacctattctggaagtcggttggcggaattgtacatggcaaggattgtgtgtttgcatggcgtccctaagaaaatagtgtctgatcgaggcagtcagtttacttcaaatttttggaagaaacttcaggaagagatgggttctaagttgaactttagtactgcttatcatccgcagacagacggacagaccgaaagggtgaatcagattctggaagacatgttgagagcttgtgctttagatttcggtggaagttgggataagaatctaccctatgtagaattttcgtacaacaacagttatcaagctagtattcagatggctccttacgaagcactgtatggtcgaaagtgccgcactccgcttttgtgggatcaaacgggagaacgtcaggttttcgggacggatatcttaagggaagcagaagaaaaggtgaaaatcattcaagaaagattgcgtgtggctcagtctctacataagagttatgctgacaatcgccgcagagatttgagttttgaagaaggagattatgtgtatcttcgtgtcacgcctcttcgaggggttcatcgttttcacaccaaaggaaaattggcaccgcgttttgtgggaccttataagatagtcagcagaagaggagaggttgcttatcagttggagttacctcaatctttggcaggagtccataatgtgtttcatgtgtcgcaattgaaaaagtgtttaagggtacctaccgaagaagctaatcttgaacagatagaagtccaagaggatctgacctatgttgagaaaccaatccgtattttggaaactgatgagagaagaaccaggaatcgagttatccgtttttgcaaagtccaatggagtaatcactcggaagaagaatcaacttgggaacgagaagatgaattgaagtcagctcatccgtatctgttcgccagttcttccgaatctcgaggacgagattctgtttaaggggggtaggtttgtcacaccctgaaaattcaaaatttataaattgttgtttaaaaggaatttttagaatttatttttaaaagtcttgaaaataagatctaattttaataataaattccaatataaaatggggccagataaaatttcattaaatactttgcttaattctataattcctagatttttctgggatttatttgagctaaggaagtatttttaataaatggaattgcatttaagaaataatttaaattgaaaaaggttttaaaaatcttcttttggctttgggccgaaagtcggctcaaaaacctctcttttctctctcctcggcccagccggcccagtccgcagccgcgcgcgcgcgttcggtcgctgacaggtgggtcccacctgtcaggtcgtcgtcttcctcgcgtcggcctccgcccgaaaccctagccgccgccgccgccgttcctttccaaatccggccgtccctttccgtttccggccgaatcaatagaggggaaatgatctccgggatctcctccaccttttctcctttggaatcttcggctaaatcggtttggaaaccgatgggttcgaggtcgattcggatcggctttgagcccgatctttccttctcgtcgccggtcgccgtgggccttcgccgccgcctccgagcccctttaaaaggaccccccgagctctcctctacccgtcgcccccttcgccttcgcctctcgtcgtcggagaagccctagcgccgtgcgccctagctcagccgtcgccgccgtcgctccagccgtgcgccgccgccgttccagccgtcaccgtcgctcgggaaggccaccgtcgggatcgccaagtcgccgccgtcctcgtccgttgcttcgccgccgtcggagaccgctggagcaccatcgccgtcgtcgaaccgaagagctccgccgcttcttcttcgtcgccgccgccgtccgttgggtttccgccgtcgttttggtcgccggtgagttcgccgtgccgtccgctacccgttggtgccctccgtttgcgtcctcgtgccaccgttcgccggcgagtgtgcgccgcccgagccgttcgagccgccgagccgccgccgccgatgatgacgtcatcgctgacgttatcggggccgtccgccgtgagccgtcgtggacccgatcgatctcggccgtccgttttggttggatcgatctcggccgtccgttcgcgtgaaccgccgccagtgcgctcggtccaccgcaaaccctagccgctgacgcaataaatccccttttcctttcaaaaataattctttattgcgtcataattcaattaaaaccggtttaagtgttttaatccgatttaatctttaaaaattcataactaattcatattagctccgatttagttggttcaagtctctaaatttttctaaaattgagatctacatgttaaaaatatccacatgtactgttcatgcttgtttatgtgctgttttggtgatttttctcttttcttcttagattccgtcgtttccggagagttcgttttcgccggagaagagtttgaagagttccaaggccagcaaggcaagtcacacagatcccaaacaaccctttgagcatgttgatcctatttaaagctattgtttctattcaactattgcatttattttcgaatgtcattgggtggatttaacctattctttgttatggcccttttgttcttgtttaccttattccttgataccttgggttattataatttgactagcatggaccttacatattggattggttcagctagatattagatgtaattgcttagccctgcttagaaacactagttcacttttgggttaactaatgactcactataatttaatgatggcttaatgatagttcacgatggttaatcgtgattagttaattaattaatgtgctaactaaaacctgataatggtgggttgtgagcacatggttttgttggtcgtgctcatgacaattaaggaccggttcacgagtttcggttgtgaaacattaaccgtgccaaccacaagctagcgtgggcaacggctttatcttttgtatagcatggttcattgcagagcaccaggttgagaagtggcggagataagcccacgggggtcgctggggagtccattacctctggttttgagggggagattatgatccaggaacggtgcactgtagtggattgtgttgtgcgagaggtaatgtcacagctcctttccgaggtaccgtggtggtactaaggcacatggtgacatgatgtggggctgtgtcttgtgggtacagtggtacacctctgatcagagtaaaactattcgaatagccgtgcccgcggttatgggcgggtctaacaatgtttttcgtgattagtctcacatttctcaccatagtaaatgatgctttatttggttataatttgtttagctcctggtttggaatggttaattcctggtttggagattagatctgttcagccgggaatggttgttcagaatggttgggcctatacaacagggtatgttgtatagcgttggtttaatattgtttaatacttcactgttttattaaattctcaaatgtttactaaatgctgcttttgcaaaataaaaccctattatgccatcctttggtatccttgtgcacttgcatatttgctgcgtgacttgctgagtatgtcatatactcaccttgcaatcattcatcagaggaagagttctacaatgaggctgatggtgtggaggattaggtgtagccttggtcaagctgcctgtggagtggagccgtccgcgccgtttattttattttccgctgcttagatctttattgattgagaggaactatctacctctgtaataatattttattcgtttaaattagagtattaattgtactctattatcaatttgttattgtgtgcctcggctgattcctggacgagggttcacacacatgtaagcgtttggaattttggatagaaattccgggcgtgacagcaagctactcggcttcctcgtctccggcagaggaatagaagcaaatcccgagaagatcatggtaatcgagaacatgaggtcgcctacaagactcaaggaagtacagaagctaaccggatgcatggcagcactaagcaggttcgtcgctaggatgggagagcgaggacaacctttcttcgctctgctgaaaaaacaagacaaatttgtatggacacaggaggccgaagaggcattcattgcattcaagcgctacctatcaaatccacatgtacttgttgcccctcaacctaatgaagaattatttctctatattgccgccacgccatattccgttagcactatcattgttgttgagagagagaaggtgcaactaccagtctactatgtcagcgaagctctccacgacgtaatgacaagatatccacagatccaaaaactgctctacgcagtaatcatgacatcaagaaagctatgccagtacttccaagcccacagggtcacagttgtctcctccttccctctcggtgaagtcatgagaaataaagatgttgtcagccgcattgccaaatgggtagtcgagctaagccaatttgatatccacttcgtgccacgaacagccatcaagtcccaggtactcgccgatttcgtagccgattggaccatgcccgataacaggtcagacaaccaaatcgacaatgaaacgtggaccatggcattcgacggcgcactcaacagcaagggagcaggggcaggattcatcttgacatcaccttcgggagatcaattcaagcatgcaattcacctcaacttcagggcaaccaataacacagccgaatatgaaggactactcgcggggataagagttgcagctgcgctcgtagtcaggtgactgatcgtgaaaggggattccgaactagtcgcgaaccaggtgcataaagactacaagtgctctagccccgagttattcaagtatctcgcagaagtcaggaagctggagaaaaggttcgatgggatcgaggtccgacatgtataccgcaaagacaacatcgaaccagatgatctagcacgacgtgcgtccaggcgagagccactcgaacctggcacctttctggacgtcctaaccaggccatcagtgaaagaggcaagcggcgaagatagcccggtcgcccccgacatcagctcgggggctatagaggcagagcgcaccgttgccgatatcgagaccacggacgactggcgcaccccactcattaaattcataggcagcgaagagttgcccgaggacgacgcagaagtcgagaaaatatcccgtaaagcaaaagtctactgtatgatcggcaatgatctatacaagaaggcaccaaacggggtactcctaaaatgcatcttgtccgacgacggcagacacctcctcctcgacatacatgaagagatctgtgggtcacatgccgccggtcggacattagtcggaaaagctttccaacaagggtttttctggccaaacgccctcaaagacgcctgcgacatggttcaacagtgtgaagcctgtcaattccacagtaaacacacaaagctgccagcgcaagcactccagactatccctttcacttggccgttatcgtgctgggggctagatatactcaggccattcccacgaggacagggcggctacaggttcctattcgtggcgatcgacaaattcaccaagtggattgaagcgacacccacgggggaaatcaaggccgacaacgccatcaaattcatcaaagggatattctgcaaattcggattgccccaccgtatcataacagacaacggctcccagttcatcagtgccgatttccaggattactgcatcaggctgggagtcaagatctgcttcgcctcggtttctcaccctcagagcaattgacaagtcgagagggcaacggcataatactacaaggaatcaagacccgcgtctacgacaggctcatgtcacacgacaagaattgggtcgaggaacttccatcagtactatgggccgtgcgtaccacaccgacaacgtccaacaaggagacacccttcttcctcgtgtacggctcagaggcgatgctccccaccgagctacgacatcaaagtacacgagtacagaagtattccgatgaggatcaggaagagcagcgatacgacgatgtgaatctactcgaggaacatcgcgaacgagttgccgttcgagcagccagctaccaacaagcccttcgccgttaccacgagaagcgcatccgagcacgcatgctttcgatcggcgactacgtcctccgacgggttcaaagccaagcagggcgcaacaagctctcacccaaatgggaaggaccgtacacgatcacgcaagttttgcggccaggtgcattcaaaatcgcagatggcgatggtcgcgagttggcaaattcctggaacattgatcaattacgtaaattctatgtataagtcaatagtatccatacttgtaagacatcttacagcctcaataaagcctattttttaggtacagactacaatcaaagtgttccttttcgatgatcccttacccagatgacacctaacgttgaaacctatcctcatgtctctttacgccgtcttgacaaggcctccgaggaacctaagggaacttcggcggggacacccagagccgataaggccttgtcggatcctgtagagacgaaagaccatgtaagatctggttgtgtaagagttctcgccgtgcgtattaaccaagccgtgtaatcggaaataaactttccaacttcacggctgggggctaggatcagtgcttgttcaaccgaggcaggtcaaaggtccaagagccttatcttccgagaagaattctccgatgacaaggctggaggctagggagagtgtataactcaaacgactgatcgaagtcgcgaagtgagaagacactcatacacactacgtccagagtaagaaagcttagtaagatagatttcttttctattccacaagtatttcttacaattccatcaaaattcaaaactatattacactttttccaaagacatttgtcacaggatacggagactaccaggaaggacaacgctagtccatcgactggaaaaccttctccgccagcggcgccatcgactttgccaggccatctatctccgtaggagttctctgggaacgagaaaacccttcgcggaggaactcgagatgcagctgcgaacgatgatctcgtatgcaggccaacacgtgccccccggcatatcggcttgagcgacgacactcctgcttcaaggcctcgtcgatatgttgaccgatgccttcgagctgggcataggccccattcagccatgagatgtatccggcagccgattcctcgggatccccacggggtattcggagctctctacagactctcgacatggatgtgcagcaactcttcagatacgagttgaaccacacctcacgaccccggagtgtctctacggcctggtcctttctcacctccagcatagtcctctcgagttccgcgacctcaaacttcgtcctccaatactggatgcgacgatcctggtcagcaagcgcactctcgagatctgctcagcatggaaacgactaagtcaagctgctcttctctcccgagaacacaacaaatcaagtcgatccagacggaagggcaaaggaaatggtaacaaaggacaacaaagtactcaagatcaaaatgctaaataaagctaaggcaatgaccgcacacactagggcggttgagaccaataaaagttttacaaagcatgactaaagagtacaagagagctaagaccctactcttcaaaaagcgagaggacggactcccccagatcgccgacctcctccatcacatccttgcgcgcgtcgctaaccgccccctgatccaagatcttccacagatcgagttcagggtgcgccagcctcacacatgcaaggacgtggcacaccccggtgtagatcccattagacgtctcctctccgatcctggccgcatgcttggaggggatctcctccatcaccgtcaccagctccgcaagagaagacgtcagcgagaactcatcgggattcgccgggatggtggacttgataccgcactccccggcgagctggtgcagaccagtataggtgacccgcaatgagccatggatttccgacaagttgttctcaagctccgacatgcgatgctcgagcccctgccgttgtcgctcgttgccggccaccagttccctcatcttctggaggtcctcgcgaacctccgccaggtcgcgcgctagccgatcggcgtgcttgttcgccgacgacgcagccgccgccctcgcctccgcgatttcgtggctaacaccgcgagcaccagcctcgaggaggcgccccatctcaacctggagctcctcccaggtgaggacggcagccggcgaaccacaatcagccacaagatcccccagacatccgtcgcctcatggctcctgggcacgacaacgacatccgttgaggccacggcaggagacgcgttggaggtcccccagacccatcttgcgctgccttcgcccgcgccgccctgcgaaaggctgcgattgagacagagttcgacgaaatcacgaaacctcaaattcattcacttacttctcgctgagcgtcacaagccgctgccatcgcggaggcgggggagacgcgtccgaggcctggagtacaatcgatatgatgtgaggtggaagttttccgactacgtgatcaaataacaggagaacttaccgagggggtgggtgtcttccgacaatgtccgactacagaggagaatttcctcccctttttcggaacatcgctgccactcgtcgtggcagcggcagcagcagtgtcagacgcctccttggcgaccttctccttcagcgacgctgccacctgatggtccacgagcggcccgatgatatcagtcagaggaagagcctatgtttcatgaagtcataatgcgatcccggaagaaaaatgcaaaaggaccgctaagtacacttacattgatggcagcgtcacgctcggctgcccctttctcgcaaagggggacggggacgttgctcgccgttgtcgggccgctgatcatcagttggctgacgcggcgctccacggttgcactattcaagcctgtagatcgagaacagaatccgataagccgggaagaacatgcgcataagggagtcaatttaactaaaaaggaaatacctcgaggagaaacccgggtcgcgtcctctggcccataataatcaaaggcaggaagggctcgagcctgaagcggctggatccgcctaccaatgaaatcggcagcaacttcataccccgacaacccccgttctcggaggtcgtcaacgatatcgatgaaagattggagggacggggtcaaggcaggtttggtggtccaagatggaaccttgtctggctgctcctcaggaacaacgaaggcaggatccgaatcctctacctgaagatagaaccacctcccccgccatttgctgcgagatgaggggcactgaaaggggatgtatcgtgacttcaggccatcccgaagtcggaaaccaacacacccggacacctttttggattccatccagcgtaactcatagtaaaagcggaagaggtcaagaaacggctctaccccaatgtaggcctcacaaaggtgaaaaatactcaggaaggcgatggagttggggttcaaatggagcaaggaaagaccatagaaatttaagaccaaaaggagaaattcagaaggcggaggaagaaaaccgcagagaataaagtcctcaaccgcaaccatgcgacccaggacaggctggggttcagtacctcctacttccctctccgcggtcccgcgactgggaagggcgccatcctcctgcagtttcttcagtgacacactggtggaggtagacttgtcaagatccatggccaccggagatcgccggagaaaggaccgagatgagttggctagggtttttgcgggagcgaagaagacgagggacgcttggaagctggagagttttttcaacgggcagacctcaaattggatccccaaaactcccttaaatagacgcacctccgccggtgcgaatttctgggtccgttacgcgtggcagtttttcggacttcaatttaaattcactcatgaccgttgaacttcactcgatgttgtcgatcactccttgtctctccgtcctcacaccgagaacaacgacaatttcgacatgtgaagtcgcgatcagtttcaccagttcatttaagcagaagtcggggggctactgtcagggttacgagtaaggtataccctctacccttcgatatacgtcacatatcgatatggtatgttcacgcatatacggatgttttcggcatacgttaaggaaattcatcatggatttcacagatggaaggagtcctactcggtcagaactgggtcgtcattgtgtcgtgttcggtccggtttctccgagtccaactgggagacaggtgacctgcgatataaaagggacccccgggaggacctaaagcatcgaatctcagagccaactccaccacagcctacgaagccggagcttatcggagccaagtcgctgggagatctagtcggatcaactcgactacgatcttgtcggtatcgtcgagttccactgttccctttgtaatctgtggtttccatcatataatcccatatcaactggattagggctattacctaccaaggggcctgaaccagtataatctctgtttcctatttgcttgatgtcgtactatgtagatccttgtaccagcgtaccccagtaccctctatatcctgtctacgggtatcccccgtcgacaggctgcatgtggcaataatattatagaggaaatgtcaactgagatgattgcgaagtttgataagtattggaaggagatccaaggaccaatgggattggccaccatacttgatcctaagtttaaaacagactacctccttgggttcattgagtccattactagccaatcaagtgaggagtgtacagacaaacttgaagaggttaaaaacaatttgtatgacctcatgaaggagtatgaaatggaagaggatgaagataacacagaatcttcagctcattcacttgctaattcaggtgtattgtcttcaattagtgcacgtgttgcttgaaggaggccaccagcaataagagttaaatctgagctagataggtacttggaggatgagttagtctcaattaatatggaaaacttcaagatttttgattggtgtaaggtggctgggacacaatatcctacattgagaaaagtagcatgggacatatttgccattccagttagcccagttgcatcagaggctgcattcagcactagtgggagggttcttagtgagcaccgcagctgactcacttcagatatcttggaggccttaatgtgttcccaaaattggctacgaaacaagtacaaaggtgtatgtgttgtaccattcaaacatagtgtgatcatttatatttttccattgtcatggttgcataataatcattacaactaattttgtagatgctgataatgaagaacctgcaagatttttggagctgtcttcaagagatccaagataagatggaggtattcttttcaaactaaaaataattgactattgcattgtactcccttcatttccttgctatcaaataattgactaatgcctatgtattttgcttgtcttttgcatgcagagacttgcactagtttgagacatgaagagtcgaagacagtgccttctaagctaacgtgtgcatgatgcctatttgtgtattttgtttattgtgatgatccattggatgatggttgtcacgaccggaaatcacccaacgggcgttccttacgtgcgtgtattattccttgtcccaggaggcaaggtacaccaaaagttgatacaattcagagtttaacaagcggaagcgtaaatagttaattattacatgggcagcgacggcccagcacactcaaagacaacgaagaacagcggaagactagggcgacgaccacaggcacttgacggcaggcacgagctagacaccaaagccttcatcttccaggggctcctcttctgggtttgggaaaaattgagcaagactgagtacaaccaccgtactcaacaagacacacccacaagtgcagcataattgcaaaggagtacaatggaattataatataggggttaggagttgcagtaaatagcattaaaagacacttagttgctcaaagctatgttgtaaacacgatcctagagctataaaatattattaatcaaggccgtgaacccacacgaacctgccttaacccaaggcctacgatgattcagaccgaactggcaacccgaccctgggtcccagctcgtcccaagccaacccaggccaaccattccacattttagttgttaagcaggttttaagaattaaaacactaacttgggtacattgctcggcttgcccataaccgagggcgcggctattcgaataggttatactctgatcagaggtgtacatctttacccacaagacacatcttcctcacgtgtaaccacgtgccacataccaccacggtatacagacggaagacgtgacatagttcccaacccatcctagccatagacaagagtaccgacccaatcccacctacggccggaacccccgggacaggtaggcaggactgagcccctagcagcagggcaccaaccctgtgccatgacatctcgactaccgggccgcagctcgtgtagccttcatttgtcctagagatgtccatcgaatcccccgacttcgtccatctccatccgtgtacttttgtttataaccagactgagccacaaactaagccttacccattagacatgtggaagtacggtggtgctttgcaacagaggcccgaagaccggtccttatatggccgaggtgcgactatcaaaaccatgcaccccgagcccagcctaaaaccattttgagagttttgaatagagggggcggggtgaatccaattccacaataatccaacaattccagtgtccaggtgatatgaatattaccacagtctagggttttaaaaccacctaatgttacctaattaatcagcgaagcatctacctaaaatcatactagtgataccacaaatagagtgtccactagttgggggttttgtttattctagggtgaacaaggtaataatagcaataaaaataataaggtcgtaacaaaggtaataggcatggctaaataaaacagtgataacgcgggaatttaaataaagcgataatgcaataatttaaatcaaaataatttcagaaattgggattcaatatgttcaaggatgatgtgtcttgccttgctcgctttcccaaacgccggcttcaacttccacgaagagcggatcctccgaagctgcagcgtctacacgaccaacggaaaagaaaaggcttttactctaacaaactccatataaaaagcattaacaaagcacaaaaatgggttcttgacttcttaaggaaaaattagagacttgaacggtccaattctgagttcaaatggccaagttatagccatttgaagtttatatgctctttaaatgaatatttgcgaatttcttcatttaaattttaatttaaaatcggatttattgcgtcagccgaggggagagggcgcgcggaccgggtccacgggagcggggcccacgcggcagcctcacggcccacggtggaccgggtgcacgcggctcacgccgaccggcgccgtgggccccaggcgtcagccgcacccgagggcgcgggcggctgacggccgagccccacgtggcagccgctcggtgcgcccgggggggcggccattgcggcgcggccggcgggaggcggcgcccgtgccccgatggtcaccgccggcgaccaccggcacggcggaacagcgaccgagagaggggagggaaagggggaaacgaagcggcggtccacggctcaccccgagtcgaaggcgacgacgaaaacggcggccggagcggaggaaggcggcggcgcggctcgggtcgacggggtcgacggcgttccggcggtcggtgagcgaagcggaggggcggacgaggtcggcgaggatgcggcgaagccgaaggaggcggcgccggggcgggagatggtccggggcgacggcggcggcggaccggagctcggcggcgacggcggagagagagtgcgacggcgcgggctcgattccgacggggaggaaaggcggcgagtggcggaaacggtggaggggaaggggatgacgggtgggccccacccgtcagcgagggtggcgggcgggcccgcccgtcagcggcgcgcgcgcggggaggaggccgagtgggccgcggggagaggagagggaggggagggagctgggccgagccggcccaagagggggagggggagggaaagggaactttttagggtttttctttttataaaacctttttaactttgtttatttcttcttaattatcatttgtgctctgaaaattccactaaaatttatttacgcattttaggctttttaggaaatatacaaaaatcctccaagccttatttgacttttaactttgcacattttaatttttgaaggctttcacatggattttaattattctaatcataatttagaggatgtattttagagtcgatttgggacgcgacaatggtgccccagactcatatgttgctgacttagtgactatgctcatttgtgatttgtgaaactaatattagcttcagactgtcattttgtggctcatgtgatcatgtgatgtttaatattagctccagagtctagactgcaattttgtggctcatgtcatcaggtgatgtttatttgtgttttgcctaatgaagtaatgacaaatgataatgatccttactgtgattgtgatctataatttgctgatttgttgagtggagtattttggatatatttgatataatgtgattgtgaatatgttgtttaaccggggacgtgttcaccatggagaaaaattcaccgcgtggtgatcggggctagagaaattatagccccgttgtagttgacgggggcggggacagtgacatattttcaccgtggtgacggggacacgggcatgaccccgacggtgaattaaccattgccatctctattaacaccagactcaaagatgcaaaaggtgccaggactgcgggatgcaggtgcacgtcacaagcctgagaaggagcgatcgtatcgcagagaaagagagaggagaaacggaatgggatagaggacagggcatgaccattgatgggagatttttgtggtgcatccagcatatggtgggtcccatggtatgctttatatttttccttttaatttccgtcgcacttttggacgtatcaaagcatgcatccataccaatatacttatagcaaatggtctatatcatatacctaattaaagaaaatatgtaaagctttcggcgattttttttcaattgaaatggactaaacttagagtttgcttgtttagaatagggcttaattccgagtttgatacacaatggattttctctgatttttgggacaacggaaaaatgaaaagataagaatcgaaaccctcgatcaattttagattatctataaggaaatgacctgatttcacaagaggtggcttcagccggtgttgggcaactgagagaatctggacagatatgggaaggcggagggaaggagaaaggaggaaaatgggccggcttagctacgggttgaggaagaaaattggctaaaaaaggcccatacacaaatgaggatttttatttagattttgttttaaataaatgctgaaatgatatttgtattatagaaaatagcaattaatctttgaaaattccgagaaaaaatcaaagagtgtaaataatcatgaagaatttaataaaaaattaaattcagccatgctattttatttcccacacttactttacttataaattaatttaattatacatctacctatttaaaaatacctagatatctcaggaaatttataatttaattaactacaaaatgtaaatctttctcaattgttcctcaattttctcgttttttcttcccttgcaacgcacgggcactttttatagtcttttaaaatatttgtagtgtttttatcatctcacctgacataatgacgctgaaaaaaaataggaaatcaaaaatagatagctcccttcacaaacccagattcgtattcctggtttgcaacctaggactaaaggggttgcaacccggactataaattctctagcagttccaatttctttaaagtattatgtaattcacgttcttattagctttgaaccatttatttaaaaagtggctccaactagctaaagagtactgtactctctccttcccaaattgatcattatataatgaaatctaaaatttctcaaattgatcatcatataactttatggacgcggatttcatcggaatacaattaatgcaacatcggagaatgtgtgcatgctagcgaccaattttattaccatttctaattcgatctttattcctgatccaattggtactacatctcctagcgccggtccccctgctccgtgccaatcagatctttgttcccgatccagcttctcctagcactggttacaacgctcggaggccggggaaagaccggccgcgacgatggccccaacctttggcaccctgtgtcatctcctcgcttagagcaggtacaatagtagtagactataaaccagctataaccactgcatatatcgagaaaaaaagagaagagagaaaaaagcgggctacaaatttatagctagctgcaacacggactctaatatgttatgtgtgtatgagatgtgggaccgggtattaatggtgtagtatatttttatagttaactattgtataaatgggctattagattatttatagataatttagagtcagtagttggctatactattaaaatactcttaaggattagagcccgccctctcgtagtgagttcgtttccaaggttgggtgctggggttcttggttaaatatggcgtatatacataagtatataacgtatataaattttatataagtatgtattaaaaaataaaaaaactagaaaatatattatgtatacaaagtttgtatacacataaaaagttttttacacgtatataaactttgtatcccgtaaaaaaaacaaaaaaaaaacggaaggaaaaaaccgaagaaataccgaaaagatacaaagaaaaccgaaaaaaatcccacgcgcggcgcggcttctgccgccctcctcatccgcgcggacgtcggcgaattagcaatttcgggtatttttgctagtaattaataataggtatactatatatatataatctcctagggcttagggttttaccttaatttccttctccaactcgatcgatatatatatatatacacaccctaagccccggcctgcaacaaactacaccgatcgaccaggcgggcagcgagagatgatgcgcccctccggcctcctcatcagcggcggctccgtagtcgtgcggccggcaaccatggctgcgcgcgccccctcgcggcttccgtccgtcgtcgtccacctcccgaggtgcaccgccacaggagggccgccgcactgcaggctgacagcggaggcatcgtccgtcctccccaacatgtccgtagcgtccccatgggtcaacgatgacgacctcaccgaggtgatcgatcgatctcatcttcgatcatgatctcttaattctttccttcgatcatgcaatacaaatacaatatagaaaatccatattgattattctctaaattaatttgttgtttaatttcttttgctgccgatcgattactcgattaaattagttaggcacctgctgatccatcttgctaacttcataacttaaactaaaattgttgcattttgttttcgatgttccgttgaaacaactaatatttctatttattattagtttaatagtatatccttcatcccaatttgatcatcccctaaataaaaggtgcaaagacaaggacaataaaattttcatgtttttaaattaattatcaccaatcaaggtgctccatatatccagtggatattgcatcacactttaaatgttgcatggaattgcactaacagtcgtagcatgcatatggcttcatgcatgcattccattcagcgatgcccaattaccctttgcataataaataaataaagagacacttattattatatgataattattttaggaagacctcaaaatcgttaggtgatgatcaaattgggatggagagaatatctttagatctaatttatttatttgcttgtgtgatatattttcattattaaaaaaaatctgatttactcatatagagtcgtatcaattgtatgatatctatcgaatattatttattaattactccctacgtccctaaatatttgacgtcgttgacttttttaaatatgtttgaccgtttgtcttattcaaaaaatttaagtaattattaattattttcctatcatttgattcattgttaaatatacttttatgtatacatatagtcttattacatatttcacaaaaatttttaaataagacgaatggtcaaacatattttaaaaagtcaactgcgtcaaatattttgggacggagggagtagttaattatgagcataatatttacgtttttggcagatttccatctacgaggtaattgcgtggtctgcagaagaagccatggaactcatcaagcagactccacctccaccacctcctcctcctcctcctccctctcctccggcgacgcacgacgtgggccagccacctcctcctccctcccttgcagcgccgccgccggcgcagcacgacatgggcaagctactccgcatgtacgcgcggctgctccgccgcctggagtcgcaggccatcgacatgtacgccggcagcaggaggctggtggagtaccacgtcatggcgtggggcgcctacgaggcgacccggcccgcgctcctcggcctcgggttcatggcggggccagggatcgaggaggttctcatcgagtgcatcaacaggggcaacgccgccgtcgccgccgccgccgccgccggcgacggccagccgaggctgctcgccgcgttcgggatcaagccggagagcctgccggcgaacccgacggagaggcgcttcgtggccggcatcctgtacgctgcgctggagatgaggaactgcgtgcggaggcgggtccggtggctgaggagggtggagaggttcaaccagcggcggcgggaggaagaggcggaggcggccatgaggagggaggaggaggaggcgaggaggaagctggaggtgcaaaaggttcttgaggggtatgaggaatttataaattttaaataaatatttggcttgtttagattcaaggaattaattttggaggtttttcacagtaattaattgttttgatccctatgaaattactactttccaaagtagcacttagccttacaaagtactgaaggatccaagcttcacagtgcacttcatactattgaagggagtagttgcattttcaattgttttcagtggctactcgtgatagaaaccattatatatctttggctgttattgtgacttatatgttctaaactcatccaatttgtttttttggagccctttttgaaggaaattttatttatcttagacaactaataagacggtataattagtgcaagaccactctcaatctgtgcacgcatcatatgaattactttctaagaaaaggaaataaaaagacaagacaacaaatatcataccgtccgaactataaccactagggatcatcatcctcggacaatcaaaacagctcttctaaaacatcgtctctaaaaaaagaacaacgtgtgtacgtatcgacattgccatgatccaatcagtaaatataccataacataggttgtagttacactatgaagaaactcttctaactctatataataccttcaacaagctaggaagcaaataaacatgcatgccgccccaccattccaaggcggttcttccataccccgtacacttacaagcaagcaaataggcacactgctaaaattcatgctcttaacaagcacgccaataggcacatggccaaaattcatagggtccatctaaagagagagagttattgttagtgtaagtgatgcatctaaatagtggaagagttattatcagtgtaagtgatgagcaagcctataggcacatgcattcaaaatttgtagggtccatccaaagagagaaagagctagatctaaagaaacaaagagtgagtgttgtcggcataaatgatatcataatttgaaacaagatagcttcgacctacatgatgatataaaagtcagtaactagtgatgaagatgtgtcacaatgagtaactgcacctagtggagagaagggcttaggcttcactgccacctgcgcaaatacaatcactcccaccgttcatagatcaccactgcttaaaaaaaagtttgtgcggggcggtcaagaacctgtttacaatggtgttttagacccgcctacaaccaaggccttgtaaaaatcacatgatttgggcaagcgaaataacgaccgctcttggaaatcaatttccatggacgactcccttaagtttaaaggacttgcccatgagaacaaatttctagtttttgaatttgttggtgaaaaattccgtaatttagtagacacagcatattaaatcatactccatccgtccaaaaaaaactcgacctagggttacatattctcttttttttagggggggggggacggagagagtatgccttagatataatggctataaccgaaatgagagagtatgccttagatataatggctataaccgaaatgtagttgcaacttgcgagatgatgcaacagcctgttaattgaatgacaagatgcagagaaatcgggcaaaaaggcacacatcagcacactcgagatgatagtactaaagaaggaagacgtatatgtgaatccgtcttcgatcatgtgaaaccggaagcccaaaaggcacacatcaaaccattttcaaagatggaactgattgtttatgtcgacaaatccttcgcacaatttataacagttgacaaatccttagctcaatttaggcatcacatagttcgttcaagagcagcattcctcatcttacccaataagttatgttcacggaacaggagcaattattagcaggtaaaacaaggagcatcgcctcgtcaggtgcaacaccaacaccagaaccggagctaccaatgtcccaagcaattagagcattcacttcccttcaagttgtaccaattgccacatgacgacaatagtctttgattaatcaaaaccaatgaatcgaatatacaatttcagcatattctagcaaacaatgtaacattaatgaatcgaataagtagccgacacaaacaatggcaacattcagttcaagggccacatttcctcggggagcaaagcatatagcacacaactccacggtaagatagtaatagcatacgcagccacaaacttattggacgatcttgaaaggcatggttattgcaaaaaggatcttcttggttctctcactggttgagatcaaaatcaataacacgcacaaactctatgcaagtcattcacttggaaaatcaggtatgtcacaggcaccgggcatgctcgcccaggggtcctcaaggtcatgttcatcgccttgacctgcagcagctagattggtctcatcagaaagacccccatgaccgaaagcgtcatctgcatctttggcaaactgctcatttgagggcggcaattcttcgttaaactggcaataaactggcaaattcggttctagtgatacatcgtgcctccagaaagtagggtccaccaagggtggaggttggctgtcaaggaataggctgcttgcattattgttgatgccaacaaaagcatgacaacctgaaaagactaacagtaagttttatgtgatattgttcatgttaaaataagagtgagtacacttactgttctcgaggagatcatcaccaatgattggaaaggaagaactcagagagaaagcattcgattgaatcacttgattgcattgaacacgaggaaaacaagcatcaaaagatccttgggaatttgcaagttccccttgtccatgtcctccatgaaccaatgcatccagcagaccattgttgtttggagagagatattctgatctcagggagccaaagtcaacctggtcaataggatgtcctaaggggtcgtgatatgaccatgcattattattgttaaagtcatagttgggatattggagtgaagggagctctacattcatgggcctctgtatggtcccagaagtagagaagttgccatcaagaattggatgtccactgacaatggcactaccaaaaggtactgactgatcttgtgtggcaatggcactaccaaatggacttgtggcatcaactggaagagaatttggagtcacacaatttggccgaatataattttctggtctactatagtctaaattatcgaaaaaaacctctttgtaactttgaccatttccctgtaaaacctcatttgttcgtttcttggcacgtgattcatcagggctttcacagttcatcacttccagatctgtcaacttaaaatgattaaactccttcggatatagaggttcaccagttctctgaattctcttacatctagtgttccagaagttcttgatttcattatctgtgcggcctggcaactgcaataacaacaacagaagttcagatatgcaagttaacatatgatctaataggatttttctaggcaattagactaaagaaccttaaggcattagcctaataagcatttgcattgtacctcagatgttagaatggcaaatatagcaagatgtatcatggtgttgcaatagttggagaggatttaaacatacctaacgaaacagtgaatgatattgtctttacataaatgaaaatatgatgaagtcctattcgatgaacaaaaactcataggaatttagtaggaggcaggaaaggaacccaataaaagtttaaaaatatatatgaccatgtcaatgaatcctcccataataattgcagaccctaccttatcctgtggcctagatgtcagcttttcctgttgcagtttaaaagttgacactacttataacatggctcagaaaactaagaattgaaaattaaattcacatctttcgagattgtgtctagctagcgagtcacagtacatccgcctgcttacagtaacacaagggaaaaagacagttccatgtgttaactgactgtatagattcaagaaaataggtattctatttttttctaattagtgcaagctctgaatgctcaaacaagccgagttccttctctacagaagaggaataacagtaaaatatatatctagtttcttttctgcagtgcagcactgcaagcacgtgtgccccatggcaccacaacgcactaaagaaaaagtatgcccggcaaccattctctatttaagtccttagcaactaacgatattaagacaattaaattgaataaaataaagtctgtcaccaatatacataagaaagaactatttaatgtccactgattatatccagacactagcaaatagtatatatggagaagactgcactagacaaactgttagctggctttaatctagagacaatattttcctctaatccaatacaccaatgcatctaaatatcagatacatgattgcaatatgccgtttggttttctacggatactcgactgctattctcgggaccacacctcgagagctattctacggatacatgattaatagattatatactgcttgattaatagattatatccagagcaagggtctcgacctcgccgacctcatctggttgtcaggtaaactattcactcttccattaatttcagtatttcaccatccatttcagagttcagacttcaccatcaatattagttgcagtttcacctgatgacagtatcgtttctgaaaagaaaagtaaaaccattcacttaagctaatgaatggttaacttgacacaaacggcagccaaagatcgattttcacgttatatcctaattaagtcgattgattactagctagtcttcaggatagaactcagatttggtgttatatctagcttgatctagctagctacgtggtgtttgcaaatgcgtagtacaaaccaccaacaaatagtgaattagtgatgtgatatcgtgatgcaatatggagaaaacgattgttaacttttgcaaattctttatgtgttcagtccgcaactaggacacactctcactctcactcactcaggcactcacatcacaccagtaatgctgtccctaaagattcagaagatgaaagatatatagcctcgatcacaccgattttcatgtagtaacaatactaacaaacaatgatcctaataggaacctagaacagtgactacagtctacagatgccgaatttctatccattatctacaaaattctcgagccacgacaatccagaattgaacagacagcttacgtccaacatggaggattgggtctacttaattcatagaaggccaaagcttagctgaattttgttcacgggtatcgcatcaaatcaaagttaaaaaacagtttagatacgctgtttggttttctacggatactcgactgacaatatgccgtttgttctgattataaactaaacaatttatattaatcaagcagtatatcatgcttctagataggtagtatatatacgactaagttgtaacttgcaaaggttttgcagccaatggaggccagtgtccaggtaggcagccatgaggctctgcccctgcttatgtaaagccactacaagcaagaagatttaaaggataattggtctgaatcaattttctttcgatttgttggaggaccaaatactatttcagacaagactaacaacaattgtaaaagaacgacttactttgttattctctgcaaacaaggaataatggcaaagcatttgtctactccttttaacaaggccatttacaagagtgcagcatgtcaaatgtgtctgcaccatggcactacgccacactcagaaaaaagtatgcccagtggccattctctatttaaatcaagttggagccaattaaatgaataaaataaagtctttcgccaatacagaagaaaatactggttgatgtactctgaatacatctatctacgagcaagtggtatatttgcggcccctatatttggagtggacagcatgcattctccccactaggcaaactgttggtaggctttaatttaggtggttaaatatttttgctctaatccaactaatacaccaatgcacctaaatattaagcatgctactaatctaaactaacaatgaacggagtatcaatgcacaagctagcaaaaccaaggaaccatgaaagagtaggaggaggagcacacttacagagtttgccatcttagcccacttgttccccagccataaatggagcttgatgatcatctcctcctcttccttgctgaagggccccttcttgaggtcgggcttgaggtggttcgcccagcggaggcggcagctcttgccgcagcggttcagccccgcgttcctctgcacccggttccagttcccctcgccgtgcgcctccacgtactcccgcagccgcttgtcctcgtcgggcgtccacggccccttcttcagcggaatcctgccacgcacgcgcacacggccgccgccgccgcggcgacgaacccccgccctagccacaccgccctgctcctcttcgccgccgctggcgtcaccctcatcatcgccgccgtcgccgtctccgtctccgttcgggtgcagcatcgccggcgactccccctgcgagcccgccagcctcgccgcctcctcctcctcctccatcggcgacgaaccctccatcctcatcctgcacgaggaaaatccagtcaaatccccccaacaattcaacaaaaaaaaaatcaaaaaccaaaaaccaaatatccaacgatccaatctcgctccaccctagcccgaactaatccaaccagcggcgcgtggatctccagcgggggagagtgctcaccggcgtcgagacgaggtgggcggcggcggcggcggcggcggcggcggagagcgaagtagagtagtagactaggcggagtagggaggaggaagcaagtagtagacgacccccgatgacgatggctcgtgtcctgggccggaatgggctgccatctcgaggcggcccaactagggtttgcttcgttactaaggtttatcatgtaatttttttataggaaaaaaatatcaaaccctcttgtttattttatccatggaagaattattatatatccattcagataggataatgttttaaaaaaaggatatatgtatttaatattaaattccatggatgaaacgtggaaaagatatcttagtatttaaaagaaacaaaggatatatattccgcgtgctgaaattaatgttaggtacgttctctcatattaaggttgttttgaattgaagccaacacgtgtcctactgaatttttggtaacttcaatagttaggaaaaagctagatgtgtcaacattttcttgctaaattcttaattattaatattgatgggtcatgctatgggtgtatttagatttttataacttacatcttgatgaaattattgtcaaagggggagaaatatacaaaatgcatacttcttgaaaaggggagaattgaagttctagactcagtgaggagttgaggtccagacggtcaaggataccgggtgacgaagttggatacgagatggcatacggtggatggataccgtgtgggtgaaatctttgcaacgggcttcacgaggtgtgcgtgcaagcgtcggtgttcgcgaaggaaattggaaagtaagagtatatggtgctacagtacacgtggtactgtagcatgcatatatgtgtgcctactatgaattgcagtagcgtggtgatgcatgttgtgctatgcatgtgtgtatgcgtactgtgcagcatgcagcggctcggcttggtgatgcaagcagggcgtcggctggcctgggcatgtggcaaggcaagccgagtctgactcggtgaattttctgtggccggctgtggctgcaggtttcggagagtttgtgagaattacaattttttaagcaacttttgtacaaaaatttttttacaaaaaatacaccgtttagcggtttgaaaagtgtgcgcacggaaaacgatcgagaggggttagaaaaagagggtgccgaacacacctcattgtgccaagatgaaatatgactatcaaaagttgatggagggagtacttaattaattatgcactgcataatgctcacatcctaaaatcatgcaccagcgcgcttcactgtaccaccaaccagcagggcagccaccattggatgaaggcatgaagcacacacgtcctatttgattcgatccccgaattttgcctggttgccaatttgcgtgacagtggaacgcaacagcgcaactcgctagatagctgtacatccatgtgcaaacgaatgaattactaacgattattatgtgcacaagcaaacgtacgtgtaacacccttatatcggagcgggccaaaaaattcaaatcagcactgaaaaggtggaactaactgctggcccgctacaaaaaattttagaaaggtatttcgaatggaagttttttttactgctgattatcggttaaaaaaattggttaacttgtaacgatggggtgacgtttttcatttcgatagtgggtaccatacagggtttgccattcggattgagcacgatccacctgtgtaaccttggtttacaggactgcattgagtgtttcttagatttagtggtgaacttcctgaaaacgatcatttgttttgtccgatgaagcttacataaaatctaggatgcaataataaacctcgcatttgtgttgtttcccgtgaagccattcgaaacagattatctgtttgtcaagcggtgtgcacatttatggaagtctatggatatatcacggtaatgtcacagcttgttgttgattcacatccttttctgccagtggtattcctatagtattcatttctacaaataaaatggattaaaaataaatttattatgagacgtaagaagtaagtacatgaataattactgaaagcccaaagcgaaagggggcaaataaaaaaggcataatgcgtgcatatgcttttcaaatttcaagtagtttgaggttggcgcatgcacgcacgtcggccgctcgctcgctgcaccctgcgtgccggcccgcgaggcgatcagtcgagtcaggctgcattgctggctgctgcaacttcaacacgacgcgcgcgcgacgggatcggagacggagacggcagaggcaaagaccgccgtgcggcgcggcggcgcgcggcatgcggcgtactccctccgtccaagaaaaagttagaccatagatttccgtgtccaactttaactgtctgtcttatataaactttttttataattcgtatttttattgttgttagatgataaaatatgattaatattttatgcgtaacttgtctttttaaattttttttataaatttttcaaataagacggacggtcaaacgttgggcacggaaatcagggtttgtattttttttaggacggaggaagtagtagccaagatctcgtccgtcgtgtccctctccgcaagggcgacgtccgtagtcgcgcgggcgcgcgcgtagtacgtagagtatcgacgacttgcgcatgcgcgttgtttcggtcgggccaggttcgtgccacctgcaggcttgcagcccacagccacacatggagggaggcaacacgggggcgcgtacgcttgtcgcagataccgcccggtgcgcacgcgcgtgcacgtgcgccggccgttgactagctggaaaaaaaaggttaaaaatatagtagtattatttttcttctatgattttgcgtggatataccggattaacaatgtaattacgcaatccctgaatccctaaaaagaacgatacattttgagagcgtccgattagttagttaaaaaaccacgcgtgcgcggcggagacgaccgaccgatcgatcgatcaacctcagcgactcctgccggccacctagctcgatccgtccggaaagcgaacgcgatcgatcaacgacgaagccgcgcgcggcgcgcagcagctagcggctagctagcgcggcatgcacgcagatgcaggtgcgctgcatctcgcgcggggggggggggggggggg

SEQ ID NO: 8810 - DNA, 76425 bp, Oryza sativa
  unsure (1)..(76425): unsure at all n locations
ggacggggacggggacggggagaggagtcgcggagcgacggacggaccatatgggccggccgctacgcgacggccgacgcggtggggccgcgcgggccgagcccgacatcacttcttttgtaccatttccactgtcccgtgttaaacgtagcagtgggtttcagttatcaacgttggaccgtcggttttgaaacaaaattataaataataattttattgttattacatgataaaacatgaatattactttatacgtgtcttaatttttaaattttttttaaataaaacagatggtcaaatgttggacacggaaacttatggctacacggagggagtactacgtatatccgtcctaaaatatactattagtacgcataccttcgtttcattttaaatgtagttatgggtatccgtgtctaacgtttgacctaaaaatttatgaaaaaattaaaaaaatagtcacacataaaatattatttatgttttgtcatctaataacaataaaaatattgatcataattttttttaaataagatggacggttaaacgttggacataatacaaactacaatttttctaggacgaatgtagaattggttgggacatttttagtattaggaaagtcgtccagaatcgtagcatataggttattactatatgattaacaagtacacatgaaacgagaaaagtttttactatatgattaattacgtattaattattacaattcttgaaaatgagtttattttatgctttagaaaacttgaatatatatattttttaaaaaataatacaccgtttagtactctggaaaacatgttaaaaacgagaaagctgtcgggcaaaaatgctcaaacaaacataccctaaaagagacatatggatgccagagacaaatctatatcctcgttaaattcctgaaaaaaaagtcaagaataatatttataggttctgaaaaacttaaattttgattaacgaagtcatgaacatacacacacacgctactgttatatatgagtatttctgcaagactgaactaacatatcttgagattgacgaagttaccacgaacgtcttgttttcgatggatctatcgcatattactgaaagaataattagccataaatacaagcacccgtatgaatgtggatgaactagtttcaccacaagaaacctaaccagttgagttagggcaagggcaataaaaaagacgactgcttactctaatatttatacacgtcatttggaggtaacttaatagataataaatataatagttgtctcttcacatttactgcagcacacatatcaataattatttaattacttctctctcactccttcccagcttttctctttcctccaagccaatcagggaagattattcatgctaatttcttgttccgtcgatggtgctgtcgataggaaggctccaagccagcgctaggtgcattggcgcccgtgcatgatcgtcgacagattaatcgacgatgtttctctctcttggtactctctctccgccacgtaggtataaaatccaacgtaagcttactattaaccggtaatttcaagttattgtacttgcccttacactcacttcgtgttgggtagtttggtttgattgcaatcggagtgagtgcaacaattcacagcttgctgggtgtaatgtgtgtacggtgtgcaatcaggggggctgtgtggagtagaaccaaagtccaagttgtgttgagagagaactgaatggaacagacaaattaagagatgggggtgcaggatcttctcgccaaactgaacattggatggtccgattttatcacggaatttgtgcaaagctattgccaattacagtgcattattttgtgaagggactgatgaagaaaatgattgtatgttgtctacacgttgaaacatttaaagagtaaaaaaggagagttcggcatgaccgtggacatgattaagaaccacaccctgcaccctgcagagaatgacaagcttgtcaacaccgtatcatgacatgaccagttgcaaaagagaaaatgatttttttttacggttgaaagacaaaatgaaaaccactcaaaacctatacgacaaaaggcattacacacaatttcctttctattgggtgaagaaaattggtataactaaaggaacaatctatatgatgtggtgtaactatagagatatataagtgggccgacccgtgagtctacttatatgtcaaataagaagtaacactcaagtttttacgtcatggtcctagcttattgcacctaaagatgtaggtgggtagatacataaatctatttataggtcaaattacccacaaatggattcgcgggttacccactaattttacatgcggattcgtgggttggtccacttgcaaccatagacgtaactagtggagttgtaagtacatgactccacacacactaattcaagttagaagaatataatgcatatatgattgcactttcaataaaacttagcgagactaaggactagcttttaatacgaatttgttgagataaaggtttaccgatggtgttcgtctcttcgaacgtattgccgtgttggtttttccctgtttgggtatgtgttggtggcatattttacatgtatgtgctaatgtgcatgtagtatgagcacacagtacggtgcgtgcgcgcatgacagccatcgtttcacttatactgattatatacataaaggcttatcagcaaccaacatatactttgttaatagaacttctatatacatatgtatagcaatttaaagcaaatgctggaaataaaatacgataaaagccctaaaatcaactctaaaatcaaaatttaaaactaattttttattcggttcataaccgtcttaggataaacgataggtgtatgtcatgtgtaatcgaaagagaatggtgcaaaggaaatcaatgaaaatgatgatagagttatgggtgttacccatcaccaaagattaagggcccctttgaatcgtaggaatgaaaaaatggaggaataggaaaaagtaacgtaggattctaacaggaatgtaaatgaaaaacagaggattgcagaacgcaggaaaaacacaggaatgaccgtttgattgaaccgcaggaaaaacacatgaatggaatgagagagatagactcaaaggaatgtttccaagtggttggagctcttgctaaatttcctccaaaatctctataggattgcccattccataggaattttaaaggatatgataggattcaattctttatttcaaagggcttcataggaaattttcctatatgtttcaaatcctctaaaaatcttatgtttttacttcaaatcaaaggggccctaaattctgctgtccatgaatacatgttttgaatatgatttcagtagggcatgtgtagtgctttgtgcatgatgaaaaaaaaaaggaaagaagagaaagatagtgatacaaagctttcaccatctggaaaaaagagtggtacagctgggcctggccgcctccccacctcacaagtaattctgccgcggtaaagatctgtttcccccaccgcctgcgtgccgtagcgtgcgttgccgctacgaaagtccccgcgagaatgcaaagatatcgcgaggggagagagagaaagagacgagccagaagcccagaattacggcacgcatcggccgaaactacgggcgccgtcgtcaccggccggcacacaattaaagtcgtcaaaaatatccccgctaactccggtcggtcgaaccggccggccggctggccggcagcgtcgccggcgaccggccgtacgtgtgcagccgttgttgtgtcgcgtcagtctcacgtggtactacctgctcttccttccagtatcttactccgtactcccttaaaaactcaacctgggatattaggacaataaatctgaagactcgtgttgatattcgttgccaaagaatacatcacattctattttagattaagcttttgtgggacggatgaagtatgcgtaaagctgagcaagcaaaacaattgaacagattgctcgacgaggacattcgcgtgatccacggaatcgtgaagagaatgaccgcttatgtctatcacggctggcatgaaccgcgttctaacgtataacaacctactttatttgaaaaaacaaattcaattctgatgatgagtttgaggagttaaaaaagcttgaggctcgcaagcagctcaagcttgacttgtcccagctcgattcgagctcgactcgagctacaaatgagccgaaccagagcctaagcaaaaactcgcgagctttaccgaaccgagctcgaacctctactaagcaaatgtgtatagttcaaaatgtttattcgctttattgatttaataaactaatatatcatatatattagtatctatttacacagcaaattagcatgtgttagcgtaatatatttatcttagtcattttctactcttttattagtgcgatcaaatagaaataattatacttataaaaaatttatcattaatatatatattatattattaatggctgaggtcgagctcgaaccgagcttgcctaaaagctcaaaggtgtaataggcttggctaaagcttgtgtcgagctcggcttgttgacagccctagttgccaccagctgccagagccaaataactcttgttttgcacgtttcgatgtctccttcgtcttcttcggagccgtgctgctcggcgccaacaacgatttcgtcttcacgaattgttaccccgctaggtagggctccctccatggatggaatgaggtgcaccgcaactggccgaggttctaggactagctccgtggtgatggcggtgaccgctcctctctgtcgtcccctcgcctttttctatggctaccaaccgttgatctgccatcatcgccagcgcggcaagctctaggcgagtcagagtcagcgcctccccgtgcagtggctccctctccctgttgttgtcgcctatctccactaccttctcaacatggttccccccgctctccttgctggggctgggacttctccctttcctttgcaggagccgatggagccatcggaaggggaggagggagggatagaagaggggaggagagtgaggggagagaagaggaagaaggtgagatgaagaggaagtcgctgatatgtggatctcacctgttgactcaacgagtcaatcgtgatcaacctatcatgtctgcaaaacccactttctaaaatcatcggatcagtcaatttgtattggatttgaaagacgggagatgtgttatatggatgcaattcaatgaggaggagatcagagagataaaaatagaatggaataagttcatctagggttccttaacttgtcaacaaatccgattttcgtccctcaatcgaaaaactagacacaacgggtccctcaactatcaaaaccggtgcagatgaggtcccttggcggttttgagggtggttttggctgacgtggctaatttgactcgatcttcatcttacatggcactgacatgacgcttaagtggcaatttgatccgaaaaaataataaaaccagtgggaactacatgtcagttccacacacaaaataataaaaaaagagggcccacatatcattctcacccctcttcttcctcttctctccccttctccctctccatctctctcccctatcctctctctaggcgcgacggagaggcagtggcgcacggcggccggcgggagaggagggagcggcacggcggcggaggcatggctccggcggctgtgggcggaagaggaaggggatgtggagcttcttttctctctctcggtctctcccctctccacgccattgatctctccctctcctacttaccgcagccatggcggaggacgccccagcaacgtcgctgccgccgccgccgaggggagccagcacgcgtcggctgtcgcggagggaggctccgccgccgctcccgcggcactagccaccaaggccgcggaggcgctgctcccgtcgctcagcatctggccgctgtcgcagacattgatttgattccaagatttttttttttgagcaagggtcaagacccccatttcttttactagaaatgatcataccagtacaggttcagccaaaagcggcaagcgatttgattcgaagatagtatcagcttagctagcagtggctagctagccatgagtagtagtggcaaggagaagaagcagatggaccggttcatcgtgatccccttctcctccacctgccaaatgctccagcgtggacgtcgttgatgacagcggcaagagcggcaagaagccccaaggttcgtcgtttggagtcttggatgcttgttcttcacttctgctcgatcttgtcgattggtttttgcggggtgatttaggagtttggtgttagtgatgctgtgtgcgtgtctaggcggcggcagtggcgagggcggcggcgcggcggagaacaaacccaagggggagtcgctggtggcgaggcttctccaccactgccagcacatggcgcacatcggctgggacggcagcaccagcaccaccaccagcctccgctcctggaaccacgccgcgccgccgtacgtcgtcgtcctcctcctccaccaccgcgtccacctcgttagccttggcggcgccggcgacatcaagaaggagtcggcaccgacggggcctgggttgtgcagctcctgtcctgccgtctgtcgtagccagggccaactccggccgtcccttcctcttccgcccacagctgccggagccgtgcctccgccgccgcgccgctccctcctctcccgtcggccgccgtgcgccgctgcctctccgtcgcgcctggagaggggataggggagagagatgaagagagggagatagagggagaggaggaagaagagggggtgacaatgacaatgacatgtggggcccaccattttttttattaatttatgtgtgaaactgacatgtggatcccacgggtttattattttctcgggtcgaattgccacgtaagcaccacgtcagatgaagaccgagtcaaattagccacgtaggcatcatgtcagccaaaaccaccctcaaaaccgccgagggacctcatttgcactggttttgatagttgagggatccgttgtgtctggttttccggttgagggacgaaaatcggattcgttgacaagttaagagacctcagacgaacttattccaaatacaattattcgttaaaaatgtcctgggcctatatgggcctagaatatgcttgtgctttgaaaatatgggcctacaatatgcttgtgcattgcaaggcctacagatcgttgccgttaagcccatgagttcaatcggctgaagaaaactcgaatgcaactagaatccttaaatgacccagcatccattttgagcgttgttgctgtaggttttttaaagtaaatttcataaaaccctatatattaatctattattatatggttcaagttacacagaatagaacttttaacatgtgacacatagtcttaggtattatggtttgatgaaatcataatcatgatcattttgactttgatctaccacattcttaagttttacaatcacattttaaacttatattacaaccactttgttaaattttgatataggagtgttaaattttgatataggagtaagccaaaatggttagtggtgtgatttttgttaaactttaggatcataatacccagggttatgaaccacgtgtctaaatccatatggttttgtataacttgaaccacaacagaccataatactccctccgtcccatattataagggattttaagtggatgtgactcattctggtagtgttcagattcgtagtactaggataagtcatatccacctagaatcccttataatatggtgcagatggagtaggtaggattttataaaatttaattattgttttccttgaaaatatgtagccagttgtgatatttcttcatataagcatgtatgagcttatatgggtgggcagaagatctcgagggttgtatttaagatttacactataacatttaaaaataaaggatttattttattgcactgattttgttctagttcaacaatttgccatcggttttatctccctgtataatatgtcattgagtttatcaaatttttttttacaatatgtcactggggtggatactttaaaaaataaatctcaaaatgtccttcaagttacaagaggttataattaattgacctactagaagtttcaagaaaatgaaaatttttacgtaacctccttacataatatagaaatgtgtgtatatttgaaaattttcattttgcatgtattaacttttaaaaagaatatataatttatgttttgtatgctaatacaatactcttatgttaatgttcttttatgtacatcatcattaaatgctatacattatttttctgatgcagctatatgttgtgtatttgattcctcttttatatgctacataaaaatagtttctttaaacgaaacatgaaagaaaattttacacacaaacttctatattttgtaagaaggttaagcacacaaaaactacctttttttgaaaactttttagtggttcaaacaattgtcaattcttgtatgacttgaaggacattttagtcatttcttaaaattatctaccacccaaatgtcatgttgtaaaaaaaaccaacaaagttcatgggatattacatagggagacaaaatcgatgataaatcgttgaagtaggataaattcagtggcttaaaatagattttatcttaaaaatatatattttgtgtcatttataaaaaggatgatgtatttgttgaaaatatcagaaaaaataaaatgaagcatatggaaacgaacccaacagctgttgaataggtgcaaaacctataaccagcgcaattgggcaattagtatatttttacgcttagattttggatagctacttccaaaagaaaatatggacataaaagaatggggcgttaattgattacattttagtcacatcacgctcaaagccccggcccaaacaaagaaattttccgttgattaaacatactgtactctataaaaccggatgttaggcttgattagtccctggccttccatttaatccccaaaaccttcacgtcacccttgcctgtaaaacgcttaatgaatcatatccttttgttaatcaagctgatcgagagatgggacatggaagacatgcacgcatgagctagactcctagagctattaataattttgttttggtttactacctcttgttccatattaattgatgttttaaacaagattaaggtcaaacttttataactttaaccatcaataactttaaaaatatttagtttaaaggaactagaacaacatatatatatatatatatatatatatatatatatatatatatatatatatatatatatatgtcttttaaagcatgcatttatttattatatatattataatagaaaaataatgtcaaagatatatcttgtagaccatatcattgtctaaaacgtcaattaaaatgaaaccgaagggagtaatttgtgctaattcatctcagccacacgtgcattgattgtacaagtcatcacagccgaccatgatgtcatcggatgttcggtagtattccctctctctatagtagtataaccatgttaacacggttatcatgggatataaaaacttgtcaactttttggattatgataaagacaagagatggtaagtgtagtatatgtatagttaatttagtgggaagtcaccttttataattactatattgttatatttgtcataaattttgaatttgaagtagttgttacctccgttagaataattgtatttctaatatttaaattttgtaaaaagaatatttctaatgagacaagacctaacaaattaattttatgaagatatatatgctgtcgcctagcctcccatctctctatccaaatctcctagccctcattttaatcaagttttacatataaaaagtatgcatgcggtgtggatattaaatagggttattatagtcatttgtgtgttgctaatctgtctctaatttttttaaatataattattttgagacgtatgtagtatatatattttaggacgagggaatgcattatttttgactcaagatgatcctttctgagtagggctgtgtttagattcaaactttttttcttcaaactttaaacttttctgtcacattaaatgtttggacacatgcatggagcattaaatgtggacgaaaaaaaacaattgcatagtttgcatgtaaatcgtgagacgaatcttttgagcctaattacgccatgatttgataaagtggtgctaaagtaaacatttgctaatgacaaattaattaggcttaatagattcgtctcacagtttacaggcgaaatctataatttattttgttattagtctagtttaatattttaaatgtgtgtccgtatacttaaaatttttttggcacactgcttgcccgacagcaaggtacctgtcagcttttgcaatggttggttcaggtctctcaggttcagcttttgaattgatagtggcaagaccatgtaagacactgggagttcttcttttttgcactgtagctgtcttgcaattttatcgtttctccactaggcttgtgtgaagagttatcatggtgcttttggagaagtttaaatgtagtcctgtagcatatgcgaaaagctccagtcctttctttaggacgctagcatctctttccgttgcacggcagatgataaatgataagggtgtcatcagcatactgtatggtggcacaggactgctgtggtagattgcttgaattcttcattttgtctcatgagttgttgcagcacattagaaactaaaatgaacaagcagggagagatggagtccttttggcgcaactgaattttttacaatttgatccttttaaaaaacttatttcgcagatagacccctaaaaaaattatcccaaaattaaaaatggcgtggagggggggggggggcagctccagccacattggcgtgctccccctgccaccttagcgccgccctgctacggtggcaggaggacggcgcttctcgttggacgacgacgccagtgcctttggcattccaaaaaggcatttctagaataagttttttcaggagtttatttatgaaataagtttttcaaaaggaacaaattgtgaaaaatccggcttggcgcaggcccttcttgcggttaatccatttttccatgtattccatttaggaggtactgctgattttgatgtctgcagtatgtttgcaatccaagtttgccaaatttgtgggatgccgtgagctttaaggatcaattgaagctgtcccaacatcttttgtcctagcaggtttgtagtagctcagtggcatagatgaagttttcagagatatttcttcctttgataaagcccaattgatcttgatgaatcgggttggaatgatgcttttggaacccctgttagccaaaatgcatgcaatcttgaatctatcagatagctactttcttttctgaaacttaattaccttttcaaatagccaccctgtagtacagaaaattccaatgatagacggaaaacttttaatttcatccattatttccctagctatcaacgtatagacggccgggtaaggtcgttcatgcagtttacaagactcctatacgtagatccaattcgatcttatccatatatttgtgactcagatgaatagtcgtttgtcaatttgaatttatagaaaactttagatacatatcatatcactatcacatatcgaactatttctcagagcacatgctacacacatgcacatttaatggataagatatgttcacttcatactctacaaggtcctttgtttgtgcacattgcagggagatatctctactgtcttaaaagcacaatcatcatcttccctcccatcctaatctcatgtatatagaaaaccgctcactagatgtttggctattccccaacgcccgcgtcgctcgccccagggcgacacgggcggcgacaccgcgcgcgccgccacaaacttctcctcctcccctccgcctcgccgccgcccgagcagccgccggcaaagctgcgcggcggcaaggacggcggcggcgggaccttctccctctctcgagaagcgcggctagggcaccggcgggacctgagcaaagcggacgacggcgacagtgtccggcgccatctgggccggatgtggcggatccggctccgccggaggtggatctggccctatcgcggccagatcaggaggggcgtgccgctcttggcaggaggcggcgtgggaggcggcgaccgcgaccgttggtgggagggacgacggatccggccactctggcggcggatccagtccccctggatggctgcggccggcgggcggaggtggccgacgccgaggaggtttgtggcggaaggcagtggtgacggcgaccgacggagtcgagagggcggtgacagcagtcgacggagacgcgtaggcggcggcagcagctggtcggcgggaccggcgacggcgtgcatggcgcggcgcgcgcgagatccggtggtgctggaggcggggtgggagatggtggcagggcacggtggctgtgctggcggcggggtgggggctggtggcggggctgagtggtggcggcggtggagcctggtggtgatggcggcagcggagcccaagctgcggtgggcagccaacgccgcacgacagctgggcgtctgccttcccccgggcaagatgcggtcccctccaccggatttggggcgagagcatcatgcttcggtggacgttctagtgccgcatcgttttggacggcgggtgcactgtggcggatgggtcaacagcacggtgcggagggtggcatggcgccggcgaagcggtctggtggtccgaggtgacacggacaacggattcgtggcggagccagcggttactctgtcagggggagccacggtcctctcgacgttcaccttcctagacatatgtcctcttgcgacggcgactttgtcggcaaaagttggccacgtcgggcaggctagtgtgggggagagggcatccattcttctctctcaccctctccccatccaacccaactgcgtggatggagccggtgtgtgtcgaggttcgagcttccccatggcgattgactggcggcgtggcgccggtgcggtggccgtgcgtcgaaggttttcgctggtggtggctgcggagcgtgtaggagttcagttcttgggagagacaaattttgggcgaaagctctgccttcgggccggcaacaacgatgcctgtgggtgccgttttttcctcttggggtgttgccgcttttcttgtctctcccaattactttcttcatgtgaaaaccttgtcctggccctctgggacaggcgacagcggcacctttggtgtcgtacccttttcgaaggtgtcgtctcgaagaccttcagtttcgctcgtgcagtgggttttgttgtagatgcgcggtgtggttgtattttctttttctggtctgtggtcttccaggactatagattgtatttttctcctgttttatcaatatatgaaactcgcgctgtcttgtgtggttcgtttaaaaaaaatagaaaaccgctcaaaaaaaatgaagctgctataattaacttgcgatagatttttgttctaaatcattcaatttttgggccgtttgatatgctgagatttgtgtttgacataggaaaaaagtttcacgcattgtgattgctggaatcaaacccttgacccaacaattgcatgcgcacatacttcccactgagctatcttggattttgtaatttatgcttcacctggatcctagttacgtggtccgacagtttcttggagaattttctatcgattgttacagaggtagttccaaaaataatgttgactaaccgataaaaaaaatatgtgagaagaaaaaaaattaaaccacgttgatcagacatcgtcctagtgtgacgcacagtcgatgactaagtacgtactacatctattatgatgccattaattttttgataaccatattcatcttattcaatttttttttaaatatgaaagaattaagtcatgcttaaaaaatatttaacagtaaattaagtcacaataaaataaatggtaattacataattttttttaatataacgaatgattaaacatattttaaaaaatcaacggcatcgtatattaaaaacggagatatcgtataaaaatgtgtttgcctagtcatactcctcgaaagaaattaaagttctgtttcgacatgttcatatcctgaaatccataggattaatccctgccgttcgaattgcacgtcgatctccacaggacagccactcacatactccctctgtcaaaaaaaaaaaaaaacctgggtttgcgtgtccaactttgactgtccgtcttatatgaaatttttataattcgtatttttattattgttagatgataaaatatgattaatattttatgcgtgacttatctttttaatttttttcataattttttcaaataagacggacagttaaacattaagcacggaaaccagagtttgtcttttttttttattttttttggagggagggagtaggcgtgcgcactcgagttgcagagttctctcatcatctgatcccatggaagtgatcactgatcatccactggatggtgtggttgcacatcatgaacagaaacggcgacgtgatcacctgaacagaacggaggtgatggaaaacgacaattcaaggacgctctgttgattttcagctgatttctgcgccaatccgaaatggatcttgagcgctcgaggttatcccacctttacctcttattttctttaatatactttatccgtcccataatatatcaatctaataccgaataaaatcttagtataacgaattttattaacagatctagataggagggtgtccagattcatcgtactattaaatgtcagtattaagttggcactcccttcgtcccatagtataagagatttttgagggataagacactttctagtactataaatatatataaagagcttgtctagatttgtagtaatatgaagtgtcccatccctctaaaatctcttatattttaagatggatggagtatattataggacggaagagtataaaaaaatataacaaacataaaagtatactaagacataaatttatatatgcggaatcggtagccaagtcttaattttgttcaactttagatgacgaaatatctatataattacctgccacgataaaaaaaatggtttctctgtttcctttttgttttttatttttgaaaattgaaaaagaactctacggaagcaaatagtgcgtgtggggccaggctgcaggcagcaagaagtggcgcatgatcgatcagcctgtccaggtgaagccttgtcgtacgtgcgtgtcggtggttggagtttctgcccattatcaggtggtaataatggcgaatttatattagttatatctaactattaactgatatatttcgccagtccctgaatatttgacgcagttggttttttaaaacatatttaaccgttcgtcttatttaaaataattaagtaattattaattctttttctatcatttaatttattgttaaatatacttttatatatacatatagttttacatatttcacaaatgtttttgaataagatgaatggttaaatatattttaaaaaatcaacgacatcaaatgtttagggacggagggagtacttattaatatcatataaattagcttaaattgtataatttactagggatcatatgacgcttgataggattaatattgtaggctagtccatatggaaaataatccgggatcaaaccaacgacttacatggattaattattatctgtcctaacatgactatgaaagcaatgccgtccaggtggtggggccagcctcaacttcaatggttaggttagtgctctccttccacggattgaatgtgaaccattgcactactgctagacatcactatgcaattgtttgctaggataactttaattaccatatttaaagtgtatcggtttagtgtaaaattttaatacctatatatatatttctcgtactttctgaaagattgaaaacttctagtactttatcatgactatgcaagcaatcgcagtacctactacctaaacatctgatcacatgccatctaaggtcttattggttatacatgtattctacctgtaattatccccatttcataaagtctctaagagaaagacaaattaatttgaagactaaagagagagaattttcatgaagagtgtaatcgttaatgagaggaacacgtatactcatagtaaatggaaaattcaagtacgcatataacttaaccacgccttatctctttcttaatttcaactggcatttaataagtgtacagtaaaaatgacctaaattaggaatggcagtgagggaaatttgcaacaattacgtccttgagctgaaaatgctagaccgtttgcaatatctcaatattaaacttagtttgatttttaggcacaatgacggctttactagtatcctttggcttaatatatgtgccaaatttctcattaccaattacttaaacttactttttaggcacaatgacggtttacttctacctttgtcttattgataatatatatgtgccaaaattcccattatcacttgtagagaaaccatctttggtcggtcgacccaaatccacagtagtcccggttccattaaaaaccggaattaaaaataatttttagtcccggtttataagaggaagatctttagtcccggttgttgttaccaaccgggactaaaaatcatctttagtcctgattggtaactccaaccgggactaaagttcatctttagtcccggttgattccatgtcagaccgtatcagggctcgaggatctttagtcccggttataacactacaccatgacactagattaccaacagacatctgtcggtaaagataaacaattattgatagactatttgttggtaaaggcttttggtaaattatatgtcagcaatactatgtaataagacatgttatatgttagcaattccaaatatttattgggtcaaaataactgtcagcaatattattaagagtggaaaccaattatatgtcaggaaaacttaatgataacctatctgtcagcaatgtttcgtccgttggatgttgatcccacggttaggatagagcgaggtgatcggtgcgcagtaaaataaaaaaagaagcgcaaaaaaatccgcgcaaaaaaaaaaaccacgccgaaaagaaaatccaccccaaaaaggaaaaccctaggctcgcaccgcgcgccgccatttctcccccttccaccgcgcaccgcctcctccgccaaatccaccgccgcggcgcgcggcctcctcctccgccgcggcgtgccgccacctcgctcctctctccccatccaccgcgctgccggagtcgacctcgcgcccgcccaggtttgtacgggctagggtttggggggcgcccgtccagatctgggggattgacttgggtgttggggttggtgttggttgcaggtggtggtgtgtgccgggtagaggaggaggaggaagcgagggcgtcggacttgtgcgtgcgcaggtccaggggcaggacgacattcgacgcggtcgccgacgaggtctcctagttcactctgcttgttgttgctgaatgggtagtgattatcaatactgatggactgcatttctcttgcagtttttccccttttgcctttgatttcttcggccctttcctttcaagttttgatacaaagaattcagaaactcatactatatgatgggtagtttcctctgtttagtcctgtatcttggaactcatactttatgatcaaagaattcagaaaaggatcatgtaactatccagtctagtatggactgtagttgtttctaactgctttccatagaaacttttgcaccctttgtggtataaagaattagaacaaatcataagattcttaagctgctaaggttaagtatcatgaccttcactagtaaatcataagattcctcctagttcactctgcttgatgttcaacagacctcatgatgcatgtgccccggaaatatattgctctcatatttgtaggattagatattcagtaaagttccagagtttcgctctgttttttatagtacaatgggtgcttttttgtctaaactgtgtgctggtaaatataaacgataaaaccatccagaactgagaaaacctagcagccgctggtgttgtgtttaattacatattgcagatgtatacacctctgcatttctaagtttgtattcctgcagttataaactcataatccgcttatactctgcaaacacatatatgaggtaagttcagtctggctgcagttaattaagattaaggttgaaaatacggtgaactcattttggtattgatctgtgaccatgagttcatgttgaatcctatatatgcttaatttagcacatctgttgttgtctgcatagtggtcttcatggcatatgctaattctggaagtgccaccgataaggtgtggccttgctctgttcatttgtcgaaattaagaactttgattctaaatgcatgctatttgttagaggctgtgtgtggctacaagtttctatatgtcctttgggcctaacagaggcattaatatctgttttgctttttggatcacttctcattccctgaattttgtcttctgacttttcagaagcctgagttctgaaaagggcatactagaaaacatctgttgctgctctttctgctagatggagtacataattttttttatgttatgttagcttgaatattgacctggcctcaagttgctatgttagctctgaattttcctagcttaacactgctaagtcacaagtgcggcattacaaacatttcagtaactgatatttataggattagatgttcaattaagtttcaggattttgctttgtttttaatgaagcatgatctgattttttttaccaattcatataattagatggctgagatttgttgtttcatgtaatgcatgcaaaatgtttgacttagaatttttcttgtagacaactcagggacagatggagtagtagttggaggtccaatattatagcctaggacacgaacaaatgcagaaaatggaggtgttgatgctaatgatcctcgaaatatgcccttagctggtgaaggtatttcattcgacatttgcatgtatcgttaataagattaaggtatatgaatatatcaagttcttatcatctcttttcatatgtaagcagaaaatgttccaggtgttaataatgtacagctacaaaagaaggtacacaagaagacagcaaagactaaccagcgagcaggtacttaatttgtacatgatgcaacatgtttttgtgtatatattgcctctctgacttaatttgccatgccttgcatctatatccatcatcatgatatatacccaatagttagtgtgcactttataagctgaacaattggtattgttttgttagaaaggataaccaatgcttgtagcctaaaacatctttcagatttactaactccgaaggcagtatctctactagttgcaaatcagatccttaatgcatttgtgcttttttacaacatagaagttctattgtttcctttctcatatatgtactgattactgactcatcaatagggtctttgaaggtgctctcttggtagttttacaggctacaattttctttctgacagggtctttgaattagccatttgctcttcactaaatttatctgttatgctattctaattgccatggactatatatattcttctgtggttctctgtacactagatatgtttactctgtacactactgatgattattcatttcatttactctgtccattattttgcaggcaaccataaaaagggctagcagaggtgctgtaaaaaaaatcaagaacctacaagaaccataaaagagatgatttgttttgtttttgggacctcaatacacctacaagaaccttagttacatctaaattatgtaattattgctatgtacttgaactcttatgtaatagctatttgagctgatggataactgctatataggaatactgctacttgatgggtgaacaatagttacatgatgatatgtcagaatgcatttgtgaacaatagttatgaatagttgaatattgtgttatgcatgtgtgtaacttactgaaaggtgataatccgtgttgcaaaatttggagtgatattcatccatatatatgctgcaaatttaatttgaggtatggttcataaaatggatgattggtaattagtatattttttgtgtggattactgactgattgcttgttagttcttgtgcttgccatcaatacattaattgtcggtaaatctataacacagtgacatgctatctgttgggaatcttcttaagtgtcggtaaaagtctgtctgttggtaaaactatctgtcggtaaatatgtagcaacactatcggtctatctgtcggcacagatttatctgtcgggaaagacttttgccggcagcacttggcctgacagaccttatctgtcgggaaacgttttgctgacaaataatttggcagcatatagggcctttcctgacagatatgtagtaagcaaacttggggcatggtgtagtgttagtaacaccaaccgggactaaaaacctatttttagttccggttgatgttactaaccgggaaaaaaaaaattaaaaacacactatataatccctattaccgatcctcttttcccgtccacacaacaaactcatccctctatctctttctccctctccaacttcttatctcttccttatctctaactcctaccttctctttcctttttttttccttccattcgtcacagcgaagcagacggcggccgacgaggcggcgcgggggtccgcgcggaggcggccagcgcggaggctcggggggccgcgcggaggcggcctgcgcggcggcgcgggggatcgcccggtggcaggcgaagggccgctcggcggcggccggcgcggcggcacgggggcccgtgcggctgcggcgaccggccggcgcggagggaaggaggggaggcggcagtggccggccggccggcttttcttttttttcttttttttacaatttatgatttatcctgtgatgtatttgatttgtgtgtgatgggaatctgtgatgtattttttagaatttgtgatgtaattttttacaaggaagatgttaaaataaaactatctacatcctaaaaatataacaatttgtatcaaatagaaaacattctagtgctacaaatttatccagattcataatactagtatatatgttctatctgatattatgttgatgtattataagacaggggaagtacacaccatccattttcacagggaaaatgagaagggagagaaacttaggagaagaagagaatactaatagtttgatggctaaaataaaaaaaagatgaaatggtattaagagatctagtaggcgctataacctaaaaagatactcccttcgtaaaaaaaaaaatccaacttaggagttggatgtgacacaatatagtacaacgaatctagattgtgtcccatctaactcttaagttggtttttttgatagagggagtagacatctaaaagctaaaaatttaaaaaaaatgacgggggagtaatgaactaatgcatgtatcacttgtgtacttgtgtgaagttacgacaaccaaattagggtgacgtgtcaatgataagaacaatgcattatcttcatcagtcacctttcctagacgtgccaatttttctaatgttatgtgtacatagacctaattaaatacttatttatttaagttgctaaatttgtggacttttaattggcattgatttgtcgatcgtgtcactagcttccatgtacgattgaaggcttattaaaagtcacgtcaaattatatgaaaattgttgaataggaggagatggcgaaggcggcgaacacgatcgcggcgaggaaggccgagaaaggaatcgaaggtacgcataccttcttttctccatctactcttcttcttctcgcgaagagtgaagttctgataatatgttgaatagggaattgagattgtgggagcgagagaatagttgtgtactttattaatcaatgcgattatacaggaatgggtggccaccatagacgtgatggttgggaaccatcgtgcccgttgtcaaggagcgccgagaaggcgaggggtacgacacaactgttgtgcgcaaccttcggttaccgatcccatcttttatatagatgtgatcatctatttatttcataacaataataagcggtgaagctaattactaagaaactgtctggttggccattaccgtattttataacaatctgtgattagatattttgacatgcgtgtttgcgttgttgccacaaacatgacaatattacgtttctgtaatataggtcccatatatatgttagtgacttataaaatgtggcatatatcttttattttactggctcaagtgtgatcaggattttgattgcctcacttttgacaagctcgaaaaaaagtatgacaaacctacgaaaccttagttatgaattatacaacccttaaaaccttaaaaccggtaactactagctccgtttaattttttaagatgttttgatttctttccgtatacaaaattaagtttacaataacatagtaacattttttctaaaaaaatcaaaattattcgatgttagattaaaaataatcgcaatatcttataatataaaatgaagcgagtactactcatatgaaattttatgttttctaattaaaaatatgattgatctatgttttctaataaaattaattataataacaattactccatccatcccaaaaaaaaaaacaaaccctggattttcgtaccaacatttgactgtccgtcttatatgaaagttttttataattagtatttttattgttgttagatgataaaacatgattaatactttatgcgtgacttacctttttatttttttttatatttttttcaaataagacgaacggtcaaacgtggtacacggaaaccagggtttgtcttttttagacggagggagtagattgtaaaaacaaaccctgagatgaactcggttaattaacaaatatggaaccagaatccttctaagcttaaggctcaataaatataatttacataattttatttttatcttctaatttgtaaaattttatagtacaattttaatagatatcttaggtcaggagaggggctccagcttcttgtatccacgcgccccgaacagatcgatcaatttagcagctgacagaacaactctcgatttgtcaggcaagtgtttggatcaataaaaacgttagccactgacttcacacgctaaatcaggagaaagcgtgcacgacagcacgagagatatagctagaattcattttaattatattaatacatacttcctctgttttataatataaaactttttagcattacctaaatacatataatgaatttaaacacatacatatgtctagattcattatcatttaaataaatgtgtgcaatgctaaaaagtcttacattgtgaaacggaggaagtaatatactaggtatactcacgcaaacgcacgcgattaacctagctagctagcactgacaattaataaaacagttagagcaagttggcacaggcactactgtttaattgtattttatacggctaaattagttggacgaggtgtattgcgtgagtgatatctgcttccagcttcccagcaattcgccagcacgtacgtttttatataagccatggctttagaaaagattatctatatgtgcgcatctacaattattaaattaagcacattcaatttagttagagcgaaaaaattcagtggtcctgtaggcatatgctaaaatgttggaatttttttttcatatcatgatttacgcatattagatatccatccgcagaatagacgtacacgtaactgaataaataaaacttacattatatatatatacctaaaattgtttttaagtgtttttggtaaatatacatttaagttaattttattgaactagacatatgatgggatcgatctaacttcgattttaatctattcactgtggtactgcctgcatggtactgcctgcattccatattactactccataagccttttttaagtttatcccaagtcaaactttttctctaaggtataaccaagtttttttaaaaaaaaggaatatttttaatataaaataaatatactataaagacgtatttaataaaacttattaatttgatcttatagacgttactacgccttttataaaactcattctaaacgtgaagaagtttaatttaggacatacctaaaacaatttttatgatacggaatggaacaatttttagctgcactgtaggtgctctctccagtcaaagacaacagtgtttcagttgacacttgatcactggtggagaaaccatatttcgtcggtcgggctaattccacaatagtcccggttgcaacaaaaaccgggactaaagatgatctttagtcctgattaaaaagggtaacgggcatatttgatctttagtcccggttcaaatgctgtcagggcctgtcaggcccccccgggatctttagtcccgatcgtaactttagtcccggttggtaataccaaccgggactaaagatctcggcgatctttagccccggttcataacaccaaccgggcctaaagtcccacccctatatatatatatgtcttcttcctcctccagcccgagcaagcttcaaaatttctttaaaaaagaggggaggtcatgccaaaatttctagtgaatttattttggtgattatatacaaatcggaggtgcctaaaaggttagcaacttcatactaaaatgttttttttttcatattacatttggagctatgttttgcacacttttttgtctccaaaattttgttgttagttgataagagagaaaatttgtgtggagaagaaagaatatatagaaatttagtttatttgctaaagaatgttttataaaatagttgagaaggaaaatatagtgaaagttaatattgaatgatagaaaacaaagtaaaatgaaaaattaaaataagtacaacacattaatattagtttaaaactttataaatagtaaatatataattattcggtgtaatatttcataatatttgtatgaataatgatatgtcattattgtgtgagtgttgaaagagtttgtaattattttataattattgtatgactgtcattattgtacgaataattatgtgtgtatgattttttttcatatcatgtagatggatcggcaatggatgtacgctgaccggcggtccaaagagtttattgacggcgtgcattattttttgagagtggccgaagctaacaggcaaaagggttttacttgtttttcatgcaataagtgtaagaatcagaaggagtattctgcatccaggactattcatttccacttgtttgagtcggggttcatgccaaactataattgttggacatcccacggagagcaaggcgttgaaatggaagaagatgaagtggaagacgacaatattccggactttgctcagtacgctggatttgaaggaaatcaaacgggcgaggaggaaagggatgctgatggtaacaatgttgcggatgatcttggtcagatgttgcaggacgccaaggaggattgcgaaagtgaaaagggggcccataaattggacaagatgttagaggaccacataacatcgttgtacccaggttgcgagcaggggcacaaaaagttggataccactctggagttcttgcaatggaaagcaaaaaatggtgttagtgacaaggcatttggtaatttattgaaactcgtcaagaacattcttccggagggaaacaagttgcccaagacaacgtacgaggctaagaagatagtctgtcctctagcactggaagttcagaagattcacgcatgtccaaatgattgtatcctatatcgtggtgaggagtacgagaacctagaagcatgccctgtttgcaaagcactacgatacaagattagacgagatgatccaggagaagttgacgggcagctaacgaagaagagaattcctgctaaggtgatgtggtatttccctataataccaaggctaaggcgtttgttcaggaacaaggggaatgctagaatgatgcgatggcacgctgaagagcgtcaacaggacgggatgctgagacaccccgccgatggttcgcagtggtgaaacatcgacagaaaatttaaagactttggaaaggacgcacgaaacatacggtttggtttaagtacggatggcatgaatccttttggagagatgagcagcggccatagcacttggcccgttacgatgtgtatctacaacctccccccgtggctatgcatgaagaggaagtacataataatgccgcttataattcaaggcccaaagcaacctggtaacgacatcgatgtgtacctaagaccactggtcgaagatcttaaactgttgtggaagaaggaaggtgtccctgtgtgggatgaggacaaacaggaggagtttaacctacgagcgctgctgttcataaccatcaacgattggcctgcacttagcaacctatccgggcagtccaacaaggggtacaaagcttgcactcactgtatggatgaaacagaaagtacgtatcttaagcactgtaggaaggttgtgtacatgggttatcgtcgattccttgcagcaaaccacccggtacggaagaaaggcaagcactttgaacataaggaggaccactgtacaaagcctaaacatcgcagcgggaaaacagtgtttgctatggttaaagatcttaaagtagtgtttggaaaggggcctggtagccagcctatagagagcgaagatggtcacgcggcgatgtggaaaaagaactctatattttgggagttaccctattgggaattcttggacgtccgccacgcaatcgacgtgattcacctcactaagaatcttgcgtaaaccttcttagcttcctaggtgtatatggaaagtcgaaagatacactggaagcacgtaatgatctgaagcatatggaacaacgcggtgaccttcacccggaaccaaaggagaaaggaagccattacttgagtccagccagctacactcttagcaaggcagagaagaaaagtatgtttgaatgcttggagagcatcaaggtaccgtctggatactccacgaatataaagcgaataataagcacgaaggagaagaagttcacaaatctaaagtctcatgactgtcacgtgttgatgacacagctgctaccagttgtaataaggggtatcctcccagacaatgtccgggcaacaataacaaagctatgtgctttcatgaacgcaatttcgcagaaggtcatcgatcctgatagattaaaagccctgcagaatgatgtggtgcaatgtcttgtcagctttgagttgatatttccaccttcatttttcaatataatgacgcatctgctttgtcaccttgtcaaagagatcggtattctcggtcctttgtacctacacaacatgtttcctttcgagaggtacatgggcgttctgaagaagtatgttcgtaaccgtgctagtccagaggcaagcatcgctaaggggtatggaacagaggaggtcattgaattctgcgtagaatttattgaagaccttcgcccaatcggggtacctgaatcacgccatgaagggagactacggggaaaggggactctcggaaggaaagcaataatgacggtagacaacaatttattccgtaaagcccatttcacggttctgcaacaatcttcattggtggctccttacatcgaggagcacttggctctagttcgcgcaagaaacatcggtaagtctgatgcatggattactaggcatcacattgatactttctccacgtggctgcgacaacatctcatgggtaacgagacgattaaccaacaactggccttcctggcgaggagaccatctggctcgatcgcgacattccagggatatgaaatcaatgggtacacattctacacgagggcccaagacatgaagagcacgaaccagaacagtgctgttcgtatcgatgccatgggacacgatggtacaactggcacgtattacagtgccatcgaggatatatgggaacttgactatggacctctcaaggtccctctgttccggtgccaatgggttaggttggctggtggaggcgtaacgattgatgacggtgggatgacaacagttgaccttaacaaggttggatactcggacgaaccttttgtccttgccaatgatgtaacccaagttttttacgtcaaggacatgtctagcaaaggaaaaaagggcaaagggcctgacgagccgaagcgccacgtggttctcccaggaaaaagaaaaatcgtcggagtagaggacaagactgacgaggattacgatcagtttgatgggtaaccccctttcacggtgacgattgaccctagcatcctcctatcaaatgaagacaccccttactcatgtagcgatcacaaggaaggaacaatagtgaggagaaagtacgtgcggtcaaccgtcaccgccgatgtattgcagtaattgttctatacacgatgtaaactatgttggatgtactgaatatccatacaaatcaattgttgtatagcatatgttaaatatgtatgattattagaatttttatcaaattgaaatcatccatatgctagttatatatgattattagattttttgttaattatgtatgattattagaattttaatcaaattgaaatcatccatatgctagttatatatgattattagaatttttaaaggttttaaatcatgcacgtggtatttacatatgttaattataattttcaacaatttaatatcatgatatgctagttatatatgattattagattttttattaaaatcatgcatgtggtatttacatatgttaattagaattttcaacaatttaatatcatgatatgctaattatatatgattattagattttttttattaattttaaatcatgcatgtgctatttacatatgttaattagaatttttaacaatttaatatcatgatatgctaattatatatgatattagattttgtattaattttaaatcatgcatgtgctatttacatatgttaattagaatttttaacaatttaatatcatgcatatgctaattatatataattattagaatttttaataattttaaatcattcatgtgcttattatatccacgtattctactacatacaacaataatttttcgaaggttttatcattaattgttcgactttaaataattgtaatgcattatttactattttagaaacacatatgcaatgaaattcaagacacagctgctattatctttagtcccggttcctaactctaaccgggtttaaaaagaatttagaaatagcgagaaaagatctttagtcccggttggtgagaacaaccgggactaaagaatatctttactcccggttggtaacaacaaccgggactaaagatccgggggtatatatattcccggtgcgccctcgtcttctccaccaacacttagacattgttcgatctcggcttctcattcgccgccaccgtgcctagggcaaccccgcgccgacaccgccgtcgtctctcgccgtcgcttggcggtcctcgccgcctccgccgcagacgccgccgccgcatctcttgggtgagagccgtcgccgcctctctctctctatctcgatctcgatctctctctctctctccacggccgacgaccggcttcgacgcggcggccgctgccgacaacgccatcgccactgccacgaacgccgcccccgcctcgagctcgccacgccgccgcgccacgccgccgggccactacgccacgccgccgcgacgccacgccgtcgccactgcgactccgccgccaccgcctcgagctcgctatgccacgccgccgccgccgcgcgccgccgccgcgccccacgccgccgggccccgacgccgccgccgcgcccgcacgccgccgggccccacgccgccgcgcccccacaccgccgcgccagcacgccgccgggccggcccacggcgccccgacgccgccgccacaccgccacgccactgccgcgcgcgcccaacattgccgaacgtgattgaaacgtgaccgaacgtgaacgaacgtgacacgatacgtggacgacctttgaacgaacgctgaacgaacgtgaacgaaacgttaacgaacgcgaacgaacgtaacgaaacgttaacgaacgcgaatgaacgtggacgaaacgttaacgaacgcgaacgaacgtgaacgaaatgttaacgaacgcgaacgagcgtgaacgaaacgcttacgaacgtgaatgaaacgcttacgaatgcgaacgagagcgtgaacgaaatgattacgaaacgtgaacgaacgtgcacgaaacgcttacgaacgtgaatgcacttgtactaaaagtgtgagaatgaacgcgtttatactaatacgatttactggtaatacatatatgattatatatgtaacttggcccgtttagactaatacattttcctggtaatgttgcagagaagacgtcgtcgtcgtccctcaagccgaagtggtagctagccatcgaaggaattcgcgcaggcaagtgatgtaaagaagtgattgttagatatttaatattagattgttagacttagcatatatgattattacaattttaatataagattgttatcgatttaatataagattagtagcgatttaatataagattgttatacttagcatatatgactattacaattttaatataagattattagagattaaatataagattgttagatatttaatataagattgttagacttagcatatatatgtatgattattacaattttaatatgagattagtagccatttaatataagattattagacttagcatatatgactattacaattttaatataagattattagagattaaatataagattgttagagatttaatataagattgttagatttagcatatatatatatatgattattacaattttaatatgagattagtagccatttaatataagattattagacttagcatatatatatatatatatatatatatatatatatatatatatatatatatatatgattattacaattttaatataagattagtagcgatttaatataagattgttatacttagcatacatatattattattacaattttaatataagattattatagattaaatataagtttgttagagatttaatataagattgttagacttagcatatatatatgattattacaattttaatatgagattagtagccatttaatataagattattagagatttaatataagattagcagagttttaatattacggtacgcaaatacatcctatatacctaacaaatattttttgtatgcacagatggctgatcgcgatgaggaacagatactatacgatacaatcgtagagggaagcagccagtactggaacgaaggagaggggaacgaggatccaaaccagtacttgaacgaggaggggaacgtggagagggatgcggaggggaacgaggaggggaacgatgaggaggaggctagtggaagtcatccctctgctggacagaagagggcacgcggacaacgaggtgccgcgaagaagatagagggtcagcacatcataactgaggtggacaaagacggccgacctagtgccccgacagaagcagctaagaattttgtacgccacagcggttgggttgtgagggacaacgtgcctgtcagcatggtgtactggcgcagaacaagggcacgcggggataatgacagctttgtctaggactcagagaaagagatgttgtgaaccacaatgctcgagacgttcacgctacccgcaggtacggagaacataatgaaacagtggactctgaagaaaatggcaaaacagttccagagcttcaagggagatctctacaagaaatacatcctgaagggattaacaccgagcttcgacgtattcccaaagctaagggatcattgggacgagttcgttgcttacaagacagggcaacaagggcaagtgatgatggccagaaacaaagaaaatgccgccaagaagaagtaccatcaccacttggggtcaggcggatatagcgtcgcgatgccgaagtgggaggagatggaggctagcttgcttgagaggggtatcgaaccggccaccgctaattggctggaacgatcgaagttctggtactatgctcacggtggaacgcttaacccagttgatggctcccttgtcttcagcgatcagatacgcgaggctgccagtcgactaacggacgcagtggtagcctcttctcagggaacattccgacccgacagagagagattccgacccgacagagagaaggatgagctgtcactcgccctatagactcccgagcatccaagacgaacacgagggaaaggcgtgattccctggaagattggatttaaggaggacatccacacatacaggagtcggatgaggagcaagagagataccgaggcgaagattgcagatcttgagtacagggtatcgagctacgagctcagcatgcaagaggaggtggcaaggaaggtggatgaacgtatggccgcacatcggtcctaggatccccagccgtacattctgtaacaccctgaaaattcgaccaacaaaaatcaaaattccaaaaatataggccttcaaaaaactttttaaataaattgcatcatgccgattttattcgattattttattggattttgatttcggagtttataaatcgcgaataatggataattagttaggaataaaccctaaaaagtaaattgacaaagtaaataattaaagtgcaatttaaaataagatttggtgaggatagaaatgtgtaaaatattattacgaccatatttatatccatcaaatttaaaaaaaaaagcaatgggatgagaattaactctaattaaattcaagtaaattacaataaaaatatataaaacatggaataaattaatctagaatgaatccatggattggaatggcacaaaaattgagtatacttcatttatgcaaaatttgggaattaaagaatcaaatttaaataataaatgggccaaaatcgggttaattagaaaacggcactgttcattgcacctaaagtgttcgacgaggtcccctagccctaaccctgccccgctgccgcgccgatgccgccccaagccccgtgccgcccctgctgtgccgcgccaacgtcgtcgcgccatcgccatcgccgcccgtccatcgcgtcgccgctgtcgcgccgcgcgccgtcgccatcgctgcgggtcgccgtcgtcccgcgcctcgtgccgcccgccgtcgcatcgccgctgccgcccgtcgcgtcatcccgagccccgtgccgccgcctcgcgccccgcgcccgtgccgtcgcgcgtcgctcgccgccgtcccgtcgcgccgtcccatcgccgctactgccgcccgccgtcgcgtcgccgctgccgagccgtcgccgtcgctgttccgcgccccgcgccgcgccgcgcgccgtcgccaccgcagtcacatcgcgcgtcgcctcgcgccgcacgcccccacctcgcgccccgcgtcgccttcgcgtctcccctctcccctctcccccttatctcttcccctcccctatataagccccactattcccactctttccctccatccttacctcctctcatctacccactccaccacgccgccgcctccacgccgccgcgccgtcgcatagagccgccgcgccgccgccacgaagccgccgcgccgcgccgcgccttgcgccgccgtcgctgccgtcgccgtcgccgccatcggtaagccgcccccccccctgcgtccatcgtcgtcgccgcccgggagggcaagaagccgagagagagagggagaaaggagccgggagggagagaagagagggaaaaagaaagagaggagaggaaaaagggagagagagagaaaaagaaaggaaaagggaaaagagaaaagaaaagaaaagaaagagggagagaaaggaaaggaaaaatttagggggaaatttaaaatatttaaaaatattagaatttaatcataggcttaatgaaaatatagctagataaattcttgctatttaaatacctaaaatactagcatttaattataggatcaattatttaagaactaaacaattagatgaattcttatagattattatagattatttttagtaaactctataagagattaattcgcggtagtgatctagatgtaattaaggactagataattagataaagtcttaggacatgactttaaatcacaaaatttcttaagaaacacaaatattttaggtagaagaataattccacttcgcgaataaagtagcctatatagaattcacctcccgcgctcgtttctcaattcggtcattatttggattttgtttgaattctaatcgaattcaaattgttcttacgcacgtaactatagagaccgagggagccgcggatccggatgaagaccaagacccacaagacctagagcaaggcaagtcatcactattccttgaacatgttgatcccaattgcaaaattgttttgtttacaaataaaattgcatgcaatgatgaacatcctacttgtgattatgccatgccttgattattgtttacccttaaatccttgtaaccatgatttacgtaaaagtccctagtcaactatgataaatgcttagaaatgctactctagatttatgcatactcatatttatcaaatgctatatgcttgggcaattatctttgggaaggtaattgagatgcggcatgtggagacatgagcgccacattgccatgatattgatgacatgatttgtgaaaggaaaatgaaactaaacaaatgatttcgactggggcggatggaggatttgggtggtatccggaaaaaggctagtgccatccctggtcaattaaggaccgagccatgaagttaagcatgaaacgaccctcgtacaaccgcacttctcgtatgggtatagacctagcggaatagatagctgagcggaggcattatccatgcatagtggtttcttgatgtgtgaggcaggggctctacggtggggcagccattggtagaaccgcgaggcgggtgtctacagtggtgtcgccatcggtaggactgccatgagagaatttaaacataattataacttaatgtatgtgtgagtctttctttcccgggtgcgccagaactcctctcactgctagaaaccgtgtacgcctagagtgcaagaggatgtaaagttcatggagcgggtactgccaatgcgaggttatcaaaaagctttgtcgtgatgcgtctcatgtgttgggacgaggctcatgtgttgggcagtcacggagtgcgggtaaagtgtacatccactgcaatgtgagtaaaccaaatctattcgaatagccgtgctcgcggttattgagcaccgggacatgtattacacttggctagtctctaagttattaacttgtgtgggatgggtagttgcatgatgaatttatatgctgttggagccacttcctgagaagggggaaagtgggcgtcctcagaaaaccataacgattcaatggcgggaagctatccttgggatcacaatggatggtggacagaaccgtcattgtttgaatacaaacactggtactaaaatttgatcagtcaatgctaggtctgaggcttgtgaaaagaattacaaaactggctttacgcaaaagagccatagccatcctttgaaatacccctttcatatgcattgttgctgtggtggcttgctgagtacggttggtactcacccttgcaattataaaattaatcagaagcgggaaatgaagcttcggaggatccctatgcctactaccaggagggagatgaagacgatggcgctcagtaggtcttagtacggtcgttgcctgtggcaatggcatgccgctgcctaaattctgctgccttatctatttctgcttttggatgtattccggaccgctcggtccgatgatttaagacaatgtctaaggtcttatggtgtaataattagcactagactctcgtgtatgtgcatttggtatttcagttatgaactcgtgtgtaccagactacttgatccagggaaatggtactgtttacatgaatgattcctgttataaaaacgggggtctacacattcatcctgcaatggtcagcccatcaggcaatcatagcagctgcgcctcaatggggcaggtcggatcacagagcatggacgccatgcaaacccagggcgaaaccacctgccccgttgatgagatcacgcagcggacaccatgtgagctgcatattcccttcaagaacttatcaatcaaggtatgctcgtagtttgatgatttttgacttgtacattccgcaagttgctgcttaggttgattactaatagataacctctcatcacgtgaaggtggcgtcgggaatggccatcccaacggacccttccgggacttaccactgcaggccgattccagcaggatactcgagggtcgaagttgagctggtggaagccgcgtacgaggacctcgagttgaactacccaggaggagacggtgagacgcatctacgagacacaagccacgccatcatactatggcgcaagcggtacatcatccttcctgggtgacaagcggcgtctcgtgcaccatctcctccggctccgccatctcctcctgcaccatctcttccggttcctccgccacgtcctcctgaaccatctcatccggctcctccgccacctcctgctgcaccatttcctccgactcctccgcctcctccgcctccaccatgtcggcttgcacctcccaagacaaggtctcgccaagctccaccgcctgcccacacaagggcaacgaagaaggcgaaagttgacgccaccaaaaacaaggagccaccgtacgattgcagtcaagaggagcttgatgcttatgtggcaggagaggtgaagaggcaactcaagcctcggagtcctgaaaagaagatacctattgacccgagcgtgaagaacttcttcaagggaatgtccacaacaaacaaggaggcgttacagatatcggactatgaccgaacacttcagagagcctatcacaagaagtccaaaccagtccctcagcttggagaacaaccaaaccaagaggtcgagccattggtgaccggtgaagattttggcataacagaattcattgcagacaccggtctaactgtggatcagttggttcgaggcgcaccaatcccgaaggcggaagtggcatacaagtttgaactcggtaaaccgcttgtcaaacctgaacagctgcagtccctaccgacacagatgtacaaattccatgaacggtacatggaaatgagcgccaagggtagagagatgttcggagcgaggatcagaaaccccgacttcttgcaaggagaagatgttctctggatccatttcaaggatctcttcgatctgtaccagttggacgccctcgacgtctctcttctgagcgcatggattttgtgagtatctttgagttcgatttgtttcgttcaataattagctcctggcatatatgtaagcaataatactttcctttcatcgttgtagaatggagattcgaagggcccgacggcggagggtctacgatactgggttcatcgaccctcggaaaatcaacaccgaaatgatcgacaagtacgagaaagacacagaggacaatctcgtccatctcctaacgcagcagcatttcaagacgtacatactactgccgtacaacagagagtgagtttttattgtcgttcgaacaaatttcgttcccatacatatagcatgtacattttcgatcatatatatatatctcatctcacgcatattccagattccactgggtcctgttattcttcgacttggacgcatgcagagtcactgtgtacgactcaatgaataaagaggagaagatttttgacaaggtcttcaaactaatagacaggtaatataatgccatctattccaaagtcgcggggaatctattgctattatgttgatctcaggtaataattaatcatagcttgcaactgcatatgtagggcttgggatcggttccgttaattggtccgcgggacttggaaataaaaacttggacggaggtttcattttccagtgaatacatgcatgatccaaaattatattgaattaatctctaattacagttaatataaagagtatattaaatctctcatcgtttctcatgtagtgtgtaaagcaggaccagggaactaacttatgcggctactacgtatgcgagtatgcccactgcttatcaaaccaaatatgcacaacacgagagcttgatgtacgtatacataaaccattcaaaagttcattgcgtatcgatttgttaagttgtttattaatttcatgtattgatacgtcattatttttcgaatgatagcgtattcacatgagggataatcttccacacaaggattttatcacggctgttcaagaacagccgatgggattcttcaacgaagaagtccttaatcccgacggtgaattctactacgacgaatcgacaattcataacgtcggtccttcctcttctgacatagcgccggcgtcgaagtcgtagctatatatagctaccgagcaaaagaattgtactatatacgcatgtatatatatttatatatgtacacatttacttttgtgttaatatatattttggtaacatatatatatgcacataaaatgttaagtgctttaaattatacatatgtgtatgtaatatatgatttacacacacacacacacatatatatatatatatatatgtatatatatatatatatatgtatatatatatatatatatatatatatatgtatatatatatatataaccaaccatgcagcaaacagggccatgcaaaaaaaaaatggtgcaccgatctttagtcccggttggtaatataaaccgggactaaagatggatctttagtcccagttatttcacccgggactaaagatagctatctttagtcctaaattcgtagtcctggttggataaccgggactaaagggggttaccaaccgggactacagacggtttctccaccagtggatcgtcgtccttgaggccctggcgatcgtcgtccttggcgcaactcaagtcaaagacttcgcccctaatcaattaatcattgcactagaaaagagataagggacgaaattgaggactggtaaaggatttttggaggacactcagtttctttttgatttttttaggtcctttgattcatagaaaaagataaaagtttttgtataggattatattcctatggtcaattttataggaaaaataagtaagagattagatctcttcaaaactttcatttggttcatttttttcctttcgtgcagtcaaaggacatttcctcctgtttcctgtgttttcacttcatgtcggattgaataagcagttacttcaatttttacggttttttctatatccatatttttcctttcctgtggttcgaaggggctctaagactttgatttatctctagttcttcatcacaaaatgtagaggggaaaaaaagacttttgaccttagtttcttgacgtgctacttctacgagaacctaaaacacacacaggatatacaaataattactccatctaatcattgttttttttaaaaaaaaagagaagaactttgcagtatttcattgatagtgaagatagagcaacatcaacatgatcagaaaggataaatcaccgtgtccgaaaaaagatcaagaataaacaccaacccaacacacaacacctcacaaagaccggaatatccctctagtaagtattcccaatgtcatatatctatgacaagtggaggtaatatttgataatattttttaattacacgagtatatgtgggaacacacatggaaacaaacaaaaatgcagaattattttgtaccaacatttttcattttgcccctgagggattttttccatcttggctttttaccactaaggtgaaaattagtcatggtttagcctcacatttgcatttgccctttggcaaaataaatagacatagtgaatgtttatattagagtgtcatatatatgctattttttatggataagacttctgatactaatttaacagcaagcgattttcgtccaatccagatcctcagtattgcagactcaatgtggggctgaatgtggggctgagggtctgtaaggcccatatgtcagtgagcacatgcagtactgcaggagccgcatccattttcatcaccttgactcttaagacgtcaaaagcaactctacaaacaaatttaatgagctttaagatgcatttgtgaaatggggagcctaaagagtctacaactcgtccataactttagccagtaggaacagtacaactgaatggtatttctttaattttgtcttccttttctgatattaattttatcggaatatattcagggccatatagtctttgaatagtcatgtttttttatttaccaatcactttttaatatcgagattaatatcaaacattcacatatactcttttttgggtgaaacaaatagtatttaattagagctccctttaaaacatagaaataggaaaaaaaaacataggaaccaagtgacatagattttaaattcctacaggaagataaaccatatgaaagtactttaaggtcccgttcgtttctccaactcatgagttggatgaaaaagaagatttatgtgacacatttttcaaactgctaaacaatacgtttcgtacaaaaactttctatatgaaagttgttctaaaatatcagattaatccatttttcaagtttgtaataattaaaacacaattaatcacgcgttattaccaccttgttttacgtgaaatacttaatcattatcttcatcttcatcttcatgagattcaaacaccatctaaatattggtgtttgattggaacacataagaaacataggattgcaagagacaaaagattgaaaacatgaactaggacctcttggccttgtttctctgaaatcaccatataattgtccatttcatataaatttcaaagaaagtgataggatttaatcctttgtttcaaaggctctcataggaattattttataggattaagaatcctccacttcaaagcggccttcaaattgcactttgatgaatctctaccaatgttaaaaaaatctaacggcctagagaagcacaaagcatatctagatgaattgtggaatgcagaaaaaaaaactatccctagagaattattacagtgtttgtagaatgaataattatgaattacaaaattatagtttggttaaaaacaagaaaactactgagaagcacaaccttaaaaacaaaaatctccatctaaggttgatcagaggatgcataactattgtttgtaccaacatcttacaagttgtatgttgtagttatctttctcaagccataaaaatataatcttcgaaacaagtaagtaaggaagccgtgaagacaattccaggtggtggcaatagtaaaaaaaatatagacatatgagaaacacaatcatatgatgctgaaggttcaatatcacattaaaaaactacatatttaacaaaactacagatttgaagtgttgtatcacaaaactacatatttaacaacaaatttatcatggaactacaaatttaaggtagagtttcacaaaactacatatttaatactatctctgttttttaatagatgacgccgttgactgtttgtcacacgttttaccattcgtcttattaaaaaaattacataattataatttattttattgtgagttgttttatcactcaaagtactttaagcatgatttatatatcttatacatttgcataaatttttgaataagacgaataatccaacatgtgtttaaaagtcaacaatgtcatttattaaaatacggagggggtattaaagttatcacaaaacttcatattgtaaagtttcaatcactagcactgtcgttctgttggacattgtagttttgtaattaaattgggactgaaactatagtattgggataaatttgctacttaatctactgttttgtgaaactttatcttaaagttgtagttctatgataattttttttttgttaaatctatagttttgtgatacaccactttaaagttttgtaaaattttctcatatcacaaattaagaagacaatttgaactagtgatatggttcacaccagtttttcacgaaccatttctggttcactttgtttgtgcactgtcgatggttatgacccctacaattatttctatttattctaaaatgtttcaaatttcagaatacggcgagaagcatccttgatatggcatggaattgtaggggtatgactttattcatcgggttatatatatacaaatataagtatggttttagcatatcaataaattcgtaactcagagatatcgctaatctcgacatggcgatcaacgtgttaagacgacgcacttgcagtttgtgagtgtgtatacatgttgagtcgtaatcgaaatcgaaaagaaaaaggaaagaaaacaattgacgcttactgtcatcacagccattactgaagtaccgatcatgctttctactcattcggagagatcacaaacttttatcgcatcaatcatcatcaaccgatcgagctaatcaccatcaagttaaaaagcgagaggacaataggaggcatcaacaccacaataacaacacaaaagaattaaaaagcgacctctcaaacatgagcaaaatctttttctgtccccttctttttcaggtcatgcaaaagtaaataaatagaatacttcttccgcattagtttaaacttgtatctttttttaagcgcagtaattataggcatacaaatttcttcaccataatataatcatctaaaaccaatttatggcaaaaggaaaaagctagaattaaccgtgccaattattagagaacgcaggtggaagccttaaataggcaagcagtcaggcatttagcagcgcgctgcgcgcagcagtgaagccatagcccaaagccacaagctaaaaattcgtagttgtttttttaataacatcactattaaatatgtattttacgatacggtattaaatatatagttttatgtatttttatgatacggtattaaatatatagttttatgataaatttaatgttaaatatataattttgcgatatatcattttcaatctatagtttctgatagtttaaatggagttcactaaaatttattaaaaaccatgagtaaattttataaaactacatatattttaaattttaaatttgtagattttaaattttaaaagtatactgtaaaatttattataaaccatgagtaaattttataaaactacaaacctacatatttaataacaaatttcgcaaaacaatagaattaaaataaagtataacaaaattcccttgtggtgaaaccagtctatccgggtttaagttttagacttaacatgggtgctcgtatttacagctaattatttttttagtggtaagtgatgtactcatcgacagcaagatgtctatggacttcatcaatctcaagatatactggtccagtcctccgaagatgcttatagaggtagggtatgtgtgtatgtgtttatagacgtgagtgtgtgtgcgttatgggcacctggatttatactacgcttctcaaaaaaataaattataacaaaattgcagatttagtaacaaaattattataaaactacaacattttataatttggagataaaattagtgctaagagtttcaactttgaaatctgtagttttgtaatagcacataattctatgatactccgcattaaatgttttgtgaaaaaaataatcttaattttatgatatgacgttttattctgtactatctccgtcccataataattgtatttctaagatttacatgtgtcacaaaataattatcataatagagtactaattgtctcataatcacttctcatttaaatttatttctattttacccttaattgtccttctattcttacctatacaccatttaatgaggggtatcgtaatctcaaatcttaatatatgctaatcaaaaccatatatcgaaaccatttattatgttaaatgtcgattactccctctggttctataataattgatgttttagataagattgaagtcaaacttttataactttgactatccataactttaaaagtatttagtttaaaaaacaagaacaacatatataaaagtatttagtttaaaagaacaagaataacatatatagatttgtctttcaaaacactaaacattcatttatttattacatatattataatagaaaaataaggtcaaatatatgttttttagatcgtgtgattatcaaaatattaattaaaataaaatcggagggagtattatagaacggagggggtggaagcccataaataggcaagcagtcaaccagatggtcggtattcaggcagcgaagcccccccaaagccgagctcgcgcgcggcggcgtcgtcgtcttcctcctcttccccccgagttggattcgtggccgcgcggcggatgggaggggaggagggaatggcggcggggaggaagaagcgggtggggaggtacgaggttgggcggaccatcgggcaggggacgttcgccaaggtcaagttcgccgtggacgccgacaccggcgccgccgtcgccatgaaggtgctcgacaaggacaccatcctcaaccaccgcatgctccaccaggtaattcccccgcttctcctttcccgctaccctccacatccgcccccgccagtgcacgagtccaaatcaaactcctcgcactcccccctttgctttgatccgggcgattctttttacacttttttttatttgggtgctctccgctgctgctttgctgtttgccaaatggtgagcagccgcgcatcgacgagggcggatggagaatttccgaatatacctcgacagcaatgcgcaccactggttaattcgtgcgagttgcgcgcagctcttgccgtttgatgattaagaataaggaattaactggagagccttaaatttcttgttctcccaaaggggaaaataccttttttttaaaaaaaaaaaagaaaagaaagaaaaacttaattcgagcggtttgtttggtgtttcatctcgtttgggctgacagaagctcagttgcagaattgaaatggttgggtgttgaaagtgattttaccaaaatttggtctgttgtagcttaattcgatttgcggtgtttgcagaaatgctacaaatagttggttcatatggttatccaacgacatcttttgaggatgcatcttgttgcaaagtgctcaagttctctaattatagtggtgtaaatcttttcctaagcttcctgatttgctagttgctatggaacttggtttctctccaattgtgtttgcaattgcaagtatatatttggtttgtttaatataactgttctataatcctaagcctactgctatgccatgaagcttggtttctctccaattgtgtttgcaattgcaagtatatatttggtttgtttaatataactgttctacaatcctaagcctactgctttgccatgaagcttagtttctccccaattgtgtttgcaatttcatgtgtataaatttggtttgtttagtttaactgttctgcaaatcaatgatgaccaccagttttacctgattttgctgtgagcacccatttcagatttccagtttatgcgagatgtactttctttgtgttgtttatgcaatatcgctaatcatgataacaaaaaaaaggactaaaccattctaattcggcattagattacgaactcacttctcatgttacttgacagatcaaaagggagatatcaataatgaagattgtaagacaccccaatatagttagactaaacgaggtatgctaaatatttacttgccatctgtcctatataacttttcattattaacaaaactcctatgttggctatcttaacttcctgtgtcactactttgttaccattactatgattttgtaggttctagctggaaagacgaagatatacataatcttggagcttatcactggaggcgaattgttcgataaaatagtaaggagtctattatatacactaccgaaataacgatgagctgctgttctacttgaactaaaaaaatataagaattgtgccaatctggcagtgtctccatatgtaaattctttttatcacccatatataccagaaactttctgttcagtaaattataggcccattatataatcccaataggcaatataaagaaaggaacatttttttattattgtgcattttcttaaaatatgaacctatgcgatcaaatatctgtaggctcgccaagggaagcttcgtgaaaatgaagcaaggaagtacttccagcagcttattgatgccatcaattattgccatagcaaaggagtatatcatagagatttgaaggtccgttactgataagagacacttggctatcatttgtcctattcactaggtgcaatatctcatgcttaccctttttttgggcatgttatgtagcctgaaaacctgcttcttgactcacgtggaaacttgaaagtttctgattttggacttagcactttggcccagaaagtaagctcagtaattgcttttaatgatgctgtatttctatcctagaagtgttctgattgggatttcttttttgagggatttcagggagtaggccttcttcacacaacttgtggaacaccaaattatgttgctcctgaggtatgatgctctctctctctctatctctcaatgcatggtaaattgaactgtacgaaatgttttttttttggcaaggagctaattgattagctacactacatgcaagaaatatgtctgcaaaattagacgagttactcgggatgcaattcaattttcctagattttctttatagatcatatttgtatgtatgatacaaatgtctgttagactagaaagagattacctatttctttgtttctctacctgtctcgcagttatttggttggttagttctcttcagggttctaaacctcatttttatgcatatttctgccatcatcactaaataaatatctctagctgtcttatttcaccatgttcaagctattgtgattttaattgtctgaactagttcataaaattgtgatatgggcatttcaagccatttccttagacaagattaggggcatttttttagtacatatatgatatgcgctttaccatgtgtcaatgttttaggtgcttagcaacaatggttatgatggatctgcagcagatgtttggtcatgtggtgttattctctatgttttgatggctggataccttccttttgaggaagatgatcttccaacactgtatgataaggtattggcttcattactaatgtgtgcagcataagtctttctttccctaaattgttgatgtgaacacctacataatcgttctactcagatgagattgaaacctgatatgtttactcctacattaaaagattactgcaggtcagttttcatgcccttattggttctctccaggtgctacatcgcttatccacagaatactcgacccaaatccaaaaactgtaagtacacacactaggttgtttcattgcatcttcaagaaacaaatcatcctttatagtaaagtttacctcaagcttccaaagtactcttgtcaccaatttaatacttcagtctcagtctgcatggctgcagaaattatgtgagagaatgcagaaaacaaagactaatttcttcatatcagtgctgccatatatgttacagaaatactgtatacaactatacatgaccagtgacagaatcttgctagaatcaaatctaataagtctaacgcatagatcttcaaccagcatagagtgtttgcttttgcaaattgccgtctccagtttcttaggcctttttcactattttgcagcgtatcactattgaacagataagggaagacacatggtttaagaagacttatgtagccattaaacgtggtgaagatgaaaatgttgatctggatgatgtacaggctgtttttgacaatattgaggtttgtgtatgccattggtatattgccaattgtctgtcacctatttgcttctatagttatatttatacaacttttctggcttcaggacaagtacgtttctgagcaagtgactcataatgatggtggccctcttgtgatgaatgccttcgagatgattacattatctcaaggtttggatctttcagcattatttgatagacagcaggtaatttcatagttccactcttccttttagttggtaacactcttggtatggttgaccattttgctgttggagaaccattagcgcaatgaaatttgaaacgctgatgggtttatagtgtacggagatctggcatgtcagcttatttcatttacttacaaggctgtgaggcactgggtttagtgacggttggtcgctcaggggtttctatcttgtttataataaatgacttaaacgaacatccatttcaattggcgttagtattatgtggaactatattctagccactgtatatggattaaccgactgtagatcgatcccattgtctattctcttttcttatcgcttagtgtactggttggtggcagacggcttctgttttttgccaaatttgaatggaaatggaaaccctgcataaaaggagaaaaaaacatctgattgcttgcttcttagctaatctccatggtttaaattgcacctgtttagtttgtgaagtatttgaccacaccaaccatatattcattctagttgcaatgttctcgtatagcagaaagaagaacccacttttcaatgtttgtgctcttacattagatcttcctagacatgtttagtatgtatttttttattttacgtggaccatacgtcatagtgtgccacacgtcatgaataactttggtgtttgctttatgcattaactgcagtcctcatgaataacttatgttgtctgatgcaactttcatcacatggagtgctcatgttgcaataatgatgggttttatatttgtaggagtttgtcaaacgtcaaactcgttttgtctcaaggaaaccagcaaagactatagtagctacaattgaagttgttgctgagactatgggtcttaaggtccactctcagaattacaaggtaattacaaaacattttcttcaacaagcaactcatttcttactcttgatgtaatgatacttattgctaactcttttctgcagttgcgtcttgaaggtgtatcttcaaacagaatgagcccgtttgctgttgttctacaggtagtcttacattgccctttgttggggaacaacattttgctgtttgtcattcacaaactacatttttcatgctgtcttatgctttgaaatgcatcattcgcaggttttcgaagttgctccttctctgttcatggttgatgttcgaaaggttgctggtgacacactggaataccacagggtctgtctttccacatatcgtcttgtatcctaatcgaatatagtagcatgattgcctagactagttcataaatctaaaaaaatgactgacactgcctgactgacactgataactttcacacaatgtgtcaaaatgctcattcgaaggtgcaacatccaacttttcgtccatccggaacgattgctaactcagatttacactcattgcagttctacaagaacttgtgcaacaagatggaaagcataatctggagaccgattgaagtttcagcgaaatccgcactgctgaggacagccacatgctagcctggcgctaacgcagctgcaactcctgcatcagtgggattttcaggttttcaggttgtcaactcctagcccgtccaccgaagttgctcttgcaggcgctgcatgtaccacatagctgagtcagttcttcagtagatcagtgtaccattctagtttcatgcaccagatgttttggtagtattgttaatatagaactgtagatagtccatatagcggccaattgtgcagtctgtatgtaacatggatatagataggtttcttgtgtagtagtagtaaataagctggttattttgctgccatgaaactggaatgacttgtgaacgtcgaaatgctctcgtgtatgtcggatcttcttcacttagccgttctcaaggatgagagcaattaatcttgtgatataatcctatatgtatttccagggcagaaatggaaaagaaaagggaaacctgcctaccacaacttttaagcctttgatctattgattataatctgaagttaattttgattttttttaatttgattcgtaagaataatcttaggtatatttcgcatctcctttacttgcccttttgactttcttggaaaaaagatatagcaaccaaagtgaggaagaaaacccttggtatcagtttgaaatcaaattctaaaattcaaaatcaaaatcagctttcgacgaaactagtttaactcgtttcgtccagcaacagttaaactagtactcctagcagtctagcagattagcatccatggaaaaaaaaaacccatctttgagtcccatcatgcaagccaggtacatagaatggtaagaagccttaaactaatccttccaatccataatcaaattagtggctgttaccaaattgtcatgaaatttctacctctccatgaccacatcaaccagaaactaatcccatgcatcttttatcatataaactaattgccactcaaatactgcaaccatggaaaaaaaaatcctatcttttgtgtcacatcattcaaggcgggtagccaggtacacagaacggtaaaagaagcctttaactaatccttccaatccataatcaaattagtggctgttaaattgtacttccttcgtcccaaaatataaaaactcagattcgtaatactaaaaaatatctcattcggttctagattcttatattttgcgacgggggagtagtaggactcccttcattttttaatagacgatatcaataatttttaaatacatgtttgatcatttacctcattaaaaaaaatttatgtaaatatataagatacaaattatattttaaatacttttagtgataaaataactcacagcagaataattactattttttaaatacaatagatagtcaaacgtatatccaaaagttaacgacgtcatccattacaaaaccggaggcagtaataaatttctacctctcctctccatggccacgtcacccagaaactaatccaatgcatcatttaccttcaaactaattcccactcaaaaactgcaaatctatctccaaacctttcccaaaaggttgctttgcttctctctccctctctctctctctctctcttcccccaggttcagatgaacctgtccagcctctccaaaaagaaggtcaagagaggaagcctggtaataataattccaatgcagaccaaaatcagagtcctttttattattccaagagacgaaatggtggtttcgtcacgccagtgacgtagtgggttagcgttgggaatcaaaagccaagtgcatgcatttaacccaatggtgagtgcagggttggagatgtgccagcccataggtaggaagggtgagatgaactagacgaccagagttttagcaaagaccagcaaaaattttctttggaattttgagaggacgacgaatccggcagcgaaacttcatgctctggaaaagttggttcagacagagaccccctccaagattgtccggcttgaagcagctcgtttggaacaaaggatctttcgaatgatggctcctttgaaatataggaatttcacgtggaatttccaggtctttatctttcaaacattgggtcgtttggaatacacgaatttcatgtgtattttatgggggttctaatcttttgaacggctcatttaggatgcatagaatttgtaggagtttcacatgaaggctgtgttttcacgtcagaattgaaagtttggttgaaattggaacgatgtgatggaaaagttggaagtttatgtgtatagggaagttttgatgtgatgaaaaagttagaagtttgaagaaatattttggaactaaacacggtggaattttgcacggatttcattctcagaagggtttgaagagtaaggcggtcagcttcagtaaaattctcaaccaggtgccactgtaagaaaatccaggaaactaattaagcatcactggaagatcttgatctcagtgaaaccaagcagccgcttcaaatccatcaggaaaacaaagcaggcacaacaacacaggcaaaaccgtaagtttcgagctccacttcaaacagagaatcgacttgcatactgtcatactgatacagcacaattgcacaaacaagtgatgacatgattagaactcaaatcacacatcaaagtttaactgaaacaccacattttatttaatctgggaaggttacaaagattacagcattcaacaatctgccagcaaaaccagggatccggagtagaaaaacaaccacacagggttgtcaatggcaaggcccttcagaatgcaccttgcaaaggccggatccccaaggataatatcaggagacccctacaaacaccataagaagcaacccccattgcaaacacaaacacacacacacacacacacacacacacacacacacacactacccacgataccgcaagccgcacaagacctgaactggaacaaacatacgcacccgaagagatcgcgaacacctggacactgaagaactggagcagccaagtttctacgaacggtgttgatgtccgcgactaacaagaattaccggaaaagaagaacacgctttgacaatatttgagctccgaacacgacgcaatggaaaaaaaacagcatgatgtaatgactgtaatcaacaaggaccaaggttgggatagaggggcaggggtgccacgctaatggcagccgaaggctcaaggaacaggcactatcccaagaggatacctgcaaaaaacgagcactcggctaaaaatgccccccggaaaacaaccggctctaagacgaaggaagtccaccatgactcaaagacaggacccaagaaaccaactctgctgctgcgaagcttgactgaagtaggagtactaccgctacggtcgtatatttgcatctggagatggatgacccagcacctccagcaactagttgttgttcctctaagcaaggatgtcgcaccaccagagctgcttctccagcgatgcaatgttgtggttgccaatgaagttgaactggagattgaggccctccaacgatgccgacatgctgcctaagaaaggaacactcttctgggtaaccttcaaacaaccagaaagtgagaggacacgaagtttgagctgcctcgctgacgccaacactgcaacaccgtagtcgctgaccatgcagtttgagagatcaagttcggcgagatcggtacagccctcagaaatggcaaacaggcttgcatcagtgatcctgctgcaaccttcgagactgaggcgtgcaagcgaactaccatgtgccttcaccaaggcagaaacagtagcatctgtgagattctcgcagccgttcaagtcgacatggaccagcccactttcggaactcttgatcaatggaaggagcccgttgtctgtaactgcaccgagaccactcaagtcgacattctccaactgagggcagatcatgccgaccacggccaagctggcatcggtgaaacctgggcaatccttgatggtgagggatcggagagacttgcacaggggaagctgcgcgggagcagagcagatgtccttgatcccgttgcacttgaccagtgagagggccttaaacttcgggctgcagttgaggaggaaggccagaatgcccatgagagtaaccttgttgcattcctcaatctgcaaactctccaagacctttgccgattccgcgaaatccttgagacggccatccgagacctgaccgcatttcttgaggttgagctgcttcaagctcgggcagaacttggcaatcgatgcgagcgcaagatcagtgactcccgggcaggagctgacactcatgaacctgagcttctgcaggccaagggcgttggccatcacccaaaaacccctctcgccaaccgcgggaaggcgagcgagggtgagatcggtgatcgccttcccgtagtacccaatcaccgaaagagaagcatcggtgatgctcaatccctggaggcgaaccttggcaagcgatgcggccgcggagcagacaaggccggagacaccctggtcaccgacatgcgcgcaattcttgatgttcaccgactgcagcttcgcgcagcaccggccaatcgccttgaggccctcgtcagcaacaccggggcatgcctcgacggtcaccaccttcaagtccgggcaaccctgagcaattgcagcgaggcccttgtcggtgatcagcgggcagccggtgatgtcaagcctcgccagcgaggggcagccggcggcgatctcggcgaggccggcatcggttacctgagggacatgccacagggcgagcgagaggagcgacgggcagccgcgcgcggcggccgagatgccggcgtcggtgacgccgcgcgtcgggtggctcccacggatgacgaggctctcgaggcttccccggagcgcgtcggcgacggccaccgccatgaggccgacgtccgtggcctcgcgcccctcgaggcacctctcggaggagcagccgccgccaagggggacctcgaactcgtcctcctcctcctcgtcctcgtcgacgaacacctggttgaggtccggcaccgccgccgccgccggctctcgcttgatctccgacgagcggatgccgccgaggagagcgagccagcggcgggagacggccgcggaggcgcaccgggcgcgggcgcccttcacgcggcggaggatctcgaagaggcactcgtcggggagagcgtcgagcgacggcgcctcccgctgctgctgctgctgcttctgcctcttggccgccgtcaacccctcctcctccaccacctccaccgcctccgcggcggcggagacgaagccgcagggcggcacggcggtgacccgcgcccgcttccgcgacctgacgccgccgaacagagccgccgacgccgccggctccatcacaagaacaccaccatctgcacaaagcaaacccaaaaacacacatcagcatgaacccaaacccaaatccattaaaattcctcatcttgtttacctacctctgtaatcgtggaacggaggcatgccgacttcttcaagaacaaatcagaccaacaaatttggccccaaaaaacaacgcaagaatcaacaagagatgaggagaacgccgaacccaatcgccaggaggcgagaggggaaaaaagatcgcagatttagtgtgaggagatcaagggaggtggaggaggtgatggaggagagggaaggaagaagagggtgggtggtttttatgtgctttgggtagagaagaaggggggaagccaaagaatggagaggatgatgaggattcctgcccaacttgcacaagttgtgtgtgtgtgtgtggagggggggggttgtttttggcctccctgtcacactggatttgctggatttgcaatggattcattgaatctctctctctctctctctccctctcggggggggggggggggggggggggtnnnnnggggtctctcnncnnttcantgtgctggacatgcctgatgcatggacctctttttttcccctctttttacagtgggatggatggggaggaggcattgtggagttttgattgtgtttgaatttgatagctttgggatgaaaaaaaaagaagaagtgttcttgttagatttttattttgaaagattataattggatgcatacggctgtataggcatgtagtagtatgcgtttgttctcttggttgttaatactacttatgttttttaatatttcatgtccttaattttttatgattcgtttgattattcatcttattaaaaggttttgtgcaaatatataaaaatatagtgaagatttaataataactcaagtcataagaaactaaattgtaataaacatatgaattttataataagttgattggtcaaatgtattactataaaacaacaacgaagttagatattaaaaatggagagagtataacctcggacattagaacatcaaagagaatcggtaattcgtgtatgatcttgcacatttctccattaccattctgaaaaataaaaatctttaaatccaacttctcaattggtttcgtcatcacaggatattcaattaaaaaaaattcaacaatttactttttttcacactagaatttcccacaatttttgcatcgtttttgtgttgattaatcggcatatgatttttaatttaaagatgctttgttttgatacataggtcatgttcttttttccaataagagttgaatgaaaattaagattttcgtggcacgcttttcaaactactaaacggtgcgtttagtgctaaaactttttatatgaaagttgctctaaaatatcatattaatttattttttaagttttataataattaaaactcaatcaatcatatgttaataccatctcattttacgtaaaaaacttaatcttcatcttcaaaagaaaagagcaccaccacagtggtagcatggctttactaggaagctgtctagtacattaccatattcattactgaacaagtttgcatttatgcagttcacgatctgatttttactcctttcatttttcaactctccttttacaaaaccgctttcaatatttatcaatgctctctattattagtttacatttaaccaccgataaattttaaaaggttaaagcaatgatgaacgaaagctatgcagcataataacttttataaataaaatggccaaactttcaaatatatactaccagttaaagcgaattcaactaaaagctactaacttcataaattattaagtgaagtgttactgcagattaaacttggatgaattaatattttcataaatgcacttaacaaaatagcttaaaatataaacacaaggtctacgcaatgtggtagaagatttttttctagaaaatgtatttttcaaagcattgagcaaataatatgctttaaagtttggtgaataatttgaaaggaataaggctgagttattttgagcactttgggttagctactcccttgtattttgtgagaatatttcccgaagtgttaaatggtatgtgttttgcaaaactttctatatacaaattaatattctgaaaaatcaaataagtttattttaaagtttataataattaatacttaattaatcatgtcctaaaaagttttcttgttttacgtgcggttgtttagcactgctcgaacgaacggtgactaggccctgttagaggataattaattggtaatcagcttctgataatagttaagttttataacttcttttagtttttactaaattctataactcaaaatcaaatctgaatgagaatctaatttatttaaggggattttaggacaacttacagtgcccagaaactccccaacacggggcctaagcccagataaattaacaaagccagtgccccagtataccaccctcaagtttttttcttttttttttaaaaaaaaggcccctactgtggacatgcgccacgcggatcgatccgtggaaaatgccggttcgatcgcccaactctgcctgctgccaaatacgcgcccgcgcgccgcttgatcaaccgatcgatcgagactgatctccaggtgagaaacctgcgagaccgatcgatatgatcgaccgaccacgcccgcgtccaccgctcgtccatcgaacccaacccctcgcgctcgccgtcgcgcgtgcgtgcatgcacctacatcaacaccaccctccgcgcgctgccacggctgtggctggctcgcgctgcgtgttccgtgtgcgcacaagtgcaacgcacctgggctagctgggcgcacccaccacttataactaacggaaagaaagaaacagagaaagaagagagatgaaacgggaaaaagaaaaataaaatgcgatacgacatgcaacggcctgctgctgctgggtgtggtggtgtgggtggtgaggtcgtccagtcctgtccaggtgcatgcactattgcgcccctttttccttcctcccccagcttctttcgcccttatcaaatccacagcttcgtcttaattagacccctgttaatttaaaaagcttaagaggcagcttgtcagtcattagcttctgagaatccagcttaagaacccgcatgtgacttctagtttattttcttttttaataattttttagtttattttttaagtccgtagttactccatccatccctaaatataatggattaatgataatctgaaatgttcgtgtgagctaaaacttctgagagaagcggcagcatcataagcctcccaaataaaaccttagattagattaatgttctttagagcttacttttcttgccgtttatattaggttgttaaccaaccagtaggactagctaacttatatgggcatttaactattttttttgtcacttttagattgaacgtttaatcatttgtcacctatatggcaacgacatgtaagttcaagtgttaaataattatttgtcacgtctaaaattagcaaatagttaaatatcttgacttatcttgttactctagaatcttagatgcacttaattatcttactactatcagcctagtatctctctctatgtaaaactcggtaatttcaagttggaataattttgtggttcttaattttcttgatgcaccttaattttttttaataaataaataaattatgaatagcaacaaacataagagaacattattaagcccttctcaccaacttaggagttgggagacaaaatgagccaaaaatgaagcagttgtttcatagagtaaaaaaaatgcattcgttatttttcttccattttcttgtactatcagctagggttgtgtttagttcagcgcaaagtttagattttggttaaaattagagatgatgtgacagaaaaattatgtgtgtatgataggttgatgtgatggaaaagtactgaagtttaatccaaatttgaatctaaacataacctaggttgatctactacgcggtttcgtggtggcctcttgtgggggtttgattaatgactcggtgaacagaactactaataatcgagagtactgaaacttacacgtgggcccatttcagaccagtgtttgtgcgtggggcccactgtcagtggctctacgcggtcgtccctcttgttgaacgagctccggagtccaaactaccagtccaccatggaaaggtcgagctgacgtcgtgtgaattgttctttttttttccctttcaagaattatgatttgtttgaccaacgagttgactgggagaatttttattttttttataggtgagttgggttgtatacgtagaatttgagtaaaggtaggtagctcgaactgtttttctatgttttgatgctattataaacatggattttaattgtacggtttggagtttttacctgtcaatctatatattgctcttttaattctccccccccccctcctaactcctaagtggctttgtttggttaagtgaggtttaaatataaactcataaattgaagcatttctcacatatttatgcccatctcacattacacagatattaagaaatcaggtaaaattaaataaaagaatattgtgattggtcgagaaaatgaagaggtgaagaatttgaatggcaaaatattataattgattaaaaagggaatatgagtggagaaattgttacactttggagtataggacaaattttgaatggtataacattattatattttaggacgtagggagtaggtgattaattaatacatcgccaatctgtatgtaatggccaagcttagaaagcttaatcgataaaaatttcaagattatgctaccaagtatattagaagaagaagaagaagaagaagaagaagaagaagaaagtgaaagaacaataattttgtccaaaagaagtgtactccgtattctctatagaggagggaggtaaggtacatatcaaaatgagatgtattcatcggcagacggcacgcctatagttgctcctattctacctttcaatcttctcccaacaccaaaatagggtgtatttgaaaaagacatatgatttatttttagaaaaagaagataccaacgttattactatttcgtataatggactataccttattgatactactgctttcaataaaaagtttacactgtttagtgataggcatgattagctttaattatttccccagaaatcgacattgcagaaactaggtcagcttattgaataaagatcacttataagatgattattcttccagcagaaatttatttacatgtcaaaatttttatcatagtcaattatcataatcctagattatatatatacttgcaaactcatatgcttgtatgtcacatatcatttaacaatagatattccgatcaaattatcacaaaattatagatttaacgtgtaatttctcacataactatagatttaatatagagtgtcacaaaaataaaaatcaagtagcaaatttatcacataactctaagtttagtgccaatttaatcacaaaactacaattatcatagctccaatatgatggcaatgctatggatttaaactcaatagttttatgataacttcaatataaatagtagtttcgtgatattcggttttgtgataattttaacgttaaatatgtagttttatgacacataaattaaataagtatttttatgatagtttgatcaaaatattaatagttttgtgaaatttactcttaacaatattatatatgctattcaatagcaattgctgaccatacaaaaacataacacttaatttgcagtaaagaaattctctgattaattatacacagctgctaaattctctcctcacttcaatccaccgtgcaatacagctgtttttcaattcgcaacgacccccatcgctgaagatgaaagacaggtacgcatgtactattcttctactacaaatggagcttattgcagctttgtgggacagccaaacggtcagccccggcccggtggttgatctgaagatccattgcatttgcacctgacgcgctcacaacaatttgacaatttgaacctgatagtgcatgtctcaccaaactatatagtactatcaattttacatgcatgttcatcactgaattggagaaacatgcaatgaagagagatcgacatgacatatactagtacatactattccatatgcaactctagatctgaactcaacttgtgaaattgtggcctaaatagtctgtacttcagcagcacacaacactgttgaaactctctgagcttcgatctaggacaggcaaaattaattgaattagcagactggacacaccaatcaatcatcctatccaagtacatgcatcgtcgtcgtcgtcgtcgtcatcgtcatcaaccattgcagttgcagctagagagctgaatatatacacaagttgcagctctttccatgctctatcattcatcaagttgggtttaacttttaattctttctcttcacccttcttgcactggaccaagacctttattctttttcttgcattggggagctgaatccatcgatagattcgtgagagaaaggtaggagtagtaccatgatgcatgaccgaccaagggtccatccatccatccatctcgatctatactgtctactagtcttaaacaaatgaaatgtgtgagctgtttctcgacctgatcagtcgttcttgcaacttttgcaagttgcagcaataaaataacactggattgttgcttagatcacgcaaaatgcagtacaagaattcctaggaaatgaatgaattgctggctaggagtagcaatccagagtcttcttcatcatcgtcttggactgcactttctcggcctccatttgggtagttcatgtggccaggtgagctgaaccttgaatgcatgcttgtgcaatttgccgattgttttagctaaggcgtagtacgagggacggagggtgagatgacctaaagtcctgaagaccagaacgatgaaagaggaaatatgtcggttgctaattcatgcaaattattaatgcttgattaacttttcaatcaaacgcaattaatggttaattgattaattagtcccccacctacatcacttggcctgttttatatagtttgccttatggtgtcgtgtgttggtaatctgtggatcagcagatgccacggtgatctagataggaaaattagttcacagtacttcactcacatctgcatcttgagctatctatatattcatcctagctgcgacttgtgttaagtttatcatataatcgttgtttgattgctctctggttggcttctttttaatttgcagtagctagctatgcacataagaaagctagccatgcatgtatatatgaagaaattactgctattaagtaggagatcaagatttaaagttcatatatattagacaaacaaaaacacttctttttcctaaaaaaattagattaatagttctccacacagacgtggtaatagtcgtctttcaaaagtttatagcttaaaccacaatccctgtttctttttttttaacaagttctcctagcttgtttagcagccggttttctgaatctaatcccatcttgacgccttgacgtgtactagtagaattctagctcggacaccggcggcaagttgatccgaagctgcgcgcgcggggcgtctctcccggcgggcgcgcgagagcgcgcgtgcgcgtcgacgacgaccactaccaccacctcgcgcgacgccggtctctgcccgcgtctccgcgagcgcagcacgcgcgacgcgacgcatgcggcgtacgtgcgtaggcgcgggcgtcacgcgccgcgcggcgcgcgcgcgttcagtgaacctgcagcctctgcgtacgtacgttgccgtgccgtgcgcgatcgatcgaggcgcgcgtttgctagcttatgatgggtttttcccgcgggcgcgagcgctttttcctccgtttgcgccgcggggcggggggagtcgttttcggtgccaggcacggccggacgggacaaagcgagcacccgcaaacgtgagttcgatcgattgcccggttaatttactatggccacgtttgatagggttccaactcctaaatttaatttttagagttacgtttagagtaaagttgtagagcaatataaacccggcttcatctggctagttgttttgtgatagcacttcagtccgctccgttttattttacgtggagatcaaactgtttgtttgagttccgtcttcagaagaggtagaaataaagttggagctctcgtgccaaacaggtccggcttcacttgcaatcgagagtcgtagaataaatctcaactgaagatctacttggtgtgttcaatttcctagaaacgactggatcagctccctagcttcaagacctagcttaggggtttgtttgtgaaagcttcggctctagctgcatcacttttggaactgaagctagtctaatcaaacaattttagctctataaaaaagaaatagccgagttgactagagtaacctaaaaaaataaattagatgtgtgagtggagttcgggccgctatatagaactcatctccttagtgatcgctccctgtttttttagccacttcaccatatcattactgtgaattatttgccccatgcctctaaaacaaatttttcttcatatggcattgcttaaaccactttctttaagttatttaatttatgtttattttcaaaaagtatttaatttatcactacgattaattaattagatgatctgataaataatctatttcaaacacataaaactgctgatatgaggtaaccattatttgaagtagagttcatccatcaaatttaattttaaatcttgatgtctataattacacgcatatgtgagattgtgctctcatcagcagagcatgtcttaagagagtgcgcttgcgagtgtgtacgtgagacggatggggtatgtaatcggggaaagaaaattcttaacctgatcaattgttgtatttcgatacgataaaccatcaccatcccaagcattgcaatgcctgcacagcttgcatgcaactctgctaattttcccgacctggaccacgaccatgttgcctagctagtgcttggggagctgaatccaactgctaaataatccaactttctagattatttagcaagtactaatgttagagaaaaatatttctctttagtcaactttagttatcattttttaatttttaaatcatctgattagctcaagatttattaaaatgatgtgtgaatcatgcgaataagtagaaatccttatattataatattaaatttgaatttataactttttgtattattaaacataggaagtattatattacttcttatattacgcaatagtgcgatgaccagaaaaccaacagtgagatacctgtttatcacgctcatcgatcaaatccatctagcgctggcacatgcaacaagttgcccagaggcacaataagagggcaagaatgcaactatgcaagatggcagttgttgctgttaagaaaagtgcaaagagatactgtaatagttaaagatctagtgctactatttcgtttgcatcaaattgcatctatcaaagagagtctgcaggagtactactattcatcaacaacttggacaagatatgtatgttacatttatatatgacccttaaattttagaggtgtccgggtgagctgaacccatgcatggatacatctgcatccaagctaaacaaagtagtataagtacttattttagtgccacgagtgtaactggaccgttttagttgacgacctagtcgtaaacaaacaaaggggatcgatgtacataccgagagggttcatgaatctgaacgttttagacccgataccaaacaaagctttttgccgggtgttttagtttaatttaggcagtcgctttggcacacaaattgtcgtaatctatatattgatatcaataaaagtatatatggcctggtaaagaaaatgaaaagtataaagcagtgaatagagagttctttgaaataacttctttctccctccgatcccttactttttaatcatagaaacactgtgcgtcttgtatatatgtcatgtgtttatacatatctagatagctaccacttaaaacatgagtttcgtcatctatccgtcgtgttaggaaaccggcggctcataaagatccagcttagttatacccattaattggactgatcactaaatatgaaaactatctatagctatgcctctatatagagagaagatgatgctcactattatactccttgaggatgaatgaatgaatgagtgcctcacctttaaatcttgtgtctttcactttcttatagacatctgtcatgtattatgcaaaataaacccacaaataaaacgatttagatggtacccaaggaaagacatgcataaaaaaattattttccgaagtgaatatcttaagagatcctcttgagaaaacgaattatttccacgggcctaaaagaccagccactatacccaacctctccttactctcagccttcttaaaaagtaaagaattatgctctccctcatctcctcatccttatctcctcgagcccctctctcttctctcactcacaaactcaactcctctctcactcacaaactcacctcatctctcactcacggcagcggtggtgcacgcacagaggcaggtccgacggtgtggtgtgcgttgatgacgaccgccctccctcgtggatccaacgaccaagtggtggggaggggcgccagatctggtccaatgggaaagggcaatgacgttgacagtggctaggggcgatggcgtagatccgatgctgctaacctttggagggatgccccacagccggaggcctctttccatcccttgtgcctggattcaccgtcgtgagttagggtttttaggatttttctttttggaatttttatttatttattcaaaaattctttatttttcagtcgggtaaacgtgtcgtgtgtaaaaatcctattttcacgtgtggttgtgttacctgtctgggaaatccctatttctatatacacctgagggcatgcagttgctacatccatctgcagaaatgcattttagccgtttaggaatattgtttatattgtagtgtcttttgcaacgcatagacatattactagtaaagataaagtataagaattggacgagtcaagcattggatgatcgtagataagacgatgaagtcatgggtgcatatctccaatcaacagggtgtttaaatcaataatcacacatgtgtatgcacttttaatagaattttagcggaacgaatttgtgctaattttcgtttcttccaatgtgtggacttctcttatgtgctctctccgtctcaaaatataaacatttttaacaaagtgacaagtcaaatattttaaactttgactattaatagtaaaaaaaattaaaagatcaatcatgtaaaattgatattactagatttatcattaaacaaattatcataatatgcaaatctttttatttaaaacatcttacttttatagatattgttagtcaaagtaacatatcgaaaaccatgtcagagtcaaaaaaaaaaaaaaagcttgtattctgggatagatggagtaattaattaacaaaaaaatatgttttgattgataaattggtatgcataaagatgcttgcactagaattttaacactttggcccttcttacatttactttacaaatgtaaatccatgctgaaacttattttgaaaatgacatatgccaagacttgtttcacaaatgctagctaagcgtgtactcctaggacttttagcctgcaggccgatcggccgctctcgatgccggcgacgtacgagacagccaggttcatggaacgaaaatgagaggtgcccgggcggtatgacttttcagtcagactattattgtagtagtacgagccagtttcaatttctctacagtacgtaatttgtgcagactattattgtagtggtgctttttctgtagcagtaaaattgtgcagtactccctcacagccggaatgagttcatttttgggccgttttggtttgctataaaaactgggccataccaatattttagttatcagaacaataccactgtgagtttggattgtgaccaaatcactggtagtgcctaggtttaatttggtagcaaggcataggctggaattggcagccatccgtcgcccgccggaagtgcccagaagcaggccacacaacttggctaagcacaaactagttcacgcacttccgttaaaaaaaagaagctagggcttcatcttttctctacttcaataaatacccagccactactcccagccactactcgtctcctcggctggccgcctcaccgctctgtttatttgtgcttattctgcagcaaatagtaccaaaactattacaccaaaaaaaaatggtaatccttcattggtaccaatccaaatggaaattgacccataaaaatttggcacaacattggcactaatccaaacactcgtatttactgtgctaccataccaaaattttggtagtgccaaaacttaccaggttttggcactgccaaaattttggtagggtaccaaaccaaataagccctttatttcttcctatatgttctaagataaatttatttttaagtaaacattatatctcaaagtttatgaaagtagtgtggataatacattaggagtagataaaaagaaaaataattgtattgggatttgataaaatgggaatattttagtctatttggttttgtattggtttgtgtgaaatgggtgaaaaaaacttattttgagacggagagattaattgttactattcgttgggtgataaaatatggtataacaatttctagagttaattatgggttattaagaaagcatgtgaaattaaataagagaaaacaataattaaatgaaaaaaaatcattgcaattaggataagttgagagaggaagtggtggataaatttgattgattattattggttgtgataaaaaaagtagatgtaagctgatatattctataataaatttttaaatcttataggtttatttgtctctgaataagtccatttctatgcactcatctacttctattcgagtttcatttcattaataccctttactaatcattatacctatatgaaccacccaaaaatactattatttctattaattgaagacattttgatatgattggcagtacaagtttcccagtccaaattttcccctattgccaaaaaaaagaaaagaaaaaagaaacgcaaacacacacatgcacacccttactcctatacacatctctctggtcccttctactactactactagctaggtccgattcgatcatatcgacgcgatgcaagccgttcactgaacctgcagctaagtatacgtaatacgttggcttggtgggtgcagtgcatgcactgatgactgatcgatccatcgatcgagctatatctctcgacgagacgagatccagtacgtactctttcgtcggatgggtacagtttaattatcgattggtctaggtgcaggcgcattcacgtactacgcgagcaggtgcatcgctgtcgacgatgccggcgacgtacgggacagcgaggtttcagggaagcgatggacacacgatgccgatgcctggcagtgcatgatcacgacttctcagtcaagaccatcaattatcgtccgactagctagaggccgggtccttgtggtgtttttgctggagccgtaaatagtagtgcactccctccgtacttgttgactgaataactttgaataccaagtctgtttagctttaactggttgggttctcttaggccatgtttagttcacatcaaacttttcttcaactcttaactttccatcacatcacatcacatccaaaactttcctacacacataaactcccaactttttttccaaactaccaactttccctaaacttctccccaatttaatgaactaaacacagcctaaggtgaaaccgatcgtttgggtttactggcttctaatttaactcaggtgctcgtatttacggctaagtagatttaggtgcactagcgttcacgtaaattattattttagtggttcgcaagataccaatcgataacgagatacttgagatttcgttaatcccaaaataaaatataccagccatgtctttaggaggtgatcatgtcctaacagaggtaaggtgtgcgcgcgcatttagaaagatacgtgagttagggtttttaggatttttctttttggaatttttatttatttattcaaaaattctttatttttcagtcgggtaaacgtgtcgtgtgtaaaaatcctattttcacgtgtggttgtgttacctgtctgggaaatccctatttctatatacacctgagggcatgcagttgctacatccatctgcagaaatgcattttagccgtttaggaatattgtttatattgtagtgtcttttgcaacgcatagacatattactagtaaagataaagtataagaattggacgagtcaagcattggatgatcgtagataagacgatgaagtcatgggtgcatatctccaatcaacagggtgtttaaatcaataatcacacatgtgtatgcacttttaatagaattttagcggaacgaatttgtgctaattttcgtttcttccaatgtgtggacttctcttatgtgctctctccgtctcaaaatataaacatttttaacaaagtgacaagtcaaatattttaaactttgactattaatagtaaaaaaaattaaaagatcaatcatgtaaaattgatattactagatttatcattaaacaaattatcataatatgcaaatctttttatttaaaacatcttacttttatagatattgttagtcaaagtaacatatcgaaaaccatgtcagagtcaaaaaaaaaaaaaaaagcttgtattctgggatagatggagtaattaattaacaaaaaaatatgttttgattgataaattggtatgcataaagatgcttgcactagaattttaacactttggcccttcttacatttactttacaaatgtaaatccatgctgaaacttattttgaaaatgacatatgccaagacttgtttcacaaatgctagctaagcgtgtactcctaggacttttagcctgcaggccgatcggccgctctcgatgccggcgacgtacgagacagccaggttcatggaacgaaaatgagaggtgcccgggcggtatgacttttcagtcagactattattgtagtagtacgagccagtttcaatttctctacagtacgtaatttgtgcagactattattgtagtggtgctttttctgtagcagtaaaattgtgcagtactccctcacagccggaatgagttcatttttgggccgttttggtttgctataaaaactgggccataccaatattttagttatcagaacaataccactgtgagtttggattgtgaccaaatcactggtagtgcctaggtttaatttggtagcaaggcataggctggaattggcagccatccgtcgcccgccggaagtgcccagaagcaggccacacaacttggctaagcacaaactagttcacgcacttccgttaaaaaaaagaagctagggcttcatcttttctctacttcaataaatacccagccactactcccagccactactcgtctcctcggctggccgcctcaccgctctgtttatttgtgcttattctgcagcaaatagtaccaaaactattacaccaaaaaaaaatggtaatccttcattggtaccaatccaaatggaaattgacccataaaaatttggcacaacattggcactaatccaaacactcgtatttactgtgctaccataccaaaattttggtagtgccaaaacttaccaggttttggcactgccaaaattttggtagggtaccaaaccaaataagccctttatttcttcctatatgttctaagataaatttatttttaagtaaacattatatctcaaagtttatgaaagtagtgtggataatacattaggagtagataaaaagaaaaataattgtattgggatttgataaaatgggaatattttagtctatttggttttgtattggtttgtgtgaaatgggtgaaaaaaacttattttgagacggagagattaattgttactattcgttgggtgataaaatatggtataacaatttctagagttaattatgggttattaagaaagcatgtgaaattaaataagagaaaacaataattaaatgaaaaaaaatcattgcaattaggataagttgagagaggaagtggtggataaatttgattgattattattggttgtgataaaaaaagtagatgtaagctgatatattctataataaatttttaaatcttataggtttatttgtctctgaataagtccatttctatgcactcatctacttctattcgagtttcatttcattaataccctttactaatcattatacctatatgaaccacccaaaaatactattatttctattaattgaagacattttgatatgattggcagtacaagtttcccagtccaaattttcccctattgccaaaaaaaagaaaagaaaaaagaaacgcaaacacacacatgcacacccttactcctatacacatctctctggtcccttctactactactactagctaggtccgattcgatcatatcgacgcgatgcaagccgttcactgaacctgcagctaagtatacgtaatacgttggcttggtgggtgcagtgcatgcactgatgactgatcgatccatcgatcgagctatatctctcgacgagacgagatccagtacgtactctttcgtcggatgggtacagtttaattatcgattggtctaggtgcaggcgcattcacgtactacgcgagcaggtgcatcgctgtcgacgatgccggcgacgtacgggacagcgaggtttcagggaagcgatggacacacgatgccgatgcctggcagtgcatgatcacgacttctcagtcaagaccatcaattatcgtccgactagctagaggccgggtccttgtggtgtttttgctggagccgtaaatagtagtgcactccctccgtacttgttgactgaataactttgaataccaagtctgtttagctttaactggttgggttctcttaggccatgtttagttcacatcaaacttttcttcaactcttaactttccatcacatcacatcacatccaaaactttcctacacacataaactcccaactttttttccaaactaccaactttccctaaacttctccccaatttaatgaactaaacacagcctaaggtgaaaccgatcgtttgggtttactggcttctaatttaactcaggtgctcgtatttacggctaagtagatttaggtgcactagcgttcacgtaaattattattttagtggttcgcaagataccaatcgataacgagatacttgagatttcgttaatcccaaaataaaatataccagccatgtctttaggaggtgatcatgtccttacagaggtaaggtgtgcgcgcgcatttagaaagatacgtgagtatgcacacgttgtgagcgcatatatgtactgtgttttaagaaaaatataattactacctctctagaaaagttttacttttatataaatctagacaagtattattattattaattatgtattgtttcgtgaaagaaaaacaaacttcttcctaatttattattaatgatagttgtatgattatatttacagtatgacacaatcacattattacggtggctacacagttttttaagaaaatacttatatcaaagttaaaaagagaatagtataaccattgacaggtatttcaaacaaaaaaaatatggagtaataaatgcgtgtagttttactttttagctgcacgtacgtgtcggatgtccggagaattgggccaagctggtcgtcgctggatgctggcatgcaacgcacccaaccaaagctgcaccggcccgtctctattcgagaaacaaaaactgccaactggtgactgagaagtgagaaagccatacgggcacaagacaacgtgcaaaaccagctggatactcgggatttgtacactgtcaatacaagctccaaatgaatttcttacttcaaaatttgtatccttttcaaggcaacttcacaacttgttgagtgctcttattacacctttttttttctttctgacaaattgatcattttcagaaatttattgtgaaactaagaccgtgccaaaaaaaacttcaataaaaaattaagccatgttctcagcaccagagacattggcgctgaggttaaacataccaacgttagctatgttgacgttgagccccctatccacatggttccgaggacgatccccctcacttacgtgacagggactcatcagcaccaagacggttggcgctgacccaatggcatatttttttgttaaagtttttttttctgcacggttagtttcgaaataagtttggaaatgactaatttgtaaaataaccaaattattactagtatagtaaattaccacgttgatcataagaaataatatatactggactgtcttcataacagtgtggattatttatatattgtgttgtgaactaaccaacgttatacttttcgagacggagggaatatatagttgtattagaaaatacaacagaaaacctagacaacggtatcctgatagaacgaaatatgtctatcatgttgcaacgagattccgttttatagcagccctcaaaatacaaatatattcttgataatcccatacaatttggtggaaaattcgaccagtttatccgaaacagaaggcgtgaacacaagtcatcagcatcagcaaggcataaagcggacaacttgaaacactttattgaatcagctaaacttgcggctcgcttcttcttttcttttcttttttcttcccttcactttcttggacctgtgacttttagttggccgtccaggggatctgaatccatctactgtagaccatttgtacaatcaattgttacaaaatggaccacttaatctacccctaaatgctaaagcaatgactaattatgagctactcctagctgctatattcagctcagctcttgcaagttgccaggcaaaagggctactaaaaaccaatattaatttctagcaaattgctctagcaggctcttcatcttcttggaccatggcttggcgtttgtgtcccggtgagctgaaccatggataagaatgcggtttagtgcaacaacctgcaggggaacaatttgatgacattatcctaataaaatatatttttagtccatgctaataccttttaggacctggtgtctcttacctagccacacacatgtacaccgtttcaccgatttaattatgtttttaccgagtcatttgttccgtatgagaataatctatgggttggaatgatcatcaattacatacttcttcgtcattgcttcttacagaattaatcaaagggggaatatgctaacgagtataatatagtttgaggttgttgtgtttgaagtttccgatcgataaggtgttaatggtttattttcgaaactattggtgctggtaaaaaaaatgttctgctattcctctatcaaagcatgtcaatgtcaaacatttgctaaagttgtactccctctgtttctgaataaaagtttagctttgattttttttcttagtcaaactaataagattatataaaaattagtagcattttcaacccaaaacaaacatattatagatttaatgaatctaaaatttggtattttagatgttgataattttttctataaatttagtagtaaaatatcaaaatgacttctaatataaaacggagagggagtatatacatatgccaaacaattttaccaaaatttgggtaatacccatatatacacatatattaattccacattggctcaattttccaaatggcacattaattcacacaattattttttgcacgatatcagaacaacttctcccatttatatctctactattataaaaactgaagatgtttttgccagaactttggtacgtcatccgtatatgagtcggtttttaagttcgttcgattttagaaataccaaaggagtcgcatagaaatctcttaaaaaaaactcgcatgctaacttgagacgattggactcctaataacaactcatgattttctaaaataatatatccaagcgaattctaacggtgagttttacctgaactaaaccttataataattataagattagaatagccttcacccgttgcgtcgcacatgcattttctctagtcttataaaaaaattggcaataccaaatagaggtaaggtagagaagtttatataatctaacatttatcatctcaaaaattgcctcagcctacgaggctacatgccaatatatcctgatcctacacagtggcggagccaggataaaattatagtggggtttctcagcctttgggccttataacattattagataaaatctattttagcccccttacaatagatatatggatttaaattttaaggggtcttaataggggctctaatgatttattagggggtaggggagacccccccagcccccacgctgcctccgccactgatcctacat

SEQ ID NO: 8811 - DNA, 1441 bp, Oryza sativa
attcgcgggaaatttcagagagtattttagggcacaaagaatattacaaaatattctcagccaatgatttttaaaggaaatttttaattccctcaataattcacttgattaagttgatttaacttttatttaatttctagaaaatgcattatttaatgatttttaatcccgaacgaaaatcggggcgttacaacgcgtccagcgcatctccaagcgctacgtactggtggaatggaccctctatcggcgcgcggctaacggagtcctcctgaagtgcattcctcgggaacaaggcgtcgagcttcttggcgatatccatgaaggcgagtgcggagcccactccgcctcacgcaccttggttggcaaggcctttcgccagggtttctattggccgacggctctcaacgatgcggttgacctggtccggcggtgcagggcgtgccagttccacgccaagcaaacccatcagccggcccaggccctgcagaccataccactttcatggccgtttgctgtctgggggctcgatatcctgggtccgtttaggcgggccccgggcgggttcgagtatctgtatgtcgctgtcgacaagttcactaagtggcccgaggcttacccggtcatcaagatcgataagcactccgcgcttaaattcatcaggggcatcactgctcagtttggggtgcctaatcgtatcattacggataacggcaccagttcactagtgaactcttcggtgactactgcgaagatatgggcatcaagctctgcttcgcctctcccgcccaccccagaagcaatggccaagtggagcgcgccaacgcagaaatcctcaagggcctcaaaaccaaaaccttcaacatcctcaataagcacggcgactcgtggatcgaggagttgccagcggtgctctgggcgaactgaaccacgccaagtcgagcaaccggggaaacgcctttcttcctcgtctgcggcgcggaggcggttctcccatccgagctcaccctgaggtcccctcgggccgccatgtactgcgaggctgatcaagatcagcttcgcagagatgacctcgactacttggaagagcgaaggcggcgcgcggccctccgagccgcgcgctaccagcagagcctgcggcgctaccatcagcgccacgtccgggcccgatcactctgcgtcgacgacctcgtcctacgctgcgtccaaacgcgtgctggactgagcaagctctcaccaatgtgggagggtccgtatcgagtgatcggcgtcccccggccgggctccgttcggctggccatgggcgacggcacagagctgcctaacccgtggaacatcgaacaccttcgtcgcttctacccctagcgggggtcgggtgttaggtctcgggcttgggccaaccccgcacccccccgggcgtgccgggttggccgggggctaccac

SEQ ID NO: 8812 - DNA, 4421 bp, Oryza sativa
gttagggcacgggcgctgctggcgggctcggcgaaaagaaggaaaataacaggtgggtcccccctgtcagcgagagtggcgggcgggcccgcctgtaaccggcgcgcgcgcgcgcgggaacccgatgggccccggaggagaggagagagagggagggagagttggccgagccggcccaagagaggaagggggggaaagaagacttcttttagggtttttctttttataaaccttttcgactttgtttatttcttttcaattattatttgtgctctgaaaattccactaaaatttgagggctccttttagaccaaggagaatttaacaaaaattctccgggtcacatttgaatttttcttgtacgtattttaaggtttgccaatttcttttcgaattttaattaattctattattccttttaaaagatgatttttattttgggatgaatttatcaggacgtgacagtcggtactcttgtttatggctaggatgggttggaaactatgtcacgtcttccgtctgtataccgtggtggtatgtggcgcgtggtaacacgtgaggaagatgtgtcttgtgggtaaagatgtacacctctgatcagagtaaatctattcgaatagccgagccctcggatatgggcaagcctagcaatgtacccaagtcagtgttttaattcttaaaatttgctcaacaactaaaatatggaatggttggcctgggttggcttgggacgagctggaacccaggtcgggttgccagttcggtccgaatcatcgtaggccttgggttaaggcaggttcgtgagggttcacggccttgattaataatattgtgtagttctaagatcgtgtttacaaaatagccctgagcaactaaatgtcttttaaatgctgtttactgcaaaacttaatccctatattattattcccttgtactcccttgcatttattctgcatttgtgggtgtgtcttgttgagtacggtggttgtactcagtcttgctcaatttttcccaagtccagaagaggagctccttgaagatgaaggctttggtgtctagctcgtgcctgccgtcaagtgcctgtggtcgtcgccctagtattccgctgtttttcgttgtctttgtgtgctgggccgttgttgcccgtgtaataattatatttacgcttccgcttgttaaactctgaattgtatcaacttttggtgtaccttgcctcctgggacaaggaataatacacgcacgtcaggaacgcctgttgggtgatttccggtcgtgacagggctcagttctgcctgcctgtcccgggtatcccggccgtaggcaggagtgggtcggtactcttgtttatggctaggatgggttggaaactatgtcacgtcttccgtctgtataccgtggtggtatgtggcgcgtggtaacacgtgaggaagatgtgtcttgtgggtaaagatgtacacctctgatcagagtaaatctattcgaatagccgagccctcggatatgggcaagcctagcaatgtacccaagtcagtgttttaattcttaaaatttgctcaacaactaaaatatggaatggttggcctgggttggcttgggacgagctggaacccaggtcgggttgccagttcggtccgaatcatcgtaggccttgggttaaggcaggttcgtgagggttcacggccttgattaataatattgtgtagttctaagatcgtgtttacaaaatagccctgagcaactaaatgtcttttaaatgctgtttactgcaaaacttaatccctatattattattcccttgtactcccttgcatttattctgcatttgtgggtgtgtcttgttgagtacggtggttgtactcagtcttgctcaatttttcccaagtcaagaagaggagcttcttgaagatgaaggctttggtgtctagctcgtgcctgccgtcaagtgcctgtggtcgtcgccctagtcttccgctgtttttcgttgtctttgtgtgctgggccgttgttgcccgtgtaataattatatttacgcttccgcttgttaaactctgaattgtatcaacttttggtgtaccttgcctcctgggacaaggaataatacacgcacgtcaggaacgcctgttgggtgatttccggtcgtgacacggatctagcggaaactttcgaaagtctccgctccgcccgcataaaactgaaccccgacaagtgcgtgttcggtgtgcctgcgggaagcttctcgggttcttggtctctgcccgaggcatcgaggccaaccccgagaagatacgagctatagagcggatgcgccccccagcaagcttagagatgtgcaatgcgtcaccggctgcatggccgccctaagccggttcatatcgaggctgtgagagaaggcactacccctatttaagctcctcaaacgctccgggccgtttacctggacggaggaagctgagcgggccctcactcagttgaaggcatacctcagttctcccccagtcatggtcgccccggagccagatgagccgttgctactctacctggcggcaacgccgcaggtggtcagcgcggcgttggtcgtggagcgcgacgaggacaaccctcactccgcgcatccccaccctgtgtcgactcgacccgggagagagcagggaggagaggcccccgagtcgaacggtggcccaaggcccccgacggccggagctggccctctgcccgcttgtccgacggtgccaggcacccccgacccccaggatggccccggggccactgcgggaaggccgcgcctgtcgccctctaaccccgaggtcgtcggcacagaagccgagtgcgccccacgcggcctcttggacgaagagcgccttggagatgcggcccctagcgaagaggatcggccccgccgaaaggtgcagcggcccgtctacttcgttagcgaggccctccgggacgccaagacccgataccctcaggcccagaagatgctttacgccattctgatggcctcgaggaaattgcgccattatttccaggcgcatcgggtcacggtggttacgtcttaccccctcggccaaatcttgcataaccgagagggtactggacgggtggtgaaatgggcaatcgaactctctgaattcgatttgcactttgaaccatgccacgcgatcaagagccaggccctcgccgactttgtggcagaatggacaccagctcctgagcccgtctccgaccccgaggccagttcgggcccctcgcagttgccttacaccgcctactgggtgatgcagttcgacggctccctgtctcttcagggcgccggtgcgggggtcacgttgacctcgccgagcggagacgtcctcagatacctggttcgcctcgactttcgggcgaccaataatatggcggagtacgagggactccttgcgggacttagggtggcagctggactagggatccgccgcctcctggtgttaggcgactcccagctggtcgttaaccaggtctgtaaggagtaccggtgctctgacccgcagatggacgcttacgtgcgccaagtgcggcgtatggagcgccattttgacgggatagagcttcggcacgtgcccagacgggataacgcggtcgccgacgaactctcgaggctcgcttcctcgcgagcccagaccccaccgggcgcctttgaagaaaggcttgcccagccgtcggcgcgccccgaccccctaggggagacggacgcgcctgaacggcccccgaggcccgtcggagtccaggcctcgggacccaaggggagcgctcccagctcccttagattgattgcttggatcgctgagatccaggcatacctcacagataagactctacccgaggaccacgaagggagtgaacgcgtgtcacgcccagaaatttagcccaaatttccagactattttgtgtattaaatccctgtccaggaccagccagggtacacaaaacgacaagtaataaacagttccaaacgtaaataaagcgtaaaaatacttacagaagaggcacttagtcctcacaccgaaacaaaagcagcagcagcggaaaaaaaaaacgatcctagcggggcttcagctccactccacaggcaaaactcaactggggtctgagccttggtcttccaactccatcttcagctcagaagcactacacttctgaaaagggggaataatagcaagactgagtacaaccaccgtactcagcaagccacaccaacgatgcggacgtgcaaaggaacacaaggacggtttgtggctatttgcataaaggcggttgtaaaacattttattgagcaaaacagtaaaacagttgagtaattaaagtaacattaaatctccactgatcaacgctacaccacgttgaacaggcccaaccaacccacctggactacagtgtattgggtc

SEQ ID NO: 8813 - DNA, 3703 bp, Oryza sativa
  unsure (1)..(3703): unsure at all n locations
gttgcatttgtagcagcgagctccgaggatgacgcattgtctcggaaaccgatggaaaaccacaccgtgcaaccctccacgccatggtcgccatgtgctccgcgtgttttgattttgcgtgtttcttgagcagaaaatgcgtgccgccccagacgacaagctcgtgttttttttccccgttgggcttggcccattacgagccctcctataggctcggtgggctaaatagagcgtagagcccatgcaaaattcatctgtacatgtccgatgggtacgcgtatgcctgtagagtgtagagtagggataaaaacagagcggatacgggcggataatgctcataccatgttcgtttttatattttttgccatatatagaaacaaatacggataattttgaatatgaataagaattgaatatgatcggacacgaatacggaaataatttttttctcggaacacgaaaaccaactcaacttcttatagaaacaaatatcaacatatataattagctcattttatataaaatgtaatataatttataaatatattataaaaaggtaaataatattaatagtgtgaactagtgttaagatatgaactactgttaaaatctaaaaaagctatattaaaggtcatagatttataaaaaaataaggtatgtctcatggcttctgtagatatccgaataacactgttcactggatatccgaattattatccgtatccgatagaaaccccgataccatattcgtatccgtatccatgagaaaatattcgtattcgtatccgaactatctgggaattatccgatctgaaaggtatccatattcgttcttattcagagcatacagaaactatccgctccgtttttatcccactgtaaagtatggggtcgcgtcaacgagatactacttggctctaaagaagcaatagagttacagtcatttgaaagagctaccgagggacaggcgaataatttgaaagagaatatacatatttcaactttgaataccaacgatacaacatgtagtatatgtaagaaataccatggcctgctcacaagacctagtctaagtcaacactatactatgcatagaggtcaccccatcattatctatcagtatgtgatgtaaagtactaatcagatatactcccattgtttcatgttgtaagatgttttttttatcaaatatagtaatatttatattaccaaattagttttatttaattaatagttaaatatatttttataataaacttaccatgattcgaaaatattactatttttcctataaacttgaaacagtttgtctttaactaaagtcaaaacatcttataacctgaaacggagggagtatattactatctccatatcattttaagtgtagttgtaggttttggtgtccaacgtttaaccgtccatcttatttcaaaaatttatgaaaaaataaaaaaaatagtcatgtactattcatgttttatcatatagtaataacaataaaaatactaatcataaatttctcaaataaacctgtagttttcaaataaaacggatgatgaaacgttagatataaacctgtaaaactatagtctttttgaaagaggggtagtactaatagtatgtttatgcaacatttgtagttttgtactaccaacttgcctcctgcactagcctagctcacccatcccatcctcgagccaacgcaacaatctctgttagtgaaggccgaaagacagggacacctttcttgtattcctccgaaacctttacttgctcttgcaaaagaaaaagaaaaagacattttattttccatgtaccttcaccgtaattaacgtgtaccactacatgcatgcagtgacgacagtcagtagcgtgctccacgaactgcacccacacgattggtcgattcatttgaccagaacgggcaacccatcggccgcgaacagtataccaaatccagccatattaattaaatctcgctcttaattgcgaagcttactccattgaccgtggttaatgatccagtcttcaccaaaccgtttcatccattctcttttctggatttaaatctaagcgaaatcttttgaaacaccatcaaatcttggacaaaaatttgtgcgaaatctgtgaagttggtaaagttttccaggttnctttttcccccttgggggccttttttttccccccccccaaaaaactcttctttttacgcagncgcagcaagcaaaagccaaaaaaaaaaaagaaaagctagctgcacacactgacaagctcatcactccaccagccagcttgagctcgcccacttccgctcacaagaagcacaaccgcgagctaccacagcatcggatcgagggcgagcggcggcggaggcggcggaatgggagggccactcggcgccatcataggcaggcacccggcggcggcgggcggcggcgggggggatgagctgggaggtgtcggcggcggcggcggcggggatggcatcattcggcacaaccggaggtgccgggatttggccttcctcgtgctcttcgcggccttctgggtcgccatgatcgtcaactccagcttcggattcaaccagggcaacccactcaggtgaggtgacccgtgacccacccactcgccttcacctctcctctcctcaagattcgccgatctgtgctgtcggtgctgtttaatttcggttccctgtagctagatgctaagagcgttcatccggggaacttttcctttgctgggtggtgattaatgccgcggtacattttgagctgttcttcagacagcaacaatttaccaagaacggagcattttcaggtgttacgggctatgttccttgttggatgtgtttgggtgtttagtgcataccttcgcattcttgttggctcatttttttcgcgcggatcctggtcaattcttcaacttgatgtgttattttcaggctttcagtctaattgaactgacatagagtgagaaaatgagggtgccacttgctactatggaacattcagatgacttttttttaggctattaaatactttaatagcagatcttgcttatttcggaatgaaacttctagctcccgactttgttatttgtactctgaatcgaataatctttgcttgctttgtttcaacctcccaaccggataggtaaagaatcccatttttgctttgcaggagaaaaatgtgcctttagtggttactcttatatattagagttgtgtggtccttggaattgtattccctccgaaaaaaaacttacagcccagttatacaggatntgtgctccctaaaggcaattcacactacggttatatattaatagaaaccaaaacccactactgagtgctgaccaaaagaaaatttgtttagggataaaactcagtgctgtgcaacttttgcatggctatcattttactattattcagacactatgatgagtaaccatactactcctatttagtacatgctgcatgtgtatctaagtaatacagatgtcttatattgttttgatgacacaggcttacttatgaactagactacaaagggaacatttgtggcagtaggcatggtgacccggatttgcatgagcttgatgttagatattggatgaacccaaaccaggtgcaccacagtggggtcaaggacaacaagattaaccttgctgatgccaaagccatctgcctgatggagtgtga

SEQ ID NO: 8814 - DNA, 6849 bp, Oryza sativa
agattttcttttctaaaagactatataatcctatacacttgttaaattttgcaggaaaaaatgtatttggagagtctactcaactgagcgacatgtaggacaaaaaagctaaacaagtcatcaaagaaaaagaactaataggtatttatttgtgtgatatatgattaaaatcagtcttcccaaaatgcataaactcaaaattacataggcacacaactaatattacatatgtaatttcagtggaataggactgtaactacctatattttcagattttcttttctaaaagacaatatattcctatacacttgttaaattttgcaggaaaaaatgtatttggagagtctactcaactgagcaacatgcaggacaaaaaagctgaacaagtcatcaaagaaaaagaactaataggtatttatttgtgtgatatatgattaaaatcagttttcccaaaatgcataaactcaaaattacataggcacacatctaatattacatatgtaatttcactgtaattggactgtaactacctatgttttcagattttcttttctaaaaagactatattttcctatacacttgttaaattttgcaggaacaaaaaagtttggagagtcttctcaactgagcaacatgcaggacagagcagctgaacaaatcatcaaagaaaaagaactaataggtatttatttgtgtgctatatgattaaaatcagttttcccaaaatgcataaactcaaaattacataggcacacaactaatattacatatgtaatttcagtggaataggactgtaactacctatattttcagattttcttttctaaaagactatatattcctgtacacttgttaaattttgcaggaacaaaaaagtttggagagtgttcagtgttctcaactgagcaacatgcaggacagagcagctgaacaagttatcaaagaaaaagaactaataggtatttatttgtgtaatatatgattaaaatcagtcttcccaaaatgcataaactcaaaattacataggcacagatctaatattacatatgtaatttcagtggaattggactgtaactaactatattttcagatttgttaaataaaaaacttgcataaactgaaaattttatgaatattttcaggtttgtttacaccaagagttacctacagcccacaagcactacatgatgagttaacaatgctcaactcacaaacgacacaggttggtttttataaaagcattacaaaaatctatgcaattcatattaatttctattatactaacattgaaaaaattgcagccgggaaacatgtcctatactgaatctaatgcaacatgtcattaatagtccacgcgttacactacaaccttcccaggtaagaatatttctagttatattaaagtacatataatatggatcagtaataacaaatattgcaggaagggcaacaaaacttcacaaggttgtttcagacaccaacagcatatcatgtaagcaaaaaaaaaaggagcattgcctatattttgatgacatagaaagaaaaaaaaattatacaatcatgcacctataaaaaagtatacatgtactaattttgttattactaacaatgattaattattttaatcatgcagaactcaatgatctttaacaacaagcagattttccccaaacttgggaacaaatcatgcactgccaagcattgaatggaactaccaggaatttgatgaaatttacaacaacagcagtcacaatacttatgaggtaatattaacaacaaatttttccaaacttattaataaaaaactcattgctgtgaactaacatttgtttgaaaaaaatgcagatctcagaatggacaacaattgaagatttgtatgaattgaagaacacacatttcaaatcacaggtatatatatatatggttcaaaaataaacagttatattgacaagcatagaaaaaaaatagttaaaattaattttgctactaataaacatgcagggaaaatcaagcagtttcacaaatggagatgaacaaccagcaatatacacaaacaatgaacaggtgaaattgaaaacttgacagtgtaattagtagatatcatgcattattcataatagagcttacataatagtactatttaacttttgacaggaaattagtctatgcatacaagatcaacatatggacaaggagaatggaactgctcaagaaacagttgaagaaattcaaatacagcaaacagagcaacatgagacaatgccagaaagcaatgaaacatcaaattcagaacctaacagcagagaagaactaaatgaagaggatattgataatttcttgagaaatgatgaggatggcaatacacaaattgacaaaaagcacatacctgagcttggaatgaaattcaaaacagacaaagaagctcatggcttcttcaacttttacgcttatttagctggtttttctactgtgataactcatcactacaagtcaacaagtaaaaagagaaatggtgagattacaaagtatacatatagatgcaacttgcaaggaaaaaatgaaccagaggacaaaaatgcagaacaagaagaagaagaacaagaagaagaagaagaagaagaagaagaagtggaagaagaagaacaaatagaagaagcaacagaacaagaaaggcaaactaatgttcttaaaaagactggctgcaaatgtatgatgatggtggaaaaaatgtttgccctaggagatgtatggcaaatagcaacactagatttgaagcataaccatgcactttgcccaaggagagaggcaaaatttctgaaatcgcacaagaatatgacaataaaggagaaaaggctaataaggacattgaaggagtgcaacatacccactaggagcatgattgttatcctctcatttctgcgtggtggcttgccagcactaccctacaccaagaaggatgttagtaatgttggaacagcaataaattcagaaacaagaaacaacgacatgaagcaagtgctggcttatctcagaaaaaaagaaatagaagacccaggaatatcctacaaattcaaactagatgaaaacaacaaagtgactagcatgttttggactgacgggagatcaactcagctatatgaggaatatggtgactgcataagttttgacacaacttacagaacaaacagatataacatgccatttgcaccatttgtaggagttataggccatgggacaacctgtttatttggatgtgcattcctaggtgatgaaacagcagaaactttcaaatgggtttttgaaacatttgcaacagctatgggagggaaacatccaaagactataatcactgatcaagacaatgcaatgagatcagccatagctcaagtgtttcaaaacacaaagcacagaaattgtctatttcacattaagaaaaactgtagagaaaagacagggagcatgttttctcagaaatcaaacaaaaacctatacgatgaatatgatgacattttgagcaactgcctgacagaagctgagtttgaatcactctggcctcaaatgatgagaagttcaatttgcagaatgtgaattatttgaagataatgtggaaaaatagagctcagtttgtaccagtctatttcaagtatgatttctgcccttttatacagagcacaacactaagtgaggggacaaacagcagatttaaaagacgagttggaccacaacatagtgtaatgagtttcatgaaggaatatgagaatataaatgatactatctttgacactttgtacagcaaagatttccaatcaagaacaaagaagccaaagaccttgtggttcaactatctcattgaagagcaagcatcagaactatacaaccttgaaatattcaagaaattccaactagaactaaaggaaacattgagtttgcaagtatcagtgctacaacaaggtaaagtttatgaagtgtttgtgtcaccaaacagcatacagaaagaatatagaccaaggaagcatatagtcattgttgacttaccaaatgaaaactatagttgcatctgtggaaagttctcaaaggatggaatgttatgctcacatgtcctgaaagtaatgttggacctgaatgtcagaaaaattccagaaaaatacataattgaaagatggagaaagaaggaaaggaaagaaacaaaaaagcacatcatgcagaaagaaaatggagataattcagtcctaatgtttaatgtgctgtctaggaaaggagctgacatagcttcaaaagcatcaaaaagaaaaagaacatatgattaccttgtagatgaacttgacaagttggagaagaacattgacttaatgattcaacaggaagatcaaactcaattctcacaacatcaagacagtggtatagaaattgcaaatgcagagcaacaagagcaagaaaaagatgttcaagaagagcacatagaagatcctgatacagcaaatacaaaggggagaaaaccaaaaaggtatagaagaatagtggagaagataatagaaagttcaaagaagaaaattgaagaacaagaagatgcagaagaaaatcagaataaagcaaggcaaaaaggaataacaatgaagaaaaacaaacagcgaattcagcaaccaaaggtaatgctgaaaactaaagaaatgtcatgtacaatgaaaaaaagataaaataatactaaatatttaattgcaggaaaaagaaaggcaacagaagacaagggaacaaacaagaagcagaaatcaaaacaaggctgaggaagcaaaagcattggagacagaaaaaaaagaatacatatatgacttttatagttcatgtaataggactgaatgagttttatatgtgctacataagtttctgtatgcatatcatatactatgtcaaatagaaaactataactttatgatgaaatatattctatatacacatttgactagacataaagctaaaaatgctgatgtgtgacactattcaagcatcaatagcacggtgattgcttggaaaccttgcctgcaaagaaaattaataatataaaacatatcaaaatttgataaataaaacaagtgtataaagcattatttgcaaaaaaaaatttgtggtgaaaaaaagaaacttactgaatcaaaccaattgacaccaacattttcaacttcggtttgcaacatcttgttgtttggatgaaaaaacatctgattcgcatactgtacgcggatattgttgatattttgtccagtgaattgattagaaagaataattcttggagaccaaatttccatgaacttcattgagaatatgcctgaatcaaaactacaaaacataacaaaacaataactaaacttattttgaattttttattacatctgagcaacaaaaactgaatatcatttgagcaaacaaaaaactgaatatcatctgagcaacaaagaatctactggcataattataaaattatgtcactaaactaaatgcagattttggtggtcaaaaaccaatcaaaatatcatcttccaaaaacaatacaacctacaaaaatgccaaaaaaaatttgatttctcaaaaatcagtttgaatttttttttgaaatgacataaacatgcagcatctaatatatttcaattcaattaccaagggataatttatcatacaaatatcaataaaatattgacagatttaaaaactaacctgtattcttggcgtggaacaggtgggaacttaattttaaaagtgctgaagttcattggagtgcgttcatatttatcccacacaatctgcaaattttttaactgcaattcatacataacaataaaaataattaccagcaaattcattcatatcaatatagttgttaaaaagggaaaaaagaacatggaaataaaagtacaggaaaaacacattaccagcaaaggcagaattggttcaaaaaactcatcatctggttgatgcaatgaatctaaaaacaccagcatcctatcttttatatcaacaacgagaacaaaccagtgctgaccatgtagtatagggaaaaaaagctgcaaaaaaacaaaaacagaaacaacccatacagtaaaaataatgaattacaacaaaacaaaataaacataattagaatagtaaaaatcaataccatgtcacaaaggtgtagtggccgagcactagcagctccaaggaaagattttttcactttttcttgatcaacaaaatcagggtcaagaataagttgtgcctagaaaagatatattgtacaatcagtttggggaaacaaaagacataattttaaatttttttacaaaaagatgtaatgtacaaatcagttagctcacttacaccaatggatgggaagaaataatgcttcttagattttgatggatgattgttttgaaacaaaaagcggcagaaaactgacatgacaaatggcaaaacaacaccagtctttttgagagaatggccaaagctagaaaacttggctctgacattgtcgatatcaacagcatcataactacataataaaaaaatgaataaatagtaaattaataatagatataaatgaacaacacatttttaagaaaaaaatcaaaaaaaaaatacagatggcaaattaatctaaaaaaatggctgtggcaatgtttctgatgcttctgctacttaacttgtaaacaaagggttcagctgtaaaaatgctattaactgagttcagtggatgaaatctagaatcagacaaaaaacatcgcaaatactctaataatgaattatgctagcaaaagacaaatcagaacatatcatgacagagacatagaagcaaactgattgataaataacagaatagaa

SEQ ID NO: 8815 - DNA, 1697 bp, Oryza sativa
tcatatcgacctcccggtcaccttcggtggatccggcaacttccgcacggagcgggtgaacttcgatgtggcgaacctcagtctgccctacaacgcggtcctggggaggcccgcgttggtgaagttcatggcggcggtccactacgcctacctccagatgaagatgccgggccccggtggccccatctctgtccatggcgacctcaaagtcgcgcttgcttgtatggagcagcgcgcggaccacctcgccgcggcgtccaagcccgagggtggcgacgggaggctcagcacctccgtcccggccgccccgaggcagcggatggtcacgtgcgacgaggtcccggtcaaagaggttaccctgggcgacggcccgtccaagaccacacgaatcggtggtcttctggacgacaaataggaagacgcgctcgtctccttcctgcgggcaaacgccgacatcttcgcttggagatcggcggacatgcccggggtccccagggaggtgattgagcaccgtctcgccgtgcggccgggcgcaaggccggtccggcagaaagtgcggcggcaggccccggaacgtcaagccttcatccgcgaggaggtggcgcgacttctggaggtcggattcatccgtgaggtcatccatccggagtggctggcgaacccggtcgtcgttcccaaggcgaacggcaagcttcggatgtgcatcgactacaccgaccttaacaaggcatgtcctaaggacccttaccccctgcctcgcatagatcagattgtcgactccaccgcggggtgcgaccttttgtgttttctagatgcatactctggttatcatcagattcgcatggctagggaggatgaggaaaaaactgcattcataacccccataggaacttattgttatacgacaatgcctttcgggctaaagaatgcaggtcctacttttcaacgtactactcgaatttctttgggtagccaaataggacgtaatgttgaggcctatgttgatgacttggttgtgaagacgcgcaaccaagagaccttactctcggattgtcgcgtcccaaatcgactctaaaatctatcctcaaaattgtgcaaaagaataagtaaaattcaatgtgaaagcctccaacaattaaaatgtgcaaagataaaagtcaaatgaggcttggaggatttttgtatatttcctaaaagcctaaaatacttaaacaaattttagtggaattttcagagcacaaataataatttaaaagaaataaacaaagttaaaaaggttttataaaaagaaaatcctaaaagaagttcttttcctccccccccttccttcttgggccggctcggcccattccctccctctctctctctctttcctcccgcggcccatcggcctccccgcgcgcgcgcgccgctgacaggcgggcccgcccgccactctcgctgacgggtggggcccacctgtcatctccctcctcccgccgcgccgccgcccgcccgtgccctagcgccgccgccgccgcggattccgccgcatcccgtcgtctccgcgcgcattaaagagaggggaatcactccccgcaatcccctctcccgattccccctctttcccctctctccctccctcggattcgctcggaatcaatcccgcaaacctcgccggcgtattcaatggaccccagaactccgcgcccgtttcc

SEQ ID NO: 8816 - DNA, 7972 bp, Oryza sativa
gacaatttggaattgttggtttatggtggaattggacacacacttttcttcctctttcaaaacccttaaaacctgttttcggtggggtttgggtgcatgccagttgtggcaagtagcaccccgggcactataaggattaagctcgggcctctgttgcaaagcactacagtacttccacatgtctaatgggtaaggcttagtttgtggctcagtctagtcttaaacaaaagtacacggattggagatggatgaagtcgggcgtcgatggacattctccagggcaaatgaaggctacacgagctgcggcccggtagtcgagatgtcatacggcggagggttggtgcccaatgctaggggctcagttctgcctgcctgtcccgggtatcccggccgtaggcaggattgggtcggtgtcgcgaccgggaaaattgccttttcccgaacgctagtgtattaatccccgtcccaggaaaagccggggtacaccatacaaacatgatataaaagacacatctttattatatcgataatatttacattattacaaaggcacttaaggcctgacaatcaaaaataaacagcagcggactagcgggcctacggctccatcttcacaggcgctcaactggggtataagccaggactccacctaagacctctcctccaaagcttctcttactgaagggggaaaagattgagcaagaatgagtacaaccacagtactcagcaagccacaccggagaatgcatgattaatgcaagggagtacaaggagataataatataggggttcagttttgcagtaaacagcatttaaaagtcacttagttgcccaaagctattttataaagacgatcctagagctacacagtgttattaaacaaggccgtgaaccctcacgaacctgccttaacccaaggcctacgatgaattggaccgaactggcaacccgaccctgggtcccagctcgtcccaagccaacccaggccaaccattccatattttagttgttgagcaaattttaagaattgaaacactgacctgggtacattgctaggcttgcccatatccgagggctcggctattcgaatagatttactctgatcagaggtgtacatctttacccacaagacacctctccctcacgtgttgccacgtgccacataccaccacggtatacggacggaagacgtgacatagtttccaacccatcctagccttagacaagagtaccgacccaatcctacctacggccgggatacccgggacaggcaggtagaactgagcccctagcattgggcaccaaccctccgccgtatgacatctcgactaccgggccgcagctcgtgtagccttcatttgccctggagaatgtccatcgaagcccgacttcatccatctccaatccgtgtacttttgtttatgactagactgagccacaaactaagccttacccattagacatgtggaagtacggtagtgctttgcaacagaggcccgagctttagtccttatagtggccggggtgctacttcccataactggcatgcacccaaaccccaccgaaaacaggttttaggggttttgaaagaggaagagaggtgtatgtccaattccatcataatccaacaattccacagtatccaaatgatatgagaatttcccaagtctaaagttgtaaaaaccacctaatgttgcctaattaaccagcgaagcatctacctaagttcatactagtggaaccatgagtagagtgtccactagttgaggttttgtttaatctagggtgaacaaggtaataacaataacaataacaataataatatggtcgtaacaaagataaataggcatggctaaataaaacagtgacaacgcgggaatttaaataaagcgataatgcaataatttaaatcaacataattttataaaatgggattcaatatgatcaagatgatgtgtcttgccttgctcgctttcccaaacgacggcttcaacttccacgaagagcggatcttccgaagctgcggcgtctacacgaccaacggaaaaagaaaaagacttttactctaataaactccaaacaacaagcaggaacaaagcacaaaaatgggttctttacttcttaaggaaaaattagagacttgaacggtccaattccgagttcaaatggccaagatatggccatttgaagtttatatgctctttaaatggatatttgcgaatttcttcatttaaattttaattaaaaaaaacggattattgcgtcagccgagggaggggacgcgcggaccgggtccacggggagtggggcccacgcgtcagccccacggtccacggtggaccgggcgcacgcggctggcggcggtcggcgccgtgggtcccgcgcgtcagccgcacccgcgggcgcgggcggctgacggccgggcccacttggcagccgcgagggcgcgcccgagggcggcctcgccggcgcggccgacgggagcgacgcgcccgcgccccgatggtcaccgccggcgaccatcggcgcggcggagcggcgcccgagagagaggagggaagggggaaggcgaacggcggtcctcggctcaccccgggacaacgacgacgacgagaacggcggccggagcggagggagacggcggcgcggctcgggatgacgatgacgacggtgctccgacggtcggcgagcgaaacggaggcgcggacgaggtcgacggcgatgcggcgatgccgagggaggtgtcgccgagtcgggaggaggagcggagcggcggcggcggctaaccgaagcacggcggcgacggcggagagaaggtgctacggcgcgagcacgattccgacggcgagagtgagcggcgagcggcggaaacgaaagagcggagctcggggagggtttaaatagcgccgggggaaggaaagagcggccggagagggagcaatcgcgcgcggaagattcggctccattgattgcgccggcgacgattacgggtttgattcgaacgaatccgagggagagagagaggggaaagagggggaaacgggggaggggaacgcggggattaattcccccctcttgattgcacgcggggcggacgggagcggcgggattcgcggcggcggcggcgctagggcacgggcgctggcggcgggcgcggcgagaggagggagatgacaggtgggtcccacctgtcagcgagagtggcgggcgggcccgcctgtcagcggcgcgcgcgcgcgcggggagccgatgggccgcggaggagaggagagagagggagggagagttgggccgagccggcccaagagaggaagggggggaaagaagacttcttttagggtttttctttttataaaccttttcgactttgtttatttcttttcaattattatttgtgctctgaaaattccactaaaatttgagggctccttttagaccaaggagaatttaacaaaaattctccgggtcacatttgaatttttcttgtacgtattttaaggtttgccaatttcttttcgaattttaattaattctattattccttttagaagatgatttttattttgggatgaatttatcaggacgtgacaaatccaccccccttacaagaatctcgtccccgagattcgaggaggctagcaagaagataggttgggcggtcttctcttcttgtctgacttcttccgttgcgtcttgacgaacttccagcaaaactttaccactcggaactgcttggcttgacctcctgttgcggatggaatcttctcttcacctgacttggaccaggatgcaccttttggctgactcagactaggttgcggtagtccagtgatgcttccgttccagaacttctcatgattcatatcttcggagtcaacctcagacaagttaccacttcacgtcatgcgtcaacactagcttgtcattactaggatactatgtttgtcatcataagaatatcatgcttgtcattcacttctaacttgccatcaactgtctcatattagctttcctggtctccggtgctaggtacttctgctatgcgatgcgagggtcaaccactctaactataagttatgcttcccaagagaaccaatttatcccacttgacatactttgacgtctccccaaatagtcttactgctggacttcttattgtctgatcgtgatcctgccagatctgaagcttcgttgttagaggtgatcttaatctgacctctgtagactatcttcgaacatatcacttggttcataactgggaatagctcccacaaacaagcaactcagattcactttctttatgttcagtttactttccgctattctcttcatgttgtcatcagttagcactcaacgtattcctttacacctttaaccttgatgagttctttcccgttggatcatctcccaggacgtggcgttgcctggtaaccggtgcttgcatttttcactccgtgtagcatctgataccgagtggaagatttcactctttgccttcatagaaacacttttacctaggtcatcttgcttacttaatgacaaggtgactgttgcggggcaattacaatcaggggtcttccgtgagcgatgcagagcatgcttctgtttatcaatcacctttcggcctacttctttcatgctagagagcatctttgccaatcccttttatcaatcttctttcggcttatctctaacaggtggtattctttaatgtggattgcggacgcttctggggacgatgaggtcctttggcttgctgcctttcggtgaaaccttgatgtggttcgtcaaaaagctgcactgactaccttcagggaaatacattgcctgctatctgtatctataccactagggtttaattgccgatggtcatctttagtgcttcctcgagatggggagcatccaaattgttcttctgccacatcacctttgaccttgttctgataccaggtaaactaattaccaaccatcgactattatgttctcaaatattgatgtctcctggatctccttatctgttggcaggtatatccgatcttatcaacgtagaggcatgacgagtacccttcggggtttcctccaacaatccttatcttgatctgtaaaaggcgtatccgaactcctatcctcaactactgtctcgttggctttttaacccaacacagtttaattggttttcttttccatcaacaggttggttattaactcgaggttggaacacagttcctctgaaatgagaccctaggtctcctatgtcagtaaacaattatacacatgatcacatatccgcatctttcaaacgaatcctcatggaacttgtctgtattacacatttctccctcattacatgaatacgaggcactgccttaaacgaaaagggacggtgcttaacatcggtacattgtatcctcaacatgaatcatctctaaacatagcaagctcactgtttacagacatgattatatttatgaatttcatgattgctgcaaactttcgattacaccatgataagtagcggactgaaaaccacaaacatggctgctcattttgattctggagagatatagctggcattgttctagtgactgcatccttgattggttctgtgatgatgtgataggactgcataatgctatcattcacaggagaagcttccttctgattgttggttgcagcggatgacggtcttctgcttggtatcgccctccggaggttgattgcccttggctcggcctggagtaggtcggggagagacacaactccttccatctacgacaattctttgctgaggctgtcgttgcagagaatggttgctaagatttattgccgagtcaggtgcagcaggtggagcattggtgcattgtttctgctatgggttctgattaacacgaggccttacgggtacggcgtttgctccagtgaccacaatacgattggaatgtctgcttcgtgtaaattggcgaaaatgtggaggtcggggacagtttttggagtaatgcccttctccactgcagttgtgacaaacaataactttcttacactcgggttcttcatcttgtacttgatttctcagctgctgtattggagcttctaaaggtacaacgcagatactggcatctgtcttgtcagctggtggctggggctgaaattgagcattgacaccttgtggtagtgcactcattggaattggagctgttgcaacgcgggctataggactgcttcgggatgcatggatgaccattcgttgaggagcaagcttctgattgcagggagttgcgtggactgacgtgccggcagctatgtttctcggttttgggcacttgtcggcgaaatgacccattccttgacaattgaagcaacagatatcttcccggactcggcattttcttttctcattttgattcctctgtcctggcactggagttaggctgaaactgtaatcttggcgaggattggtgttgccttgatgcttctctccgttgaaaccggcgggttggttagccatcttcttcgtcagcagaaaactgaattgacaatcttttggtacatgatcagttccttcacaaaagaaacaagtgatcctgctcgttggacacctgtcgggtggatggtcttcctcacaatgaacgcatgtagaggcacacgagctggcaacatgtccgatttctccacaacgagagcatgccttacgttccattttatcctggttgaaaccttggggagatttctcatcttcatcttctgaggagacttgatctgaatcttcactatcagacactctacctccattagctaaaagatgctctgtcaactgtggtgcacctcggaaggtgtttcttctctgacgtcttgtcattcctggtggaggccattctgtgctggtaatgatcatcttacgaacttcaccttcggttcgcattggtgcttttcttttctgctgaggacagttccttgcgtagtgcccttgctcatcacacataaaacagatgatacttgcttcttttgggtcaacatgtggcatggcatgaggggccttctgggatgttggcggtgcgctgacttgtggtgtgagtgcttggactgcctccaactgcacctgaggttgcatctgactcgggttcaaaattggcatccgatgctgctgtagtatctctataagcaatttgttctggttaatcaggtgttggaccactgccgcacaactggtgtcttgtgcttcattcactcgggagcttgaggtaccaatgtcctgactcctgaccttattgcctttctcattgtcagccatctgttgcaaaggtttggagagggagagaaggaaaacgaaggggagagacagattagaaactaaggataggaccttaacagatctaagtctttggctgttatgatgtatgttaggcttattctgcaagttgattaagcaaacaacctagcatggttacatcaccacccaccgatgcaaaccacgcgctacacacacaagcaaggaaacacacgacaaacgaaacactagagggtggcttaggttctgcgacgggttctccaagatcttcactcctgcttcacagccggcttcactgcttcttccacttcactcgcagatcctgcagtcttctggaacttcggcaaacaactgacgatgtcctcttcttcactgacctgaccatctagtactagttgaaaatccgaagaaggaagaacggagtaaaccttttgcaaaaagcattgggggaaggagaaaagaggaactttcgcaaataatttttatttataaaatatgtccttaggttttatccacttggcttttcctacagtcgagaggtctgataccagcttgtcgcgaccgggaaaaattgcctttttcccgaacgctaagtgtattaatccccgtcccaggaaaagccggggtacaccatacaaacatgatataaaagacacatctttattatatcgataatatttacattat

SEQ ID NO: 8817 - DNA, 1387 bp, Oryza sativa
cgagggtggcaacgagaggctcagcacctccgtcccagccgccccgaggcagcggatgatcacgtgcgacgaggtcccggtcaaggaggttgccctgggcgacggcccgtccaagaccacacgaatcggtggtcttctggacggcaaataggaagacgcgcttgtctccttcctgcgggcaaacgccgacgtcttcgcctggagaccggcggacatgcccggggtccccagggaggtgattgagcaccgtctcgccgtgcggccgggcgcaaggccggtccggcagaaagtgcggcggcaggccccggaacgtcaagccttcatccgcgaggaggtggcgcgacttctggaggccggattcatccgtgaggtcctccatccggagtggctggcgaacccggtcgtcgttcccaaggcgaacggcaagcttcggatgtgcatcgactacaccgaccttaacaaggcatgtcctaaggacccttaccccctgccacgcatagatcagattgtcgactccaccgcggggtgcgaccttttgtgttttctagatgcatactctggttatcatcagattcgcatggctagggaggatgaggaaaaaactgcattcattacccccataggaacttattgttatacgacaatgcctttcgggttaaagaatgcaggtcctacttttcaacgcactactcgaatttctttgggtagccagataggacgcaatgttgaggcctatgttgatgacttggttgtgaagacgcgcaaccaagagaccttactctcggatctagcggaaactttcgaaagtctccgctccgcccgcataaaactgaaccccgacaagtgcgtgttcggtgtgcctgcgggcaagcttctcgggttcttggtctctgcccgaggcatcgaggccaaccccgagaagatacgagctatagagcggatgcgcccccccagcaagcttagggatgtgcaatgcgtcaccggctgcatggctgccctaagtcggttcatatcgaggctgggagagaaggcgctacccctatttaagctcctcaaacgctccgggccgtttatctggacggaggaggctgagcgggccttcactcagttgaaggcgtacctcagttctcccccagtcctggtcgacccggagccagatgagccgctgctactttacctggcggcaaccccgcaggtggtcagcgcggcgttggtcttggagcgcgacgaggacaaccctcactccgcgcatccccaccctgtgtcgactcgacccgggagagagcagggaggagaggcccccgagtcgaacggcggcccgaggcccccgacggccggagttggccctccgccagcttgtccgacggtgtcaggcacccccgacccc

SEQ ID NO: 8818 - DNA, 6456 bp, Oryza sativa
gcgcatcgagtcacggtggttacgtcttaccccctcggccaaatcttgcataaccgagagggtactggacgggtggtgaaatgggcaatcgaactctctgagttcgatttacactttgaaccacgccacgcgatcaagagccaggccctcgccgactttgtggcagagtggaccccggcccctgagcccatctccgcccccgaggccagctcgggcccctcgcagctgcctcacaccgcctactgggtgatgcagttcgacggctccttgtctcttcaaggcgccggtgcgggggtcacgttgacctcgccgagcggagacgtcctcagatacctggtccgcctcgattttcgggcgaccaacaatatggcggagtacgagggactccttgcgggactcagagtggcagctggactggagatccgccgcctcctggtgttaggcgactcctagttggtcgtcaaccaggtctccaaggagtaccagtgctctgacccgcagatggacacttacgtgcaccaagtgcggcgtatggagcgccattttgacgggatagagcttcggcacgtgcccagacgggataacgcggtcgccgacgaactctcgaggctcgcttcctcgcgagcccagaccccaccgggcgcctttgacgaaaggcttgcccagccgtcggcgcggcccgaccccctaggggagacgacgcgcctgaacggcccccgaggcccgtcggagtccaggcctcgggacccgaggggagcgctcccagctcccctagattgattgcttggatcgctgagatccagacatacctcacagataagactctccaagcgctacgtgctggtggaagggaccctctatcggcgcgcggctaacggagtcctcctgaagtgcattcctcgggaacaaggcgtcgagcttcttgccgatatccatgaaggcgagtgcggagcccactccgcctcacgcaccttggttggcaaggcctttcgccagggtttctattggccgacggctctcaacgatgcggttgacctggtccggcggtgcagggcgtgccagttccacgccaagcaaacccatcagccggcccaggccctgcagaccatacctctttcatggccgtttgctgtctgggggctcgatatcctgggtccgtttaggcgggccccgggcgggttcgagtatctgtatgtcgctgtcgacaagttcactaagtggcccgaggcttacccggtcatcaagatcgataagcactccgcgcttaaattcatcaggggcatcactgctcggtttggggtgcctaaccgtatcattacggataacggcacccagttcactagtgagctcttcggcgactactgcgaagatatgggcatcaagctctgcttcgcctcccccgcccaccccagaagcaatggccaagtggagcgcgccaacacagaaatcctcaagggcctcaaaaccaaaaccttcaacatcctcaagaagcacagcgactcgtggatcgaggagttgccagcggtgctctgggcgaaccgaaccacgccaagccgagcaaccggggaaacgcctttcttcctcgtctacggcgcggaggcggttctcccatccgagctcaccctgaggtcccctcgggccaccatgtactgcgaggctgatcaagatcagtttcgcagagatgacctcgactacttggaagagcgaaggtggcgcgcggccctccgagccgcgcgctaccagcagagcctgcggcgctaccatcagcgccacgtccgggcccgatcactctgcatcgacgacctcgtcctacgccgcgtccaaacgcgtgctggactgagcaagctctcaccaatatgggagggtccgtatcgagtgatcggcgtcccccggccgggctccgttcggctggccacgggtgacggcacagagctgcctaatccgtggaacatcgaacaccttcgtcgcttctacccctagtgggggtcgggtgtcaggtctcgggctcgggccaaccccgcgcccccccaggcgtgcagggttggccgggggctaccacatgcatatccttatcttttttctcttccgtatttcaataaaagcattttcgatttcctgaggactgtgtctgtgccatcgtttccttttgaagaatcttggcttgaattagcatgctcgtgcccgaccctgccctcagtggcccgggccggctaaaatcgccaaacggggcccagaaccgagccgtgccccggggcgtggtgaactccggggggggcatcggcaaaggcccacaatcgggtcatccataaccctcggtcaccacgttcctggcctggccagtctcgacacgcggatctccccaggcactagccccgacccgcgccgcatgaggttgggacctaggcacgagccctcgttcaagccaagacacagaaggaccgcggcacagaccatcctcatctcatacacacagcaaatgaaattgacacaaaaatttcctctttatttgattgcagattgaattagtttatacaggaagggggcccgaaggcctcagaagaagaaagaaaaagctatttaagattggcgggggcctgggggctcacgccaatgcgcccgagtcgccggcctcatcgtcgctgtcatccgcaccaccgtcaccgccctcctcgtcggagtcgagggcgaacgcgagccgaggggccgtaccctcgaagctgtggatgatatggtcggcggcgtcccgcccggcgtgcgcgcgccgcctctgtctcccggacggactcctcggcccggcggagtctggcctcctcccaaacggcttcctcagcctggcgagcccggacggtctgcagcttctcgccggtcagcttcccgcctccgggcctccgcggttgccgtctcctcggcctcagaccggccggacttggaatggcgggaagggcgcgacgggatctcgctgaggcagaagaaaaaccagaagacgaaaaacgggtgagtgaaaacttgccttgggagatgggagaatgaatacggccgcagtgggcgcggggacgaacctgcgaggaggtcggctaaacgaccaccttgggggggagatgaggtttccccggcatggttcggtcccccccatcttgcggagccgcttcttttttcgctccccctcgggctgcgacgtcggcacagcaccctccgagcgcctgctgctggcacgcaccgccccgccccctcggggaggagatggggagggggtatcctcctgtttcctcttcccccgggcgtcgacagggcggctgccccccgggcccccgtcacggggcccagaagcacgaccccctcccggggtagattgttcccccctgcggctcccgcccgcgccatcgtggcctcgaggagcccgctcccctgacgccccgaccgcctgcatgatggtcaggatgttggcgcgctctggaccgctgcagagggggaggacaccttggggaatgagggatgcctccacggagctgagattcagcacccgttggatcaccatcttgaagtcttcagggacccagtcccatttgaccccctggtgggtcctcatgtagtcctcggacccggtgtactcccaggcgccccgggcgcgccgctggagcggcgcgatccggcgacgaaggtaatcgccgtacaccatggcccccgtgagcccctgggatcgcagaccagccaggcggtcaagaacggcgtcgtagccgtctcccagatctaccggcacccgccagctggaggcctgcgccgggggctggctcggaagtcggaggcgcgcttcgtcggcgagaggggtgtagaaccagtcgctcttccagtcgtcccacttcttgcgaagaacgcagggaatgtagcggttcagcaccggcccccgcggctggaagtagcagccaccgactaccgacggtggcgacaccggctgtacggtgaagaaccaccggaacagccggagagatgggcgcaccccgatgaacatctcgcacaggtgcgcgaagatggccaacgtcattacagcgttgggggtggggtgcgccatctggagatcataaagctccagaacatccatgaagaaagaagagaatggcgggaccagccctgccattgcgaaggaaaggaagaatacggaccgccccgggtagtgtggcgccgggcatccctcgcccagcgcaaccacctcccggccggtggcagattccggcatgaatcggcgcggcagcccggcctgcctctcgctcacgatgcgagaaggcggcagcacgctaccgtcgagcggtgcggagccccgtgccatgacgccggcggaggaggggcttgagagcgagtgagtgcggcgagggtagggcacaggaaacgagaagttagagcgcaagcggcgaaggcaaggggaataatggcgagaggaaggaaacgaatctcttcctcggcgtctttatacccttgccaacgctatgcccggctcctcgcttcccgcgcccactatctcaccccctcgtttctcgcacccactcctccactaatcccgctcgcccgtttgcggcgcacgaggcggatgtgcggccgtggcggtcgagatgggacatatcgtgcgcgcgttaactacgctcgccgaccgatgcaccatcatcacatctccaggcgaaacgaaccggctcgtcccgattcgcgcgctactcaagtaatgtagcggtcttgaagaaagccgctcattattgtcggtcggttttcccttgccgatgcgcgcgatttgcgaccactggattcctgcccgcctgtagagaccggccccacctatcaccaggcctaaggagtggcgtcacgcccgagcgctttctcgaggagggcgatcgccctggcataacgccaggggctacagtcggtgacatgggaccgggggtatcttgactagatgttttggggcagccgcggtcacccacgtggcctgaccccctcgggggggtcgggcccgagggtgatgtggccgcccctccctctgtctccccgaggggtcgggccgctcccgtttcggccccgagggctggggcgccccgaccccctgtgggtttggcgccacgtgtgtgggttaggtgagcacagcggcgctcacctaaccgcgtttattgcgggttggacgagtgccccacgccgcatttaatgcagcgcagcacactcgttcggtccgtgacaggtcacagtgtgtgaccggtcacagaccggtcagatcgcgggttaggtggcaacaagcggcctttcgcacgcctcgccccgtcccgtcggaatgatgagagcctctaggcactcgtccctagccggagccgacgtgctaactcctggagtcagcacgtcagtcccggctagattcataccaggcttcatcgcaaccattacaaggaagtcattttatgaagaagggctgacgtgtggcatgctaaactgacgtgtggcatgctaaactgacacgtggtagacaagaatgaccggtttgtgactggtctgacgccggtcacgtcatcggcagacaaccgtgctcccacgttacgcctgcttccggccgagtggaggtaggtatggcccatcccatcggagggtcattcggacagcagccatggcaaatctccgcccattaatgagggagtaacagggagatccccggtgtcaggcgagtgatgacgctgggcctcactcaaagacaagctgtgatttagcttccaggcgaaggcgcaagccagtttttttttggaagatagggtgagtccccacccaaaagaagagtaggtagaagtggtgtatgtggtatccccttgagatataaaaggaggaccttgcccactaaggaggaaaagggaaaaaaagaagaaaaaaggaaaaaaaggagaggaagaaaaggagagaaggagaaggtggagaacacctgagctggtagaggagagaaagaggaagagggtctctagagtttgaactctcttgctctccagctctttgtaactccttcatacacagatccaccagaacacaggagtagggtattacgcttctcagcggcccgaacctgtctacatcgcccgtgtcttgcgcatttgctctctcgcgaaacactccacagatcgagggcttagaacctcacctagtgcccccggccgaaccggcaaaggggggcccgcgcggtctcccggtgaggagccccacgctccgtcatctggcgcgccaggtagggggcgcgcgtgtctttctaagccctcgtcctctttcgtgtgcgccaagcttctcccgctcagcccaatagccgaacgggcagtggcgcacagcctctctccgagcgctagcggtgacgacggggagcagaacccgcgccgtcgagctcgtactccaccgcccccctctcgccaaagtcttaggcgggaggaggcgctcgagggggtcgaaagatcc

SEQ ID NO: 8819 - DNA, 9101 bp, Oryza sativa
tctaaaatctatcctcaaaattgtgcaaaagaataagtaaaattcaatgtgaaagccttcaacaattaaaatgtgcaaagataaaagtcaaatgaggcttggaggatttttgtatatttcctaaaagcctaaaatgcttaaataaattttagtggaattttcagagcacaaataataattgaaaagaaataaacaaagttaaaaaggttttataaaaagaaaatcctaaaagaagttctttcccccccccctttttccctcttgggccggctcggcccattccctccctctctctctctctttcctcccgcggcccatcggcctccccgcgcgcgcgcgccgctgacaggcgggtccgcccgccactctcgctgacgggtggggcccacctgtcatctccctcctcccgccgcgccgccgcccgcccgtgccctagcgccgccgccgccgcggattccgccgcatcccgtcgtctccgcgcgcattaaagagaggggaatcactccccgcaatcccctctcccgattccccctctttcccctctctctctccctcggattcgctcggaatcaatcccgcaaacctcgccggcgtattcaatggagccgagatctccgcgcccgtttcctctctctccggccgctctctctccctcccgttgctatataattgctccccgagctccgctcttccgtttccgccgctcgccgctcgctctcgccgtcgaaatcgtgctcgcgccgtgctcctccctctccgccatcgccgccgagctccgttccgccgccgccgccgctccggactttctccttactcggcgacccctccgtccgcttcgccgtgttgccgccgaccccgtccgccgctccgcttcgcccgccgaccgccggagcaccgtcgccctcgtcatcccgagccgcgccgccgtcttcctccgctccgtccgccgtttccgccgccttcgctgtctcggggtgagccgtggaccgtccccttcgtttcccccttccctcctctctctcgggtgccactccgccgcgccgttggtcgccggcggcgaccatcggggcgcgggtgcgcgccgctcccgtcggccgcgccggcgaggccgccctcgggcgcgccctcgcggctgccaagtgggcccggccgtcagccgcccgcgcccgtgggtgcggctgacgcgcgggacccacggcgccgaccgccgccagccgcgtgcgcccggtccaccgtggaccgagcggctgacacgtgggccccacttcccgtggacccggtccgcgcgcccgccccctcggctgacgcaataaataggatttttaattgaaaaataaatgaagaaattcgcaaatatccatttaaagagcataaaaacttcaaatggccatatcttggccatttgaactcggaattggaccgttcaagtctctaatttttccttaagatgtaaagaacccatttttgtgctttgtttctgctgttatgtggagttatttagtgttaaagcctttttcttttccgttggtcgtgtagacgctgcagcttcggaagatccgctcttcgtggaagtcgaagccgtcgattgggaaaacgagcaaggcaagacacatcatcttgatcatattgaatcccattttataaaattatgttgatttaaattattgcattatcgctttatttaaattcccgcgttatcactgttttacttagccatgcctatttacctttgttatgaccatatgattattgtcattgttattattattaccttgttcaccctagatcaaacaaaaccccaactagtggacactctactcatgacaccactagtttaattctaggtagatgcttcgcaatttaattaggtaacattaggaggttttacaactttagactttgggaattctcatatcatttggacactttggaattgttggtttatggtggaattggacacacacctctcttcctctttcaaaacccctaaaacctgttttcggtggggtttgggtgcatgccagttgtgggaagtagcaccccggccactataaggattaagctcgggcctctgttgcaaagcactaccgtacttccacatgtctaatgggtaaggcttagtttgtggctcagtctagtcttaaacaaaagtacacggattggagatggatgaagtcgggcgttgatggacattctccagggcaaatgaaggctacacgagctgcggcccggtagtcgagatgtcatacggcggagggttggtgcccaatgctaggggctcagttctgcctgcctgtcccgggtatcccggccgtaggcaggattgggtcggtactcttgtttatggctaggatgggttggaaactatgtcacgtcttccgtctgtataccgtggtggtatgtggcgcgtggtaacacgtgaggaagatgtgtcttgtgggtaaagatgtacacctctgatcagagtaaatctattcgaatagccgagccctcggatatgggcaagcctagcaatgtacccaagtcagtgttttaattcttaaaatttgctcaacaactaaaatatggaatggttggcctgggttggcttgggacgagctggaacccaggtcgggttgccagttcggtccgaatcatcgtaggccttgggttaaggcaggttcgtgagggttcacggccttgattaataatattgtgtagttctaagatcgtgtttacaaaatagccctgagcaactaaatgtcttttaaatgctgtttactgcaaaacttaatccctatattattattcccttgtactcccttgcatttattctgcatttgtgggtgtgtcttgttgagtacggtggttgtactcagtcttgctcaatttttcccaagtccagaagaggagctccttgaagatgaaggctttggtgtctagctcgtgcctgccgtcaagtgcctgtggtcgtcgccctagtcttccgctgtttttcgttgtctttgtgtgctgggccgttgttgcccgtgtaataattatatttacgcttccgcttgttaaactctgaattgtatcaacttttggtgtaccttgcctcctgggacaaggaataatacacgcacgtcaggaacgcctgttgggtgatttccggtcgtgacaagttggtatcagagccacccttgaccctaggacgagccgtagatccccaggccgtagctatattttcaaaaaaataaaaatcctttattatttgtgaaaacccgctattctctcttgtcttgctgcttcatttatcgtcaaaatctggcctttaaaatgttgcttttctttttgtttgtagatggccggcagcgttacccgtcgtggtttgcacatgactggcttcgtcttggagctgcggggcatgtgcgtggtcttggggtatccacatggagtggattaccaggccaggccgctcccggagcaggagggtgaggatgcagagcctcacgctggttgggaggtcactgcagtgattctctccggctctcccgagcggacttcgctggcagtcaccgcgggtggggattccttccccgccgcttgccagaacgccgctctcctcgccatcggcacccttcaccagcgctacccggacgagttgcagcactcgccctaccgctaccaccctcgtcgcggaggagcccgcgactacgccaccttccgagacgccagctcggaggatgacgctaccgtcgtgcatctggcacgcatggtggaggcgtacgacgcggctcgtatcgacttccatcagatggtgcgccgtggcatggtggagaacaacatgaagatcctggagctgcgccaagagaatctgcagctcaagaaggacctcgacgcgttggaggcgcagctgcatcagctcaagatcgcccagggagaggacagccgtcccaagcgtcgccgcgtctgccgcagccagaagatcaccgcccgcaagagcacctccaggcctgagcttgtccgtcagtccctggcgtggacctgcttcgtcgagacccctcgtgccgagcctgcgcccgtggttccccaggagggggaagcctccggcgttggtagctcggagggtgcgctgttgctcaccttccgctctggcccgtcgcagcggtagacgagcagttagtaggcttgcgcgtgtgtttttcctcgtttgtctttttgagttgtgtggggcatggttatgccggtgtgtggcataactatgtcggagcctgtcttattttgtttgcctaagcaacttgaacattaatgaaccaatttaatatcagtaataaatttaagaataatagtagtcgtgggtggttagttttatttgttagctccttctctgtttgctggttctgggtggggttttcagatggtgacgaccaggagaaatgttaacaccggtgaaggcaaccaacccgaaggcagcaaccccaaccaccaaggcaatccacctccgccaccaccaccagacaccaacgccattctcacccaaatcctcgcccagcaagctaacctgatgaatgctttcctccaccaccttcaaaacccgccacaacagaatgctcccccaccacctccccaacactctaaactcgccgagttcctccgcatccgcccacctaccttctctagctccaacaaccccgtggatgctttggattggttgcatgccgtggggaagaagctagacacggtgcagtgcagtgatgaggagaaagtcaccttcgccgcccatcagctgcaggggcccgcatctctatggtgggaccatttccaggccacgcagccagaagggcaacctattacttggactcgcttcaccgccgctttccggagaacccatgtgcccgctggagtcgtggctcttaagaaaagggaatttcgggagttgaagcaaggcaaccgctccgtgatggagtatttgcatgagttcaacaatctagcccgttatgccccggaggatgtgcgggaagatgaggagaagcaagagaagttcttggcaggaatggaccccgagctgtctgttcgtctagtctctggggactatcctgattttcaacgactggtggacaagagcatccgcttggaagccaagcacaaggagctggaatcgcacaagcgccgcttggcgaatttccgcaatcaacagggtgctaaccagagggtccgctacaccaatccctacccagggggatcctcctcgcagcagcagcagcagcagcaacctcgcccagcgccccgacctcaattcgtggtgcgcgtcccacagcagcaacagcagcagaatcagcaggggactcgtgcgccccgtcctcctacgccaactgtgcagcctgttcaaggtcgcagggacgcttcaggtccgcagcgtctgtgcttcaactgcttcgagcccgggcactttgcggataaatgcccagagccaaggcgtcagcaaggccaagcgcctccccgctccaacaacggcgggaaggatgtcattcggggtcgtgtgaatcacgtgacggccgaggacgtgctgacaactccagacgtcatcgttggtacgttcctcgttcattccatccctgctacaattttgttcgactctggagcttcccactcgtttatatctgtgccattcgtggggagaaatcagttgggggtagaaaggcttagaaaccctctgctcatcaccacccctggaggggttatgacagcaaagtactatagccctgccgtccctatagaaattcaggggattccttttccctcggatctgattctgctagacaccaagaatttggatgtgattcttgggatgaattggttggcccaattccaaggggtagtggattgcgcgagacgcactgtcactctgtaccgaggaccagagcaaccggttgttttctttgcacctccaacctctgtcagaagttcagaactgcatcagataggtctgtcagaaatccccatagtcagagagttcggagacgtgtttccggaagaactacctggtatgccgcccaagcgagagattgagttccggatagatcttgctccaggaaccactcctctgcacaagcgaccctaccgtatggcagcaaatgaactagccgaagtaaagacacagttggaagaattgaaagaagaggggtacatacgtccgagtacttccccatggggtgctcctgtgatctttgtagagaagaaagacaagacgaagaggatgtgcgttgactacagagctctcaatgaagtcaccatcaaaaacaagtaccctcttccccggatcgatgatctgttcgaccaactcaaaggtgccactgtattctccaagattgatcttcgttccggatatcaccaattacgtattcgtgaagaagatattccgaagaccgcattcactacgcgatatggactgtatgaattcacggtgatgtcgttcggcttaaccaatgctcctgccttcttcatgaacttgatgaacaaagtgttcatggaatacttggataagttcgttgtggttttcatcgatgacattctgatatactcacaatcagaggaagaccatcagcaccatctccgtctggtattgggaaagctgcgggaacatcaattgtatgccaagctcagcaagtgtgagttctggttgtccgaagtcaaatttttggggcacgtgatatctgctaaaggagttgctgtggatcccgaaacagtgaccgccgtcaccgattggaagcaacccaagacagtcactcagattcgcagtttcttgggtttggcaggatactaccggaggttcatcgagaacttctccaaaatcgctcgacccatgacacagttgttgaagaaagaagagaagtttgtgtggagcccgcaatgcgagaaggcgttccaaactctcaaagaaaagctggtttcctcgccagtgttaatcttgccggatactcgcaaggatttcatggtgtactgtgatgcttcgcgccaaggattggggtgcgtgctcatgcaggacggtcatgtggtagcctatgcctcacgccagctacgacctcatgaaggcaactaccctacacatgacttggagttagcagcggtggttcatgctttaaaaatctggcggcactatctcattgggaaccgatgtgaaatatatactgatcataagagtttgaaatacatcttcacccagtcggatctgaatcttcggcaaaggagatggttagaactcatcaaggattatgatgtgggaattcactatcaccctggtaaggctaacgtggttgccgacgctctaagtcggaagagccattgcaatactctcaacgtccgaggcattccacccgagcttaatcaacagatggaagccctgaacctaaacatagttggtcgtggatttttggccgcgctagaagcccagcccaccttgctcgatcaaatccgcgaggctcagaagaatgatccggacatgcatggactcctcaagaatatgaaacagggtaaagccgctggtttcacagaggatgaacacggaaccttatggaacggaaagcgggtatgcgttccggatagcagagaacttaaacagctgatacttcaggaagctcacgaaagtccttattccattcacccgggcagtaccaagatgtacttagacttgaaggagaaatactggtgggttagcatgaagcgggaaattgcagagtttgtggctctatgtgatgtgtgccagcgtgtcaaggcagaacaccaacgaccggccggacttctccaacctctccaagtgccggaatggaaatgggatgaaattgggatggatttcatcaccggccttccaaaaacccaaggtgggtatgattctatatgggtaatagtggatcgattaaccaaggtagctcgattcattcctgtgaagaccacctatggagggaataaactagcggagctctacttcgctaggatcgtgagtctccatggcgttcccaagaaaatcgtatctgataggggaagccaattcacctctcacttttggaagaagctccaagaagagcttggtacccgactaaatttcagcaccgcatatcacccgcagacagatggacagaccgagcgtctaaatcagatcctagaagatatgctccgcgcatgtgtcctagatttcgggaagacttgggataagagtctcccctatgccgagttctcctacaataacagctaccaagccagcatacaaatggcaccatatgaagcgttgtacgggcgcaaatgccggacaccgctcctgtgggaccaagttggggaaagccaagtgttcgggactgatatcctgagagaagctgaagctaaagtcagaatcattcgggataatctaaaggtggcacagtctcggcagaaaagttatgcagataaccgtcgccgtgatctggaattcgcagtggatgactttgtgtatcttcgggtcacgccattgcgaggtgtgcacaggtttcagacaaaagggaagctcgcacctcggtatgtgggtcccttccgtatcatcgctcgacgcggagaagtcgcttaccagttggagctgcccgcctccttgggcaacgtgcatgatgtgttccatgtgtcgcaactcaagaaatgtcttcgagtgccatccgagcaggccgactcagagcaaattgaagttcgcgaagacttgacttatgtggagaagccagtgaaaatcctggacaccatggagcgcaggaccaggaaccgagtcatccgtttttgcaaggtccagtggagcaaccacgccgaagaagaagctacttgggagcgtgaagacgagctgaaggcagcccatcccgatctcttcgccagttcttccgaatctcggggtcgagattccgtttaaggggggtaggtttgtcgcgtcccaaatcgactctaaaatctatcctcaaaattgtgcaaaagaataagtaaaattcaatgtgaaagccttcaacaattaaaatgtgcaaagataaaagtcaaatgaggcttggaggatttttgtatatttcctaaaagcctaaaatgcttaaataaattttagtggaattttcagagcacaaataataattgaaaagaaataa

SEQ ID NO: 8820 - DNA, 5386 bp, Oryza sativa
ggcggcggcggtagcgtgcacgggtcccctgacattaggaacgtcatctacgagcgcctggtggcgattcgcaacgaggaggccatctccaacccttcctccttccgcgttgagctcgaccgccacttccttcgcttgcccgaaaggtagtacacatacgatgcttctcgcctgtctctcagttgttttgcttttctcgcctttcaaagtgcaatcttcttgcctgtgcagctatttgatcgatctggatgtcagcaaggcagagcaagtgctgctgcaccggaggattctcgccgactgcgccgaccctgaaaagcgcccaatcttccatgcccgctacataggggtagactctggatcaactccaactgaaaacggtaatggtgggggctttctccctatcaatttgaggtataggtcaccaactttccaatgcttttatatatatatatatatatatatatatatatatatatacatacatacatactttactagttgaggacacagttgatttcagtggagtgtatgtacctttcttttcgtgttcggaatggtatctctttgtccaaacaaaaatgcttcttcttctgtaaatatcaagccaacttatcagtatatctttcgtgttaacatcgattgtgcctgtgaatattggacagagatgatgaattcacagaatccgagccatatgaaaggatgatggaagacctgagtctagagagaggaaaaggtgtggatgacttcgaagccagttctgcaaggtatttttgttactaagctgttgtgctgtgcgaatgacatatctataccataataacaatcaattaatccggaacgtcagtttcaggtttcaaccatctggttcgatctaaaaactgcaagaatgcgaaatttccatttcatttgtataaacatagattatgtttccagaagggtgctaacttgactgaaaggttgttctgtccataaaacaacactgtgttcctctttggtacaaagcttccgtcatgatacttaagagcaacctttatagttggtgttactgctccccgcaaaaaaaaatagttggtgttactgcagttatatgcaatcaggctagttgctctaatcagccttgtttgaattgttgagttttgtggatatgagcctttgctctctacatcggtgcacaacagttctcatataattctttgaaatgattagtaacgtcttctttgcctattctttttatatggacttctttctgatatccagactagtttagcactcatgtattatatgctttcttttcgtgaaccattctcttaatttgcctgagcaatcatctttaatcattttttacatgatttgtccataaccattctcttaattttgcagaagggactcgaaattcgtccgtgttcatgaaattattttttcttccatagacaagccaaagctcctcagtaaggcaaggccatgtactttgtgatttctatttagagacctccatacgaataccacaccttcttgtgtcaccgcttgaactgtgagatattgttttacagctatccgcgatactgtctgatattgggttgaacatccgtgaagctcatgtgttctcaacatcagatggcttttgtctcgatgtgtttgttgttgatggctgggatacagaggtaaacttagagcatcgtcatggttatagcttatttttttcacacaattacagaactctacaaattatgtttcgaacttttaatcatgactacttatggtgggaaaccataaaattagataatcagattgttaagtacactatgcttcaaggtgttccacaaattaaaacattgcctaacactatgtgcaggaaacggatggtttgcttcagaagcttatagaggcagaggcaagcagccatgtatggttcttcctatttctccatttaatcaacacgattgcttgaaatttaaaggtgtcttgctggttaggaagtcaacatgcttgcaagttacctcctttttgcattaaatgcagtcctgtaaatactctcaagtcagcattacaagacttgaagaaatgaatatgccatccctatccttttcctttacagaattgaacttcttgtatgtagggctcattgtctaatccgacaaatttgtcacaatcagagaaagttctagagctgcaggaaaagataggagattctgaattcgacaggagtttgctgcaaattggggagaaaattgcatccggatcttctggggatctgtaagaaacatgcaactcttattacttaggaataatgaatattaggaaagaacggaggtagttatttagaacaacaggtacaactcaactgctagtgtggattgcatgacctttcttacatctgtttacaagcaaatggtttcacaagggggcactatcaacaaatagtcacaaagctagttgtgttctgggtttctgatttcaacttgtggagacatattgctgtgtgcattattctatattttttaatgtttctagcaagatcagcagttcattaaccaagtggtcttgtttgtatcctcggctgcagatatcgaggaacttatctcggtgtggatgttgcagtaaaatttcttagatctgaacatgttaacgattcttcgaaagtggagttcttgcaagaaataatgattttaaagtaagctttcttttgaaatcactttgatgcatagacttgactttgaatcatttaaaattccagataattctaatacagtgaagtcatgtccaggagtgttgatcatgaaaatgttgtccaattttatggagcttgcacaaagcatcgaaagtatctcattgtaacaggtgacacaaatattgctgataatcttgcctgctgatttttttcgtaggaatcaaaatccttgtttctcaagattcagatagcagtgcttgggcatatttacaatctgagtagcgttggtggctaaaagattgagctcatgtctgggtataaccaatgtgcttggtttttcatctccagtttccttggcatctaatgtaaataactgttgattgaacatttttagttttgcattttggtgagcgtcattaggtggaattgttaaaaacaaaaaatctcgaaagacgggggataactcctgtcttttatccattttggtagggacttcaagagcagctaagtctataggagggatactgtaaccattacatttgcttgttgcgtccatgcataaagaattctacaccatgatggaaaatagtgcaagatatgtctggtcagaagaatattgctactctattcctatcaacaggtctctacccacccttcaattagcctgtgaattactactttctaattcatgcatgtgaaataagtcttcgttcctaatgagcacacaaattttcattttctaaattaccagccaaatttctgtattgtttacacatcacatgagtatttttttctattattgtattgcaaggcgatgagttctgggcccctagctgcaaagttcatatcagactcatcctgtatagcacctataaataaggagatgctatccatggatttataagatacatgtatcatccacacgttttaacttgacattagtttattgagattactcccattgcataattgattagcagtaaggtattggttgtccaatcttgctgttaattaaatatttagatgttttgaagagctttattaggagggtgttaattcattttactgcaagtgaacttgtgttcagaatcccaactaaactcttttctagtcacttaaaaaaagatatttgtgcatcttctttactgaatcatcgtattcacatgggagtttggttcaaatatttcgtacagtctagtctttatttattcagaagatgacaagaattatactttttttagataatggacaagaattgcatggatagtaaataaataattacttatgtacaatactgttattctgttcccttgtcatgccataggatttcttacataatatcaagagccagcgatctagatgagttaagttagtagtagtatcattgtagccatgagatcatttatatatttatcttactgcttttttagggaaaaaaatgtttgtatgtgtcagttccgatttccaactttccaagggtgcactctgttttcttgcttcaatcccacaaacgagcataggccatggattgcttgtttgtatttttatgtattgagttttccgaattgatcaagtcagctcaatgtagagcatttatctatctagggtatctattatcgggcaatttcttttctgcgattatttcatgtcaactgatattttgctttgttatttgtgtgtctcatccagagtacatgcccggaggtaatttgtatgacttccttcataagcaaaacaatactttggagcttcctgttgttcttaggattgctattggtatctcaaaaggaatggattatttgcaccagaataatatcatccatagggacttgaagactgccaatttgctaattggctctggtcaagtatgcatattgtttcgaagttgcttatcaattgaaggatgtcgaagcactgattcaattcttaataggtcgtgaagatcgcagactttggtgtctctcggctccgatctcaagggggagaaatgactgctgaaactggcacgtatagatggatggcacctgaggtactatgttgatccttttgttccttatcctctggtgtcccttttttccctttattttcctttctgattactcgataagacttttgtactgcaacagaaagtcttttctgtttgctaatgataagttcagtttcacaagcccatttcaccaggcttaggcacatatacagatgcatgatgcactattttactgttttcacatgtatgcatacacagactacctgactatgctgtccttgcaagcatgttggcttacatattgatcacgcttgcatttacttactgcactgattttttggatcagtgtgcaaaagccatacttagaagagttatgcaaagctaagacaatatgcatgtgcaatgtacttattagaatcgcgtgtgttaccaggtaataaaccataagccttatgaccataaggcagatgtcttcagctttgctattgttctatgggagttggtcactacaaaggtaacctgtggctggcaaggcattgtgtgacgttttcatagttctcaatttttttaacagcagtgaactatggtcagatgtaataaccactaatacatgtgctatgtagataccatacgaaaatctgacacccttgcaagctgcactgggagtaaggcaggtatgtatttgatgccaataagctccaacataacacattggatgttaaaaaaagtaa

SEQ ID NO: 8821 - DNA, 8209 bp, Oryza sativa
gccccccccccccctcccctagatccggccggatctggagcggcgggatgggtggccggccggcggcgggatgggaggccgcccggtgagtcttttttttgattttttttatttgtggtttggatgtttttatctgtgattgaatgtatgaatctgtgatgtggtgactgagtatgtgactcgatgttgtcaatgaacctatgaatcaatattgtgaatatatttgtgatgttgtgaacgaatatgtgaatgaatttgtgatgaatctgtgaattgtgctgtggagttgtgatgtggatttggggttcaatttgacgatatgcataccactcgattcggaagaaaataaaaaaaaagcagaaaagaaaaaaagaaaaaaaaggaccagctagactgccgctaccctctctttaatcccggttggtgttaccaaccgggagtaactaaagatcgatttttagtcccggttttttcacccgggactaaagatagcgatctttagtcccggattggtagtcccgggttgaaaaccgggactacaagggggttacgaaccgggactaaaaagcacttctccactagtgagtgcaggcgccatgcatgcatatatgcatgacatggcatgccttcccaatggcacagcacagcacttatatatagcggtgtcggatgagatggaggcgcaccacactcattctcccacaagacaaacatagccttctctcttcctgtacccactcgccattacacagtgcgtcctcctccatccgtattgcactccccctagctatagctatattactcaccttctctctttaagcctgtctagtaggagtagctcgttagctacatataggacgtatagctaaggtttggttagcttggttaattgttagctggtgcgatcgatggccggcacggcggagtcgccggcgagctcgtgcgtgtcgtcggacgcggaggaggaggcggcggtggcgaagccgatggtggtggccgggtgcccgcagtgcctcatgtacgtgatgctctcggaggaggagcagcagcccaagtgcccacggtgcaagagccccgtgttgctgcacttcctccacggcgccgccgccggcgccggcgccgccgccagcagcaagccgccctccaagacctagctcctccatatccggttctcaatctctcccagatggtcggccgccgtccgtcgtcttaattctaacgcatccatgtattatgtttaatttttctctctcgatcgctagctagctgtagttccctttttctagtagtagctgttatgtttttttctgtcattcgatctgtgtgtctttagttaatctgcacctcctctgtagcttggtcgatcgatcaggttaattttgtcaaattagcactattagctagctagtagctagaccagaggatcaagcatgcatcatcccttcccaaatgatctcctactccgtggtgcagttgcatgctttaaccatcctattaatgaatctgccatcattctcaattgttttgcttgttacagtattagttagttgcatatgcatgtgttcttaacgatcgagcgatcgatatgatccatttccatggtttggtttatgtcttttttccttctactatacactgatgaagcaggtttccattaattggagaaggtggttaatttcatcgtctctcagttgattgatcgatcaatcgatctctgctgctgctgcgttacgtacgtactttggcttaattgtgttagctggatggaaaggatgcgtgatgaaaaatcaacctccagctagctttagctagtcaggggacgggaaaataaataccagtagtgatgaatcaaattaaagtagagtcgaacttatggtagatggatggggcgatcgatcgtatcatgaaaaacgtgtgcccgttttaattagagatcaagtggagagtagagtatatggacgcatggaatagcagctgatgaatatgaatgaattgaaaatgaacagagctataggccggcaatcattaggggcagttgagaggaggaattattcggggcttagcatgcacgtcagttcgtcatcaagaacacatttatacccaccgtccttctttcttcttttcttcaggatatttacgagttcctttttcttggcgtgatttctgtgtgcgatgccagaaaaaggccgaatcggtcagtctgagactgaacctggacgctgaccctgaactgcagaactgactgggccgatagattcgagaggatgaggcatgcatccacgtttattttcttccttttcgacgcgtccgtttctactgacaaaaaggagcgctgccatccgggctctgcccacgctgaaactatcaacagatcacgctgaaactatgaacagaccatcagatgctcccagggaagaagccagctaaaagctttggtttgtgcatggaggggagagccagcgatcgactttatcctgtcactgaatttgcctggaggatgacgttagaatgtggagggaagagataatacgttagtttttttttaaaaagaaggataatgtaaaggtgtccgcaaaataaaatgtaacagaaaatggattaaaaatgaaaaactaaaggattttgttttttagtttcttcaatagtggatcaaaaggattaaagaataaaaatactgaacgtaacgatgcagcggtggagtcagatattagagcatccccagcagctactctaaccgatcctccatccttcatttggcgtatagaaggggaaaaacggctccaacagatgcgctactaggcactccaaaagtgacggatgcgccaaattaggagagagagaagaggcaaaaatggagtgtctctcctctcacgcccttttgcaacagccgcctctctcgctccaatccggacttcagcgaccatctccctctggcgtgaccccacctccatcgccgtcgtccccagccggcgaaggagagctcccttgcccgtttttgcttttttttttcagcgaatcgtggagagaggcgtactagatctggaccgtcgtccgccgcgtggccgctgcttgccgctggcgtgcgcgtggtccctcgtccgccgccgtcgccctgtgcgtggcctccgcttcgccagctgccgcccctcgccagccgccgtcgcccggcgcccaccgccttcctcctccgccgcttgccgccgccacccctcgcccgcttctcctcgcttcctccccgcttctcctgcgccgcttctcgagagttcgagtgaacagtgaataagaagataagggacatgtgaaaaaataaaaaataatataaatggatggtagttgaagtatatactattaaaatataagaggatgagatatagagcatgtaatatgaatgatctgttggagttgagagaaatataaaggagaaatcttttttaaatgaccatctaaataggcatatggaggatcgaatatggatgagctgctggggatgctcttaaatgttatggctgagttgaggctcaactgaacaattgctggtttcctctaaaatttacgtggtgatttaagagacttaaacttgattttgaaggtcctagggagccacccccacattgttcatacggtatattagttttttttttgttagaactttcatatagtcatcgcttatttctctatcacgctccccttcctgcacctaggagatttcctatggtaaatcaccatattgatcttctgggtcgtcacactagtaaaacgtttttcactcccagaaggggaagtaaaccctgcacctgcacgcaccctcttgaaaaccgattatagaggaggaaggagacagtttaacaagtggagagatggcaaaacacaggagtttgtgtacatgggatgtttggtattcctttcgtttcatattacaactcatttgactttttttatatatttttttaagtttgacaaaattatcaaatttatagaaaaatattgtagtattttttaaaaaatattatcaaactatattcaatgttagatttaataaaaactaatttcatattttaggtattattaaatctttttataaatctatttaaacttgacaaagtttaattagaaaaaagacaaatgatttataatatatttataatatgaaacagagggagtttgtatgagatattggagccgttgatgtgcaagtccaaccctcaaataatcagtggggattgtctgcagtactacacatgcagtagcagccgctgatatatgggaccgagtccacctatcagccactgccactgtaaatgcagcattgtagagcatccatgtcccccctgtaatagcccaagtcgcctggcaccgacgaacgaaaaggaaagccgaaaaggatatatgaatgcaggctgagggaggggacagattcgggcgggccggccggtgcgtggattgcacgcacgcactccctccgcaagtggccgcacccacaaaatcgccctcctttttatccctcccgcccacgctctcacacccgccggcttctccttgtctctgctctccacacgcggagtggaggagggattaatcggaagcatatcaatcggcggccatgacgatcggcggcgcgtcctccagcgtcgtaggtacgcaacgcatgcgcccgaaccgatcattccttgcatatcttggatggatgctgggttttgattgattgattgatccatcatatcgcagtagtgccacgcaacttccggttgctggaggagctggagcgtggcgagaagggcatcggcgacggcaccgtcagctacggcatggacgacgacggcgacgacatcttcatgcgctcctggaccggcacaatcattggaccactcaacgtacgtacgctcgcaacccccccgctgtgtacatatatatttgcattgacatcctgctgcagattgatacttctcatcgatcgaccacgcatgtgctcactgctgcatttttcatcatctggttggttgcattttcatctgggttgttgattggttggttggttgcagtctgtgcacgaggggcgcatctaccagctgaagctcttctgcgacaaggactaccccgacaagccgcccaccgtgcgcttccactccaggatcaacatgccctgcgtcaaccctgacaccggactggttcgtatgctaaaaattccctccctttgttgtttaccaccaccacctgcccattgcacatgccaccacttcaattccctcatcttggtattattactcattctgccttctaatgaccaacgggtaaagcacacaggaatatatattctgccagcaaattgattgctgcccacctgaacatgctctgattttgcaagtttttgaaagaacttgcactgattgatgttatacatagtactgtttgatagtagttgcttccaattagattaacggtgtgcttagttcacgttaaaattgaaagtttggttgaaattggaacgatgtgacggaaaagttggaagtttgtgtgtgtaggaaagttttgatgtgatggaaaagttggaagtttgaaaaaaaaagtttggaactaaactcggcctaaattaaagttcagcagcaactgtaaatctgaaattctgatgaatgttgaagtaccacctataccatacctttgtttataacatactgatcctctgcatacttgaaatgctgctgactgcggcagcaagatctatgaactgcgtcactgcatgcattcctgcatgtcatgattcctttgatacgcaggaaggaccgaaggatgtttgaatcatattgctgcctgcacgctagtgtctgaattttgccaggaaagatcttcagtttcaaacagatagacattctaatgctgaagtgatttcaataggttcattaggttgtaatgatgtgattgtttcactggaaggttactgaatttcacctgaaaacactgcaaaattatgcagaaattgataccatagacacatatagctagaaaggttcagaatgttagtaagttattactgctagtacttaccaattcaattacaatttaaacctgtgggttctgaattctgattacacacgccttaatgagatggtgagaattgattgtaatcatttcactttacttcatcaggtcgaaagcaagaagttccatatgctggcaaactggcagagggagtacaccatggagaatatcctgacgcagctgaagaaggagatggccgcgccgcacagccgcaagctggttcagcctccagaagggaccttcttctagtcataccgtgagatgttcgagggcatgttcctgttgctgctgctgctgctatatactcatataggattggattgctatctctgtccatggcacgcaccgttcgtaactatcacctgcccccaaatctgtcacctgaaaggtagtagtactagatgtgtatgtagtgcagtgttgttggtaattactgaatcgccttgctaatgcctaatggctgccctgcttgctatcatatgcatgccaatgtgaaggacaggtttggcttggtttgaacgctgagagagattgaataacacgagacctcctgtatctggcaccgtatagactcctatgatttatgcatgtgtgttaagactaacaagtattttatcccggtgccattttcttggcgacatgggcacctgcccacagcccattattagcgggctcgtcggcttcaattttgggtgggaaatggcatggggctttctgatttgggttggcacatgtctgaattcagaattccgcacgaggtagttgcaagcaggttcagcccattttagtactacggctgtgttcttactcatctcactcgtttttcgcgcgcatgctttttaaattgctaaacagtgtgtttttttaaaaggtttctatacaaaagttgtttaaaaaatcatactaatccattttttaaaacaattagctaatacttaattaattacgtgttaatgaaccgtttcatttttcgtgtacactgttcgggttgggaacaggtggagcgaacatagccgtacgtactaatataaaggcaactcatatgttagagcaagtttaatagtatagccaactactagctccaattcatctatagccaatctaatagctcattcatacaatagttatatactatactattaatacatggtcccacatggtatacacatactgtatcttggagtctgtgctacagctgactacaaatctgtagcccgctgctcttctctctcctcattatcttcttaaaatatatttgcagctggcttatagcctgcaattgtaccttctcttatagaaggaaaaaaaaagaactcaaaagctgtgatgtgggctggaagctcactgtcactgtaggtcgctttccggatgtggaaaaggaacagagcaaacgaacgagtcgagccgccgaaaccaataccggatgagccatcaatccatcatatgcaccggaccccaacgatacgagatgcgtaggcgcagtcaaagttggaccgagttacgtacactagcagtagccaggatatgattgtttgcttgatgtgagaaaaataaaataagtgcccatttgatttataggaaaaatgtaggaattttagaggattacaattctatggaaaaaaaatcctatgaagacctttgaaacaaaggattgaatcctatccaatcttttaaaattcctatggaatggataattctatgcacattttggaggaaagttagcaagagatctaacctcttggaacatttcctctgagtatatctctcttatgtgattcctgcgtttttactgtggtccaattaaacggtcattcctgtgttttttctctgttttgtaatcctctgttttacaattatattcatatcagaatcctgtgttttttctattcctcggtttttttcattcatacgattcaaagtgccataatcagaaataatgcaaggtaatccttccgatactgtctaccaaccacggaagacgcggatgcataagtgggagtagtgtagaaggaccggccaggaggaagaagactcaccaaacgcgaacgccgacgaccggctggctatttcgttgaacactagcacacgcaaggaacggaatatactcctccaagtgtttcgcatggacggtcaagtcaattccggaggcctgcagcggcatctgcccccccccccc

SEQ ID NO: 8822 - DNA, 5267 bp, Oryza sativa
cggcaaaggggcaagccccctttctccccctccttttccccttttcctcctcgccggcgtcatcctccctgtcgccgctttggccacgaccgccgagcgccagctcgcgcccttgaccgcgcaagtcggttcccaaaccgacattgccgcccctttaaacccccagcctcccctttcccttcctcttccattcgtctccgctccattgccgccgcccccgtgctctgtctcgcctccgccgtccttcgccgagcgccgggagagccggtgcgttcgaggacgcggaaggggactccgggcgtgccctcgcttcttcctcttcctcggcccgaggccggagagattactcccgcgccgtcggcctctcgtcacagcgcccctcctcttctcggtgatgcctctctccgttcttcctcctcgctccatctcccccctagctttcggtagtagcttgagtagcctccccgtagttagccggcgccgccccgaccgttgccgtcgctcgccgtgtgctcgccgccgtcgccgcccgagctccgtagcccccgctcgtcgccagcctcgctcggcgtagttccgcccaatccgacgctagcgtcgagttcccgaagccgcgtggatgctctcaccgccgggaatcgacccctcgtggcctcgtcgccgtttccctcttctcccgccgccggttgccgccgccgcaatccgccgccgtcgagcaacctccggcgaatccgagccgttggctcgtctccccttgtcacgtacaaccacccggtgtgctcgcttttgcccgtatcgccgtggttcactccgccgctcgccgtcgccgcccgccgtccaatcgcggccgggtcgtcgtctacctcccgccggcccgcgaggcagccacgtaggcgccacgtcggcgccagctcagcctagaccgggtcgagccgaccccggtcagcccctccccttgcgcgcgttccaccgcgagccgagaggctgcgcgtgggcccgccgcacccgcgtccaccgcaaaccgcgcgcgtgcaccgcgtccctcccgcgcccgcgcgcgtgcgcagcatgctcccacacgcacggtgagccgagccgctgacaagcgggtcccacccgggaccgcgcgtggtgagccctgtccaccggcccatcactctctcctccccccccccgcgcgcgctgtgggccgccttttgggccggccggcccattaagctcagccgagccgccccaaatctcttgggccgcaccctagccgcccgagaaaagtctatattccctccccctttttttttgcttttctttttcttttccaaaaaggatttaattaaatccttttcctttagaccaaaaatccaataatcttagaaatacaatatcttcccaaccgtaagtccgtttgactccgttcaactcccaaaattcctcaaatctcgagatctatttaatggcatgcttagaggtcattaatagggctttattttcgccgtttgttgagttgtcccgtttcgcgtgtagtttcggagcccgaagacccgcagtgcgaggatttcgaggatcaagctccagatctcgagcaaggcaagccacctttgaacatcttgagcctatatttgaaatctaattatattgcttgaaaaatattatgcattgataggatcgcatttaatctgttgtcccgtctgcaaggcagattggcggacttacctaacttgttgcatttgatccttccattgttaattgctacaccatgtccccttgtaactacccagttgcacctcgatattcgtgcactctgtgcgagtatcgacggtcgccttcaaacttaaaatctgagtaacaacttgggtaaaacttgggttttacaaaagattggaaaacccgacacctgggtcggtgcttgcgaactaaatgaatttccaaaaccgcggaccggggaacgtaccgggtgtacggtttcccgctcttgcacttaaggaccgtttccttggaatttcatccgaacataagacaagtacgaccacatgggtagaatgggacacccctggctgagtaactagcttatcaggggagccttgatgccgagagacatgtggattcgccggggtggtgtcagggaggacccctgggcttcctggcacagtatggtctgggacctaacctgttgttggtctgggacccctctcgtcggcatatggtaaacctgtgtcggctttggaaatgccttgtcatgaaagcttggaggtctcccgacgtggctgatccccacgggctgggtgatccgggttagtaatgtcgtgtgggtaaagtgtaccccctctgcagaggttaacaaactgttcgaatagtcgtgcccacggtcatgggcggatgtgaggtgattcctagcgtagttttgtttgactactgcttgtgaaattgctgttgagaaaaggggttcgatgtttgaaaaatctgtagctgatgagatcagctaggcccgggtggccgtttgaaaagttgttggcccaggtggccgtttgaaaaagctgttggccgggtgccaaccttgtttcaattctaaagactgatacattgcacatactccgaccggacgagacgcactgtctcatccgtgtcgtttgagaagcactcacttagttgttttcagaaaatggttcaaataaaatcaattgctaaaacaacagccttcccttgaagcctgcaataaacaccttatttcccctggcttgctgagtactcccgtactcacccttgctctatataaataacccccccccagttgctgaagaagatgaagcggatccggctgatgaagagttcttccaagagcaacccggcttcgatgagttttagggtttcggcctagttcccaagtcgcgcctgtgatgattggtccaagtcctgacttccgctttccttttgtaatgcagttgtgagctcgggatctgtccgcagcccaacatgactgtacttctactctataataaagagacctctgttgttgtgatattctgtctccctgtgataccagcactgtttcctgggactggtatcgattaacaggttaatttggagcgtcacgggctagttccggtcggtactagtttggggcgtgacaatatgtttgggcaaaagtctgccgtaaagacttatggtatcttagagtttgttagagataatagtcgtgtccgttatggacgtatcttgtaattctcagatataagtagacccgagccctatgtaaaaaaaggactcatccaatacaatctcagcgcatcgccaccctttttattctatatgcttgatctatgtgttaaatctgccctttatgttaggatcttgtcgcatctagatatattagacttctgtttggtatattctacttgctttaacatcttaatatagagtggtatcggagtattagccgatgcatgctagatacatttgatcggctatgatataaatgtatctaatcccactattaatatatatttcgatctaaatgatttatactgtctcggcaaggcgaccgatctatcccaatcacttgatttaaatatatatcgatataaggattatatatcattaatatctacagccgatcgagtagatttagttatgatttgcttattgatatttgccgatcgatgtacgtatgacatcggcttgaaataaatgatatgtcatcggcacctagccgatcggctatcatttataggattaattgcggtttttttgttctatttcttattgattgcaggatcaaatcaactggcacgctcatacacctgaaggcgagttttggacctgcactggagttgagcagatctcccaggcctcgtgttttctatcaacagcggcggcggtccctggcgtagcgaattgatggcgctcgctggtctcaggcatgtggatcgatggtggcaacgtgtctcgggtagtttcatcttggcaacgacggcaacaaccgcaacttggcagcgatggcgatgactgtggtgagggtgccaaatcggcgacatagctgactattgcagaggggatttggggaatccgtggttgtgattgtggtcttggagaaattgcgtgaaaaggaaagtttgggaggttttattttcgaaaaatcatctccatagacggtcggcttaaccttgttgcttgcagaaatcggcttaatagccgcttacaaaaaaatgatttttttgggggttaaagccccgcctataaaaatcatcgatgttcacacgtttttgatcgcaaggtagggacgtatggcctcatgcaaacacgtgttttgcagtagtgtatattgggtactgatcgacaggtaggctccttgtcacgcgtactcattttgttctagccgtactcgtatatatgtggtccaatgacatctatttttggataatggaaattgtcgacgggggatacccgtagaccagatatagagggtattggggtccgttgatacgaggatctacgtagtacgacatcaagcaaacaaaagacaaggattatactggttcgggccccttggtaggtaatagccctaatccagttggtatgggattatatgatggaaaccacataatacaaagggaataacagaactcgatgataccgacgagaccgtagtcgagttagtccgactagatctcccggcgacttggctcctgtaggccccgactccgtaggttgtggtgggtatattggcggtgatattcgatattcgatgccttaggtcctgcccaaggggtcccttatataccgcgggtcagttaatctccaagtagaactcggagatatcggacccctcacgatatggtaaaaacccaacctcatccgagtaggactacttccattcgtagattatgtttctatcacgggatagatttccttaacgtatacgaaaactatccgtacacgcgcgggtataccgtatcggtacccatcgtatatccaaggatagagggtataccttacccgtaaccctgacagaaatattttacatttttgtttctaccataagacaaagacgatgtagaaagaaaagttaaaagacatttccattatccaagaaaaagatgacatttgtctttgtctgccataagatgctggtctgcccgaagtttatataaataaaaagacgatgcaaagaaagaaaaataaaatataaagtgataggataaattctcaactcccctattgactaactttaagccatgtagatttttcaaagccggccgttaagaaagaaagaa

SEQ ID NO: 8823 - DNA, 4691 bp, Oryza sativa
atatatatacacacacatcaggtgtggctcgtgtgccaccagattcaatttgattgagaacttgagatccgcgcggttaacaaagacaacaactagcttacacacttgtgagcgatggacaagaatctcacctgccgcgggcgcttcaggtatgtaaactcatccgatatttcatgcaaagaacataggtcatgtaaataatattttctccatctcaaaatataaaggattttaggtagaatacatgaatctggacataggatatgtcacatccatccaaaatctcttatattttaggacagagagaatactatgtattaaagataattttagtgatccttttgctataataatgccatctaattagtaggttatgtgaataatactctctgtgctgaaatttaacaatttttagctctctatttgaacaaaactaaaatatattataatttgaaacggatgtggtactactgtgtataaaaagatactgtactatgataagttgcatgaaaatctaacactagtatgaggcttcgtagtttgcgcatgcaagtcgcggagggaagtcacgcgcaggttaattgacacgagtcagactccctgttgtggtgcagcataacggtgtttcttttccagaagtcaaaccagctagtttttcgatttaatttccattagcactgctttctgaactgcaaaataattccaatatatttttttagaaaatcatataatttacttttgaaaattataatagctaatattcccttcgtcctaaagtatagcaagttttgcccaaatttatagctaaaacttgctaaaccttaggacggaggttgtaattaattatcactaataggttttttttcgtttcgtgtacggctgaaaattaaatctcatcctagctgcccatacgaatgcatgcatcggccctatgcatacccacgttgacgaaagcttttaaaaacttcatttgaaagtttgaaatttttagttaaaagttcaaatttttggtaaagttttcaaaaaaaaatcatttttttccaaatttgagttggatgtttcgaaaattgaattgcaagttctaaaacttaagttgaaaggatcaattttgttggtagaaagtttactttgaatttttctaattcgaaataaaaacttttagttgaaaagtctttattgaaagttttattcaaattttgagagagcttagaaataactacaaaactatatagaattcaaaagctattcaaactttcaaaatagaaattttaaataatttcccatctattctagccacttaatattcgtcccataaggcccaaaacgcggcagtagccatgtctcgcgtgcaaaaaacacgttgagagaatcctgttcgacatttttgttgcgagtcgcgacgcgcgcgcgcaaattagttcttctgaacaaaatgcatgttgaaaagcatatccaacatttttttgtctcaaaaaacacggtatgattagatttgtcttttttgatattccctccttctctaaatgtttgacgccattgacttttttaaacatgtttgaccgttcatcttatttaaaaacttttatgaaatatgtaaaattatatgtatatataaaagtatatttaacaatgaatcaaatgataggaaaataatcaataattacttaaattttttgaataagacgaacggtcaaatatatttaaaaaagtcaactgcgtcaaacatttagggattgagggagtatatgatatgctttaagtttataataaatgaaaccacatcctctctattttcttatttcctctctcaattttcttgttttttttttcagacaagggaagactggttttaagattaagaaaaagaagtttaggctatgtgttcgcgatgagcatggcacctgggtctgcagtgaacatgacaccatggctaaaacaacgtcactggggcgcgaagtatcgctgcaactggaaaaaatgatactgggggattactcctcaaaacttaagatgttaggtatgcttaagtggacaacttttaaagaccagcgatgcggtataaatcacttgataaaaaatattaaaaataaactcaaacggtacaagtatcgtcgattggaacgaggaatcttctacttgacaccatctgctacagtgaacagccatttataccacatgccactcaaagaagcattggtgagaacaaaactagatttacgaaggcgaaaggaagtattagatagatacaatagctcggagggatcaaaattccgtagtggtgcaatggtttcacctatgaccaagttgtcgatatgcatcctgtcttcggtgattttagcttatatgatagtattcttttaaagttaattgatgtactgtagagtgtttgtaacttgtttatatcattgtgaaggcaagttctttcttctatttaagttgaattgcagcctataaatcgaacacctaatctcccctatttatggatttgtcacgttgggcatgtttttatctcacacttagcatagaatgtgtgcctggggtgtttcagacgaaacatcagtagcccccatcctggcaaatcacactaaaatagcatttcatcggtaaaaaaaaaagtattaggaacgacagaaattttgggttaggccaaaaacaatatcttcggtacaagaccagactacatgcaccaccaacatgctcttttcacaagaggtactgcagtggcacacgccattaaaacaacagcacatcattggtcagattgtgcgtcaaagttgacacgagtagcaaaatggtttatcgtattgggtgcagcttttgaagatctaagcattgcaacctgcaaaatagatcaaaatatgctatatcaaatgattggcccaaaactccagacagtttagtaaactcaacttttcacatagaatgggaagcccctaatactaccttaggactgttcatattgcttccgagataaccaacaccaaatgaaggggaggaataggcagcaacaagttcagcggctcccaatgcagatacctcccctctctgcagaatgttatattgttaaatcaaagattatccatgcaaaacccaaggagacgtatcagcaaagtaccacctttagaacatcagcctgaattagcaacaacccagcgcctgtatcatgagacatctcgctgctgctttgaaccgcttggcgcagaactttggtacaagcagaagcagggccagattgtatcctgagaaaatacaaattgagttccaaccaaaagagaatatgatgttgaatgtaacgaaattatggtaatagattatgtagaaaggttaggagtccataagcatggactgccctagatcatgttatggccaacaggaatgacagaactggctagatcaagacatcaagtgacggcaaacaacagtgctcaaactgtagattaagatagcaaagctgaagccagtgtaaatatgatgcaagcagtcctacatgtttgcaaattcattgaggctgaatgacatggtgagaattgtatagtgcagaactgtatatcaataagagcaaatttgtagagatgagcatacaatgatgatgagatacaacattcacgtgcagcaaatcctctaatcaagtgttcaccggctccagttgcacaacacccaactataaacggtgtgccaaagggccctttggatgaggcccagcacccagacccatacatagcagccaaaccaacccgtccatctacctgcaagaaaccaatgcttattgaaggcctggggaatctctatgcaaaggcatcatacaagaaatataaataaaagagtcctcctcaaacaaatttaagtatcatacaatgaaaaaaatgaccactggacctttagtgcaatgccaccactggatgctcctgatgctatatttccataagcatcaacacaaacagcaccaacagtatccatcacgcagtcttgatcatcctccatgattgatcgtgtgatcatcttcatcttctttacaccagtaatatcctcagcttcagctcctaaaatgaaatggcaacatgtgatgtggactggccaagtacgttattacatatactgatgcacacagaaagcacaagcaaataatgagcagtaccacaagcctgggacctagtgctgcatatttgagtgttgaattatatatatttgaaaggaatctcgtacagacattagcatctagatgaccgtttatggaggccaaaaatcatgcagatgaacacaagagaatgccggcatacagaagaacacgcaatagcatatgtagcatagacaactattggaagaccttgtgaaaaggagtggtgtgcatttgcatgaatttaacacatatacgagaataaattaaactgcaattaagttttagaagatacttcaaccaaagaagcgttgtggatatgataaataaccacttaatcaatatagaagtgattagagatactaacacacagatgaaataagagcaacagtaagggagaaaaaagacctggtgcttccaactgtactgaactagattctgaaccagaaccagtgctatgattaactgattccttggcacttgcaagcaatgatctgtattttccccactgtgcttttgcactctcagtcaccaaccactatttgagaatataccaagaacggatttcaaaacaagt

SEQ ID NO: 8824 - DNA, 11215 bp, Oryza sativa
cagcatatacaacaagtgaacctatagcaactgaaccaaggctgtaacgcaacaaccgcttcattgaagaaacaactgtaacaaatggtatgtcatgctgcataggaatagctcaaatagtcagtggaaaggagaagtaaactaactgctaaatatagggtaaattttaagtgcctcaattcacttacagatatttcaccacgtgcccaatagtatgaagcaactgatccagcaatcacggttgaagagcaagcaataaagaattgggttgcccagtaacagccaaataagtggaaaagaatggcaataccaatatgaggggtgtaatggatgctgtacccacagcagttgtcacagtttactttgcccaacttcagatcatatgagcaacaatctgtattgcagtcatttcggagaacttgaccagagctgaagagatggagtgtggcagaaaaccagaacatataaaagatagcgaggataaagtatggcacaactgggaaaataattagtgcctgaacttcaccaatgaccttcgcagcaacctgaagataataatttatcaggttagtgcttaggaactattaactatattcttgccttcaaagaggaggaatggcattgatgctgagtgtcttcaaaaccaagcttctgcttatacagtgtataatagttagctaatcaagcttgtacatccaatgattcacgtaccttcaggacaggtgttgctatcagtatacgacggataatagctatggaggtcagaaatgcaataatcattactactgtcatcaccactgtagcagcatgaaggtggcttatttcctagtaaaagaatgaacaatcaggcacaccaattgggaaaaaaggggccccggtattgaaaaagtcaaaattggtatactcaccccccagttatgtggacatatggatcactttcgccaattacaactgttaagggatcattgcctaaccagccagctgaattaaaatgtagccaattaggatcgtatgtgtgtaacatgttaaatggcatacaatggaatttcccttgctatattttggaattatgacatgcaaaattgaaccatacctttaatataaaaaaacatggtaacagagattactagagcattgaagaccactacagttatccatggcatggcagcaacaaaataacgaatcagaagcaaccagataactgacaagaaaagagggagcagtccaccgcaaacaattaacacaggccatgacttcccaatgtcagcaacgtatctctgcagacaaaggaaatggtaattaatatcttcaaagacaaaatgggactccagtgctatatgaatgatattgcatcaggaatttctcagaataattcaaaatgcatatccattttagttgcaagaaagtatatgcttctttcagagcaacggtgcaacaaaattcttttgtaaggataaaaagtattgctgtggtgtaatgtacggtcagtgttagctataggaatagctgggccacttttcacttccaacgtaaatcagaaatgtttgcgacaacaaaaaaggaatgtgcaggtaataaaacagtgccaggaagtttacaaaccttcaagactgaagatttagaattgatggccttgtgtattgttttatctatgagaatattttcgtcgatgttgataccacccatctgctgccaatgcttcaaagagacattggatgctcgcgcaataaattggcagctccagtagactgaagggaacaaagattttggatcagctatctcatcattttaacttattgcatgaagaagtaaagcccttaatttaatccatgctcacatggaagtagtacagactgagcaaagattaccattcacacttggaaatatgacagggtagcatggaccctgcagctgaagagaactatttctcatatctggtgcgagaaactcaaaataatcatagtccctgttgatccaatcatcgatagagaggcgaatgtccccttctggataatcacaaacaaagtttaatccgtctgctgctggaatggggcactccatcaggcagatggctttggcatcagcaaggttaatcttgttgtccttgaccccactttggtacacctggtttgggttcatccaatatctaacatcaagctcatgcaaatccgggtcaccatgcctactgcacaaatgttccctttgtagtctagttcataggtaagcctgcgtcatcaaaacaagataagacatcagtattactaaatagtagtttggttactcatcatagcgtctgaataatagtaaaatgatagccatgtaaaagtcgcacagcactgagttttatccctaaacaaatttcctttggtcagcactcagtagtgagttttggtttctataatatataaccgtaatgtgaatttcttttagggagcacaaatcttgcatagctgcactgaaagtttttttttttttgagagagagagagggaatacaattccaaggagcacacagtctcactccggtgctttctacttggagtagaaagtaatctggatcgttgatctcatttaatccaaggtttcaagattatttttactaccacctctcttaacggtagtagaatcgtggagggtattattgtctatgaaaaaatatttgcggaggggtacaatcgtcttttacattcactaaccctagtagggctctctcctccgtcgttcgttcctcacgccgccgcacgaagagaagtcccaaatcgcatccggcgccgacgccgagcgaccccgcctcgtggctcctcccttcccccgccatcaccgcctcagccgaccttgcctgctccaacgtctcgcctcgtccgccgccctcacctctttcgccgcgtgtgccgcctcaaccgccctcgacgattcctccgccctcaccggcttacggcctccgcctccctcgcctattctgccgccctcacctcctccgacgcctcagcctaccgatagcgcgggcttggcgacgtggtgagtatacccctacatctctcggtagtcggtactgaaatcccaagctattactatttgctagtgagaaggtttgatatgaatctctcgattccacttttatctgttgacacactgtatcatgctactcggtcagcctgcgcaacgacaagcactgcagcatcgagaactccatgaagaacaactgttccatctgttatgaggtgtgttcttctaccagaacataacagtgatgctaccttctgtacctactgttcattaaaaatccagtctcttatgtatgaaactgtgatcatcgatcacaaatgcagtgctcatccatcacataagaggtaacgtcctgtccttccatttactcccatgcagatcagttactgatctttgattgctctattcgaatggtgtagttgaatgtaaaaactgaattctgtagtcgggttttgtatgactgattagatgaatgcttgttcttttacggaactatcaatttagcattggttagtaatgtactgatcagctgttttctcttcgggaaaaagaccttgaaaaacgaaaataattcgttcaggctgttagtagtaggttcagtacatatatttggataatgcatgacagaaatcttgaggctttaaaagaactacaatagtacaatgcataaaggaggaggcaacaactgtgcatgtttgtatgctaccagaaaatactagtatcctacaactcacaactgaattgtgaactagtatattgaaaaatttatagtaattccattacagctaacaaatgtgttctgttgagtaccctgatgaagtccactccctcgtgttgctggcaagcctcacagcattgttgcctcttatttggcatccatttcctgcaccgtgcatgttgtttggagttgagtttactcatgttattattgaaactagctgggtggcccgcgcaattgcgcggctagcacccaaacaaaatcgtatattttttagtataattttacttaaaatttattaaatagctatctcgttgtcttaagactttgaaagactaaactaaatagctatcatccccgtatttctaattatatagtttttaaaagtcacaccagctgctactccttacttctgtcatatccttttttatttgcttgctcgatctaccgctatttctattcattctccttgaaacctttaaaaattagatcttatagtttttagagtttattgtctcgttgggtttcgtttttataatttctagaagttccgtcaaacactgccattatacttctctacagcccgtgcactgtcttttctctttattatcattgggattttcaaaatcgaacatagctatcgttcgggttcaattttttactttctagaagtcccaccaaaccattagcggctttgccactgtactccttaatggctcacccgttgcctcccttctttattgtcattgggttttttttttactttttagaagttccgaacctttaaaaattgaaccttgtagattttagagtttattgtcttgttaggttttattttttataatttttagaagtccagtcaaacgatgccactatactcctctacgacccatctgtcgcctactctttattgtcattgggattctaaaaatcgagcataactatcgttggaattcattttttattttctagaagtcccgccaaccgtcggcggctctgcaactctactcctatgcaccccgcccgctgcttctcctttttattgacattgagattttaaaaatcgaatatgattatcaatggggtttattttttttgtcccggcaaccgccttgcctgtttgcttcacggcttgcctgtcgtccctccttttaatcgtcattaggattctatttggtgttttattaacagtttttatatgtcgtattaaccgtccaccaatgtactcctttataggcatgttacttaatttatctcttcaggtgttttagacggtcttttctttcaatagtttttattttatatcatcatttttagttatttacaaattgtattcctaattgaaatctttttttctttttataatttcagaatttatattttttttcaaatttttatttaatttatctcgtcatgtgttttagacggtcttttctttcaatagtctttctttttatcaccaattttagttatttacaaattttattcctaattgaaatcttttttatttttctaatttcagaatttattttttttcaaattttaattaatatcatatagtgtaattttaatattttttttttgaatttaagttgtttcaaaattatattcctatttgaactctcttttagtttttataatttttgatattattttatttttattctgaattttaattaatctcgtattgggtttttatatggatttttcttccaatattgcttatttttaattctgaatttcggttaattttaaattgtatttctactcttcttttctttttgctaatttcagattttatttttatttttattacgaatattaattaatctcgtgtttggttcttatatggactattctctcaatatttcttattttcaattccgaatttcagttatttttaaattgtattcctacttggactctccttttcttttctaattttggattttattttatttttattctgaattttgattaatctcgtattgggttcttatatggactattcttttaatattgcttatttttaattccgaatttcagctatttttaaattgtatttctacttggacttttcttttctttttctttgattaatgtgagaatttctagcccccacaacgaacgtggtgcctcctttcaaggctgttttaataatataatagattggatacaggatgatatcctataactccgatgcctctgcaacacatctccggatcaactttcgggtaaacagctactaatttatctgtggcctgactaacattagttgctcataatattttctatcttatcttacaattagtgctgtgaagcactcctatttgtttagtttcttgagggaggctcgaagctgtttctgatcttatcagagactagagaagaaaggagaataaccagatgccaatgcgaggctcaaggagtattttaaaagtcatgtttttatgtgacctcaactgtgcttacatgtttattggtccaatgcctctctgacttctttgatgttggctcgaaactgggataaggttgtaattttgcacataggaaaacctaggaccttgaattgtatagttttagaaatcaagtttttatctgatctcaactatgcttacatgttctggtgcccttgtgacgtcatgttcggtgaatgagtgcaagtgctatctatactgttgctctgtgtgcatgtgtaaatgtcaatggttccacaaaacagttgatcagtaaaaaagcagctctttctgagattggacgatgtcaccccaatcacctatcggtagtgtactacacacggtccaattttgaacaggataatggtaatgttttgagtgttgctaacgccagatggtttttagaaaaaagtctagaagattttcgttcacgaaaataccatcaaggagtcacaccaaaataccagaaggatttaccatgtgagaaatttaccaaacaaattgcctgcagacattagcgaagcagagcgttgcgacagtgatgaacgctggctgagatctaccggaatagggcaacaacggcaatagtgctaaagtcagcgaaggatcgatgcgatacaagattgaaacgtaataaaaatcacgaatattttcctaataccaagtttacccctaatcgtagtactaacaaagtactaatatgcccttggaaatcaacggtttggattatttctagttgtagtatatactacaagtagaaagcaccggagcgtcgcccataggagtaaccactaaaggcacattttctccctgcaaagcaaaagtgggcttctttacctatcctgttgggaggttgacacaaagcaagaaaagattattcgattcacagtacacataacaaagccgggagctagaagtttcattccgaaataagcaagatctgttactaaagtctttaatgacctcaagaatgttccatactagcaactggcaccctcattttctctctctatgtcagttcaattagactgaaagtctgaaagtaacacgtcaaggtgaagaagaatgagccaacaagaatgtgaaggtatgcactaaacacctgaaatagctccgttcttggtaattattgctgtctaaagaacagctcaaaatgtacagcggcactaatcaccacccagcaaaggaaaagctccccggatgaacgctcttagcatctagctacaggaaaccgaaatcaagcagcaccgacagcacagatcggcgaatcttgaggagaggaggggtaaaggcgggtcacctcacctgagtggattgccctggttgaatccgaagctagagttgacgatcatggcgacccagaaggccgcgaagagcaccaggaaggccaaatcccggcaccgccggttgtgccgaatgatgccgcctccatctccgccgccgccgccacctcccagctcatcctccccgccgccgcccgccgccgccgggtgcctgcctatgatggcgccgagcggccctcccattccgccgccgctcgcttcgatccgatgctgtggtaggtcgcgcttgagcgagacagcgagcgatctgtagcttgggagcagaagtgagcgagctcaagctggcggggctggtcgagtgatgggcttgtcagggtgagcagctagctttttgttttttttggctttttgctgatgcggctgcgtgaaaaggagatcaggaaccttttccaagtttaccttttccaaaatttctataaaggcatcacgttgaatcttttgacacatacatgaagtattaaatataaataaaaagaaaaactaattgtacagttagaagagaaataacaagacgaatcttttgaacctaattagtctataattagccataagtgctatagtaacccacatatgctaaaaagatgatggatgaaacgatttggtgaaaactgattcattagagagacgctccggtgccctctacttgcagtattctactccaagtagaattaatctcgaccgtttattttaaagggtaaattagtaaagtgctaaaaccgaataggggtaaatctggcacttaatttttttctcatttgtgcgtcctatggtcaagcgtcgctcgatccctctccatcgaacagcagagtcgctctccatcaaaaaggagagcgcagggaaagaaaaagaaaagcagatcgcgaggtccggccaccgccggcgcttgtgcatcgcgttccatagatgtttcttgctgtaggtatttggtttccattcagcttgattgtttcatgtaaaatttaaatatattagttatatatctgaatattacacacgatggacaaatcgaaacactccaatccagcaatgacagatacaaggcaacggaagaataatccggtatgtttttttacgtagactttacaattgcaattacaacaagtaatatacattgaaccacgtacaaaaacgatgatatacacagataggcactttcaaaaccacaagctgttaataagctatagttttgaaaaaaaaaacatggccatcagtaacaagccaaagccacccaaagccatcttgagataatgaattcataggaattacaggacatagcacaccaggaatctctcaagcgttcattgacgtagtgatcattagcttgtccaccttgtcatgctcagccattctgaacaagctcacttgctccggattcagtttactggcattcaacttgaatcccttcttctaggaggaaaaattatgaccaagaactacagaacttgagtagacaagcagaaaaactattcgagaactagaggccaacgaaaaagaagattcagtgcagatgttcgagctgcaaacctacaagcagcaagaaaaacaaatcaaatctgacctgcaaagcagaaaaagagtcttctcatgtcagctaatccgttggagagcagcgctatagccagcgagaggagtcttggatgatgattcggaggtcgagagattggtggtcattggctccggaggttgcgggttccgcttgggaggcgatggattgggggctcgccctcgcggctgtgggatcaacggcgggtggagatggacagggctggagccgagcgtgggggaggaggccgacgacgaggaaggggatagcgaggtggacgaggtctcggcggcggccagtggcacggtgctgggtcggaggcggagatccgggaggcgaactcgtcggaaggtgggccgacgcgggggagcggcagagagggcgcagctctggcgatcccagacggagatgcgagctcgtcgagggcggctgaggcagccagtgcgacggaggcgagggagtaggaggcgtcgagggcggtggagcaggcgaggtcgtcaaggtggtgatgggagccgcggggttctctccgcatcggctccagatgcgcgattccggaaggacgaaaatatccctccgcagataatttttcctggataaaagtacccctccacgattctactaccactaagtgtggtggtagtagaaatagatctgaaccattggatcaaataagatcaacggttcagatttttttctactctaggtagaaggcaccggagtgagactcgattcattaaccatggtcaatagagtaaactaagagcgagatctactaatctaaagctgacggttaaactagcttttgattgggccacgtggcacccataagttatcaaattaatcctagatttcatcaaagaaaaaaaaaatcaaaagatagaaaatggcataagttttctatgacaattctaaaagcaagcagtaccttaatctagttcttaaaaaaaatagtaacttaacatcacaacatgtataacattagaacattccgatcaggtgggatcaaaaggaggatgtagcccatatatgctggtccacttaaaacttacatatagagacatttacttaaagaccctaatttttttatttgggagagtgatccagttgtagaaatcgcttaggatttattgccaatttacaacatatattgttgagaattatacatttccatgttattttttcaaataggaatatcgcaaatattccattccacacatcttttagaattaatcattaaaaattaaactaattttgtatataaccccatacatttaacctccctagcttttagtatttgaatttcacgtacattggtccatccatgtgaacaaattgacttatcttacaccacttactttaacttgattttgtggaatatgtctaactaaatgatttccagttgatacaattgccatgtgttccagaaataaatttcattccaataatttcatttctttttttatcagcctatttgcttctgcttgtatagagtaaggtattcaatctctcaagaaaaagaaggaataaaaatggtcaatttatatatatcgaacaaaaccaacaataccaccgcatgctatattaattggagcgctgaccgacgaacctattttctagttaacaatatggctggatttggttacctgctcaaagccgatgggttgtccattctggtcaaatgaatcaaccaatcctgtgggtgtatttcgtggatcatactaataagacattttgctcatgttgctaatatgactatagtgtgtacttcaatcattatggcatcttctcgaccttggactatcacgtagatggttaccaaagaatgcctctccttcatggtaaccttcatgaggaggtatacatgcaatcgccttttaggcgtggaacatttacttttgttttctctagttctatgtgccctagactagccggtttggtcagcgtcaatgcatcacgtcaatcgaagcactgagtaagttgttttgtactggttttaatacttaggggacgcgagatataaccggttttgcggttgagatatacgggttagattcagctgatagttgagggagtcaaaaaggactttctgttcatgtaaaataaaaaaaggccggatcgggtaaacgagttggacttatggtacttag

SEQ ID NO: 8825 - DNA, 8653 bp, Oryza sativa
ggggcaaagcaagagtgcggttaggaggcggcgggcggtggttgcagatccggcggcgaggggccgccagagacggggaagatggagggggcgggggcacctcgccatcgccgccatgaggagaaagagaggggggagggggctcgccgacgcagttgattctttccagccggcaaggcaggcggcggcacggtggggcggtggtggttgggaatcgcacgatggcgtgaggacgggaggagtggtggcagcgatctgaacggggaaggagaggagttagggttagggggtttgcacgaatcttaaaacatatctaatggtccaaaatttaaatgataggaggtgggattttctgtcacaagatatatagacaaccccttcttttatatgttcctcttaattttctccttctgttccttccgtgtgtagggtttcagccgccgaaaatcttgggaatccacagagaccgtgtcgatcgcgggcggcgatgagggacggtgagcgtgcggaggtcggggcggccggggtgaagaggaaggaggcgagcgcttcgtcggactcggagccggccgggaagaaggcgaagaagaagatcctcccgaagtggagggccaatgcgatcccgtgcgaggggggcgaggtcctgaggaggaagaaggaggcggtggcggccagcatgctgtggcgcacgccggatgtcccgggggcgagcgatgtctgggattcgatcgaggtcccggcggagatgctggagctgtggctggagaggcaaaaggcgaaggcggaggccgcggctgcgaagaagaagaggaaggtgttcaagtgcagggtgccgaatagcctcgtcgaagtgatgatcacgcagccctacaagtgcgttgatcacaatcgctctcaggaggagctggccgaacttgctgtgccacatcgccaaatctacatcctcaggaagttcatcgatgaaaagaagatgaactacgagcagaccctcatcgaccagtacgccacacagggctacgcagaggacgaggaggaggtcaccgatgacgatgacgacgaagatccagctaccctaacctaggtcaaatgtgtgctgatctgctcatcaatgactatatatggtgtaatcatcatcaatatcatctcctatgttatttgcaaccggtgattattcctgtatatgtaccttgctactggtattaattgctacttttgcaatcgatgaatcgatacatgtgttttatgcctgtattaaaatcactggttcacaatatttaatttgctgctgattagtcctagtgcatttgcaagatcctggaaggttgtgcgttgtgccaaaggaacggctttgatagcttcagggtctatctctattcttttgcgaccacaattaaagttaagcttatttttcacaccttctatcccaccattctgtccttcccgccacaccctctgcacaactctaactggcacatcaaactgcagtgcaactgccttggagactccatggtgcatcacaggaggatgtgtgcatgctagcaatttcagatatatggcgatcttcaagtcatccggatagaaccttctctttttcacagtcccacctgcaaatgacaaagaaaaatcaatagtgaaattgggaatacggtagtgtagcaatccatacaaatactgaaaaaaaacagtttaattctgaaaacatatgcaatccatacaaatattgagtctgtaactctgttgctaatattttcaggttggtactagaagtaattcataaagacttgacatgatatatatgtctgtggtaggtggaagctaaattcatgattgaaggatagggttgtttaatttcatgattgaagctaaattcatgattgaagggtatatatgaccgtggtaagctaaatacatactgttttcagatttttgcagacaagatgttttctaacctacaggagtcggcgaacagatgttttgcaatgataaaactatactcattgaactataagcgctgaacagatcatgtaggcagagagctaggcaaaaacagaaactaaaaacaaaagctatctggtggcagtacctccatctccggcagcggcatctccttcgcctccatcttgggcggcagtacctccgtctccggcggcagcacctccgtctccggcggcagcatctccttcgcctccggcagcatcagcatctacgatagcaaactgattcaaaatcaaactataggttattaggttcctaaaccaaaaacaatggcacatagataagtaccttcatctgcatcagcccacaccatgtcataatcaaggtcatgagccggcccaatccaatcgccaatggcatcccaatctatgggaggctcaagattgaggtctaacaattgtgccgccgccattgatcatctacagctttgtgtgtggtagaggcaaggaggagaagatttgaaaactgaactcgttggtgcatgccgtcgtcaaatcgctgcttatatagggccattgaacctgtgaagttcaatttttgaattttgcccgggcataaccccatccgttttcagcgagcgatcgcgagtaggcgagcgaaaaattggcgtggcaaaaaattatttcgcgcgatcgcgagcgctgctaatccgaacggttaggcgaaggattttgcggagccgaagcgtcacgctcgcatgcacccagctttaattgtgggccgagccatgcaggccttggatagctgataagagcctgggcttatctttcttagtctgtgtgtcaagctaaaatatgatgatcaaaaatagatggagggagtagtattcttactagtagttgattgatatccccaatctcgatgtttcactacttctgccgtaaccttgttttgtaatcatatgtatgttctatttcttcagttgttttggaatccaccggttctcatttcttggatcaatttggctttaccgtccttaagccgttgttacatgatatcagagggcttgtttggatcaatgccttaccaattttttgtagtgccaaaacataggcaagttttggcactaccaattatttggtagaataaatttggtattcatcttatttagtttgctatcaaaatatagccaagttgtgatactatagtgaagaaagttctagattgccaccaaatttggtataggcattaccaaaaagttggcatcaatccaaacaaacaaacggtgggtactatttagactacgaaaatattggtagagcaaattttggtagcaatccaaaactgtccagagtcttcctcgtcaaatgacataaagcattgcattgttccttcaccaatgcacacatggtacatctctgtgtgcattggtaccaaaaccagaatattccagagtccaagtgtccaacttgtatatgtagattgcggtcatccttatgtagtttgccctgcaaagcctgccgtcatgtccaggtattatattttctgtcaatgaaatgcatttttacattctatggaagggaattaactactcccatcctagaattgttgaaggaaatgatcaacagtggattggcaaaacagtggacaatcgccctctggagcaagctgcctggtaaatcttatctgtagcaacctcaagcttcgctcttctcttcggcgagctagacagtaacgaagactcgttcccacgaatgtaattgataactactagctaccgcatcactaggcgatgagaatcagcggactacttgcaatcttcattctagatatacctcttcattaagcatactttattatattttgttttcacaaagggattccggtaagatggatcagtttgctacaaagagtttacaaggtacatttgatatattcaatatttacatagtaggaacagtgggggtgcaaatgcctgacgaggctcattaagaaatagtgaggaacagggtcaaaagaagagaagtccgatcatgctcattcagaaattaggtgcccatgatttacagacctggccaacattgatgttcagcacaaacaaactagcagtgtaaactgtataggcagtacaagataatctcctttcactaatacagaaatatccttttgacagtgacctattcgatgaggttcgtaaaacaactcatctagtttggctaacatagacagtgcggtttcttgctggtaggcaaccaaaagagtgcagagggcatcgtgtcgtcagtttgccaggttcataaaagaccagcttgaagggcataactcccgcaccgtgttcccatcctcatccttgatttgaacatcagcatgatgcttgacaagcaactcagcaatatcttctcgctcacagaggacagcatagtgaagcgctgtttgtccttcattgtcctgaatataaaagggacatggacagtgttgctcattgatctcattataatgtttagactttttcagggaagcagtgcctatcaaaccaatatatatccactagtagtacctagccgtggcaatctcatatttattgacactattatatggccacaatgaatagcaactttttattcaatgtagtacataatgtaatcccaatgaaaatgccacgccaagatatattaccagcttcttgctccaattacatactcaccaactttatcagcgcgtgaattctactagaatgcactgagtgaagcattaaaggtagagtcaagtacctgagcattcacgtcagcatttgcattgacaagaatctcaacagaatttagatggccacggtcgacagcccaatgcagtggagttctgccttcactatctgaaaccatcataaatgaaactatgcttagatgagctatgctaagcctaagctacaaagagaacataatggtgaacagttcagaacacaaacctctcatgttgacttctacaccagcagccagatgcttcgctatgtcatcaattgctccttcccttgctgaaacatggatatcgccaagttcactgcagttacagataagtttgttgcaatcatggaaacactgtcatgtaactagatgactgaataaataatgcttaatagcaccaacatggagataattagttgcatacttcatgaaataattaatcatgtcattgttatttgctatgatttatcagccataagagacgatgcccaaatacaaacctaactgaacttgaatcaaggccgttttaacacataataataagaccaaaggtacaggatatacttcgtgtcgaaaacttacgagtcatttccctgatcttcctcctcatacattaaactgctaaatacaggtcccattggtcccttcgaacttgaagcagatactgtggtatcttcatctttccttttctgaaatcatgtaaatcagattatcaaataagccaatatagtgatgggatcccaactagcacaaattgagcggtgttttttttttcaggaatcatgtaaagcagactataaaataagccaatacagtgatgggatcccaagtagcaaaatacgaacagtacaagaggacataagagaattaccgtgctcgaacccatgctccagttagggaatagctcatccacaactgtgatgtacttctgcatagcttcttctgtcggcatagcacccaatttatgccaagcattccttggatattgacaccatatgaaaattaggatacttgtaaactagattaagtctttaaaattgacagagatagacagcgcaaaagacaaacagtatgatgttaataaaagttagctgcaaacagtagatatcttaattcagactccagtgccaaattcaaaagggtaaattcaaaaccaccaaaggaagtcaggaaacaataaatcaaacaacataatgcaaaagtaagttgaattgcagcatctgactgaggaatgctactatttgtgagatcatcgagctaccaggagatttcacttccaatgaaccaaacctgtaaacctagaggcaataacaatgagttaagtttctaacaagaatcatagctacaagattaacacacaggaatttatgagtctcctctggtcagtgcaaagcacaaaaaacctaccaccagatttcgtgatcagcaattctagcagtaactgaacctaaacttagataacgataaatttcgatccatttccctaaaccctcgaactgaaacagtgggggttaagcggagcccgactctaacagatgcttgaactaaatccagaagagaaaaaagatcagggaggcagggggatcgaatctaccacttggcgcgggccttgagcttgagggcggacggctgcggcgcggtgcagggcccctcggtggcgatcttgtagagcccatagagctgaagctgggcttgctcggggacgctcgtgccagacgcagcggaggcggcgacgaacgcggaggcggcgctgaactcctcgtcgagctccgtgctctccacgccctcccagtcgctgtcgctgtcgctgccgctgccgtcgctggtgtccccatggccgccgtcgagggaggccggaggtggggccggggcggcgggggtgtccgcggcggagggggaggtcggcgtggagcgggtgattcggaggttgtcctccttgaaggcgatgaccgtggagatgagcttggcgacgaggaaggcgaagaggaggccgattaccgccgcctgggcaagctcctgccagtcgccgcccatggccgacgccgacgccgacgagtcgccggggcgagatgggatgcgccgcggatggaggcggcggcggagaagagaagagagaagaggacttgggtgatattttgtcgagggccccttgcgcttttcgtttatagaaattttggtaaaaatattcccaattgtgggcttagaatttggtaattggacgcctaatcatgggctctcgtcatggttgaaattagaaagatccaacaaatatctgccaaaagaactggatcactaatcacttccacttgagatcacacacgagtgaatatattttggtgttttttttaattttcaacgtaaaccttaaagatggtgatgagtggtgaatcctaaaacattgaggtagatggatttttgttactttcccaaccttacatcaaatagaaaaaaagtcttttgaagtgaggtggaaatgatggcaaatataatgtgaccctaagaaattataacgacggtagttttattttaatttttgaaactttagagtgtatggcgtggttctcttattcaattttccgttgcagtgcacagtcattcagctggtagatgaaacatcttgagcttccatatatttattgatacagatatataacctgtttatttttaacttttgtttggttcaacatgaacaaatatctttgcaaaatcctattagcatttatggatccatagcttttttgtatgtttggatcggcagcacgaacagacgacctcactccacaaaattcaacgcaagttaaccatagcctataataatttcatcataagtccatttttagccaagtattatccaaatagccacctcttgcttcatgtaaatttgcagctcttataacctgtcaagagaaaaaaaaatcatgtaccactagtaataaataaaaaaaaggacatttaaacttaattaatgaaactacactattattgttattaagtagaagataaattaatatactccatccattttatattataagtcactttgacatttcttctagtcaaacatttttaagtttgatcatgtttataaaaaaaatagtttttcaataaaaataaacatattatcgagatatattcaatgttagacttaataaaactaatttgatgtcgtagatattgctagatttttttataaattttaggaaaaaggtcaaaacgtcttgggatagtacttactaggatcgacggttgtgataacgccggtctggccgaagtcacagtcaaactcatgctggccgttggattgaaagtaaagattcatcgcgaatgctgcgtgcgcctgcacgttgttgggatcgtagcacgaaccccccgcccggatcgcgccacagtcgatgccaccttgtccgcacacgaagtcgatgttcacctggagcgccacctcgtccgccgccggcttcggcacgcaccaccgccgccgcccatcctccgccggcgccagcgccggcgccggcgccggcgtgaccttcgtcccgacgatctcctgcggggcggtgaggatgccggcgtcgtagaccggcgtcatgtcggcgtggtagaggccaaagttgcgctcggacaccgggccgggcttgaggttctcgtcaaacagggagaagatggagagctcgaaggtgcggttcggcatgagcggcgtgcccacgccggagccgaggtggcggatggcgttcttgttgtagtccctggcgaggtcggcgccggcgccgacctcccagtactcgccggcggacggccacccggtcccggacaccacgacgtcgacgtcgccgaacccgagccgccgcatcgcggagtggacggcgtcgagctgcgcgtcgagcatgttggcgtagagcaggccgtggcgttgtccgtgacgccgtcgttcacccggaacagcacgttgtcgagggtgtcgttggtgagcccgccgtaaaacgggt

SEQ ID NO: 8826 - DNA, 3659 bp, Oryza sativa
agatttcataatcctcaagaagctcacgtacagtgtaatgtagcatactgtacttcgtatacagggcagcgtatacgtacgtacgtgcctttataagggggctcttccccaaggtagatctctcgtctctcctcttgcatcttcttccacaccgtctctgtctcctgcgccgcgccgctcaccaccgctccaccgccatggcctcccatagcaagcgtgacaggaactgagaatgcagagttttgaaaagaaattgttcagttgaagttaagttctgagaagaagaggagataaggagatggacggcccatattacacgataccggttcacaggagaagttaatgaagatccaagggatcacactgatcgaagtagtagctgtagctgtccgttgccgtactgtgctacgtcattttttgtgtgtgcttgtaatggcgtaagaatataagccgcttctgaatctgaaggatgtatcgaacaattcaaaccctaattttatctactcattcttgcggcgcacagttctttcctttcccttttatcttttccagatatgatcccaataggtagctacatggctaaatttctctgaatttctgttgaatcagggctcaaatcggccgggtcttgacaatctggtatcagagcaaggcgattcttggccagcttctggatctgggtggtgctaagccggtgagggttggagggacaagtaccctctgtaaaattccgcagccaggctaaggagctcaatccagaagcagagttgtgagaagagcaatgaaggttggggagggcttcggtttctctctgtaaaatcccccacttgttgctgctcaaagatggcgaggggaagaaatttggaacctgtgttggaggaggcggatccggcatgggctggagatgtaggggagttgaggcaagctgtggcagaactccaggagaagtttgaggaggagaacaaggcgatccatgagcagattcaaaatcaagctatgcaggctcaagttcatcgagatgagataatgcaatccatgaagatgattcaggagatgttgagttctacggccagttgctctcggaaggaagctaaggtgaagcagaggtggtaaagatgccgggggctactcagtcctcaacacaaaatcctcaaagaagtgaaggtatgatgatgtttccatccactccagggagggtggacttaaggggagtcacttgtcccatgactcaacccgatctatttactactgctcacactactagtattggtagccacataccccaagttcccacttttactgcccctgagatcaatacatcagtgttcttcccaactcataccactccacctcatactagttttggaactcagtactaccatccaaatgctcacatgatgaattatcacaattccccatactttttcccacagtatgctcctttccaaccaccttgggtctacacacaaccagggccttacacttaggtagataatccaccacatgggcaacatgataatgtgacacatgagcaacaaaggcacagaggtaggaatcaatatgcagaggaggtgaagaaaggacccaagaagtttaattttcctgagttcaatggggaacatcctgaagcttggattagaaaggcaaacaaatattttgcacttactaagacccctgaagaagagaaggtgctagtagctgaggtatacatcactagtaaggctgatcagtggagtgatagctatgacattcctactgaaaccctatcttggccagaattctgcactatagtttgtaagaggtttgctgctaagtctaaggtggagataattgacatcttcagaaacctaaagcaatatggatctgtggagtcctatattgacaagtttgaagagattgtgccattggtcaagagaaataattccagcttgaatgaggagtatttcctggattatttcatctctgggttaaaagatcatattaagaggccactcaaatccatgggaattcatttgttagtgcaagcttatgagcatgctaggaattatgacagtggaccttagttcagtaaaggcagcagtggactgcaaaaacctgagaagaagggtgaatgggttggaaataaaaagggaaaggatgataaaaatgagactggtggaaaaattaagtggaatggcaaatgctttagatgccaagaaccttgggttcctgggcatgggaaagtgtgtaaggccaacaagcaggtgtatctggtgactatggaggaggaagaaactgaaaatgaaggaggatatggtgaaattgttgacactgaagctaaattcgatacaccacctgacagcccaagaaacaaaatcaaaaaaggagaagaaaaggagtaagctatgcatcctatcggtgaaggagatatgggagccacaaccttgaccttaaaggtcagaattggcaaggtgacagccacagccttggtggatagtggcaacactactacattcattacaccatccttggtgagaagggctaatctggagatagaaaactatgaaccaattccagtgaaggtagctaatggggaaattttgtatacaagggcacattgtcctcaacatgcataccatatccaagaggaagaatttgcatctacattcagggtgttggaaatcagaggatatgacatcatctttggatgtgattggattcaccagttcagccctgtatctcttaatcttaaaactaaagagttgactatgagtaaggatggacacaccttggtgctctcagatgtgtcagttcctgtaaggaatttcttgattagcatgcacaagctggagaaatgggtagatcaaggaatggctggaacagtattgcacttaaaaccagttcaggaggatgaagggagaaaaggggaaactcctgaagaggttaatgaggtgcttaaggagtatggtgatgtatttaaggagccaaaacaattacctcctgctagggactgtgatcacacaataccattgatccctggagctaaaccagtgaatgtgagaccttaccgtctacctcatcatcagaaaaatgcaatggaggaattcatgaagcagttgattacttccaatactatccaacccagtatgagtccttactcctcaccagccattttagtgaagaagaacgatgggtcttggaggatgtgcattgattacagacaattgaactctaacactataaaaaataagtacccaattccagtaattgaggacttacttgatgagctccagggggccaagtatttctctaagattgatttgaggtcggggtatcaccaaatcaggatgaaggtaaatgacatacccaaaactgcattcagggcctgttcactttgatgacattttcaaccttaccaagttttggtaaagttgctaaaaaaatggctacattagtttgctgccaaattttggtaactatataagaaatcctgccaaaattttggcaagttaccaagcattgctaaaatttggtaagtttttttttgcatcaaagtgaacaggccctcagtacacatgtggggcactttgaatttgtggtcatgccattcaggcttactaatgcaccagctatattccaggccctaatgaacaaaataatgtgaagtaccatgtaaaaaa

SEQ ID NO: 8827 - DNA, 8569 bp, Oryza sativa
gcggcggcacggggagagggtcccgagctctcggccacgccctcctcgatgtcgtcctccatctcccccgcggcggcgaggtgccgcctacgcgagtccccccatagcgacgtcgtccactacgtctcaggaggaggcggcgagagagatgcggtagtagaagcagcctgagctgaggtatccaatccaagaggtggtgaggaatccgaggggatctttttggcgcgagaatcttctagaggatggcgcgcgccggccggccgggcggtgggctaatatttgtagggtgaaattcctcgccggagcggagattccaatccaaacgccggcgaggcgaagcgagacgacgaactgagcagcgtctcgctctctcgcagtcgcaggaggaggaggagggagattttccttttctcttttttttcctttctttttattatgaatttttggctttggtggaatggaattatggaaaaaaatggaatggaagcaggaggaggaggaggaggatcttctgcgccgtcgcgccacaggagatatagcttcttactgcatccagtagggacgcgacgcgtggcggcggagggggtgtccttatccgattccggggggcgagatggacggtctggattcatcgtggagcaatcggacggcggcgggaggggcgcacgccggagagttagagtttgggtggggaccaccagtcctttccgcaagtaccggagattggacaaacggacgctggaaagggtggaatcagagtacggctcgctgtacggtgggcccgccgtgctttccatctccttctctctttgcctggcccaccgggcagtgacctccggtagtagtagttcccctaaacttgcactgattaattttcgagtaaattccatttgataaaactatcactttgctacagctttattcagagtaaaccataacggtgtgtgtctaacatgtggcctgacataattttgtatttttgagtgcgtgcctagcaaataagcctagagaaatcaagctattacggttacagttttatgataaaatcatcagctattgttatagtttgctgaaatttacttttattttttttaatattaatttgcaaacaaaatactcctacaaatcttactccattgatttatggttgttttggcaaaactccatatccttaatccacgacaaatttaaagtttgtaaattaaattataatgatttatttacattctgtcttaagtgatgataaaatgattcttcaaattttatcaatgtgatctcagatttaggatcatgccaaacagagcacaaaactcacgtatttacaagcggagaaatcatgtgtctgctagcctactccaattgttaaatacagtgtactactacttgttataacatcaatatcaatgtcaaaccttcgttttatataatagcaacggccaaaattcactgctagattatgctaacctgatagcaaatcaatgttaagttattagtacttcattactcacatacataagattctagcaactggatccaagataccacgcttgaccgcatccagttagcttctaatttcaacgatgtgccttgcatgcttaattcactaactaagcaattgataaacaatttactagtttgcatcaacagagaaagagatcgtacttgctccaacttgtcccgacgtgtccaacacgttcctcttcgacgtaacttgtgttttaaagttggcaatgacacggagttaattataactgtttttcaagtgataaacacattgtcaatgtcaccactgtgctggggcactactcgagcaaaacgcatcaagttgcaattaaaaaaacttccggtgaaagaaacataaactcagaagaataatcaacctcgatgatattacgatattttcattgattaagagcagcaagggccaaatcaaatcttcaggtcagaagcagcggcagtactcaactgctagagcagtaatcactgtcaattactaagtactccctttgtttatttttaatttaacgttggcgtcaaacaaatgagaatggaggaagcaattaactactccagtagggaatacatagctatagcgtttgcaatgtacggcagcaaacagcaaaggccaaacctttgtttccaagcgtatgtatgctagtcaagaatctaattaagcaatattctgttctcaaaaaaagaaaaaaaaaagaagaaagaaagatccaatattctaataaccggactccagattctaagaaagcagtttcgtcgtatcaatcagaaaatagtagtacaacgcagttgtttctacataccataattgtagcgtacgtcaggctgcacgcttggcttaacttgatggattagtgccaacctacaaatactccttccatgcatacaacgatcatacaaagggtaccgtacaaggtagtaaacacttatgccttctttcaaacgggagagcattttgaaggatcatcttagggattgagctagattctaaaaaacaaaaggaaatacaaatacacatttctcttgtttcaaaggaactctcctttggaactcaggattaaaaaaaacatgaaaagaaaaaaagaagtgttggattgaattgtcaaggcttgttaaatccttaggatttcaaacaatacaagaattgatctaataaagttgtttggagtttcctagggaaaaagcacgagaattttgagagaggaagacataggaagattcccatgaggttggaatttatgctagaaaccctccaaaattctaatgaattgaggcaattcataagaatttatatggttttgagatgaccactcatttgttccaaagatatgcatagggactatttccaccggattcaaaatctccaaatatcctttgtttcaaagaagcccctatatggcgcatactgtaatataagttgtattaccatagtaatatatgtggttgtatcagaaacagcttctatttaacagttagctatgacatgagcttttattgttctaaatttcaagggatagcaagtagtaccactgtgtgaactacgtattagttagaccaagcacaactagttgttgcaagattttgttgttgtagctgccagaaattgctttcagctagcttctgcgtccaaccataacagtttttaaacgtagaaaggaagaaagtcgacccaccatattatgcgcatttgtgctgtaagcaccggaacaaaaacgcatcaagttggaataatcaagttccagacttcctgttatttggcaaagtattgacaaaagctggggtaacctgacctgaaatggatcatgacatcggcacaattaaagcccacgctttgttgtcgccacctacaaagtacgcttatgctgcaagtgcaaattaaaggatattactgtcacttccaaagtaattatgtcacgcggtagtgacaaaagctggagtaaattccgtattatcgcgcagtaagtaaccagtagtgtgaagaagctgtggccggctgcgatagcgatgtgaaggtgaagccgctctgctcaaaacaatccagcagcaactagcagcagcgagtaagttgatgggaaaacaaacaaattcagtagaacatcaaatgcagcagcagcagcttgtgccaatccaatccaggattaggtaagaatagcacgggatcaagtggacaaatcggacagcagctgctgacccaaaagatcacactgccgagtcatcccaccttactatattgtgcatacatcaatattagcagcattttttcatgccaactacagggcttaccacttaatcagagtgggtccttgcatgctcttatgaaataaataatgatggacgcatatcacaagcactaaagccaccagagcgtgttcattatcagatcaccggatgattagcacagccttgccaattatcagccgaccactaacttgtgacatcataaaccacactaacgataaaacttttacagtgtaacaaaagatgtgatgtgaagacagtttttcaaaatttaaagtactattgcttccgttaaccttccttcacgagaacaacaatgaatcggcatggcacatcagaaatattcaatcggttgatcgtcgtgataacaacgcttccatggctttgaatagtagtttgcttacatttgtatgcacgttccaatttttttatactaaccttgaaatagcacttacgtagttcggtgttgattttggcacataccgtacaatacaatattggtagatgacgactggcaaagcatttcaatacaacagcaacaggttcgcaacaataataatgccaccgtgctactgctcatgtggacactttctagatgaacaagtaagcaagagttgctacacatgaggttgtataccagaaatgaaaattcccaatttgatgtaaccagaagacctatgaaatagcttaaatggacaagatagagatctatcagtcccaacagtacgcagattccagtttatgtaattgcttaaaaaaattcaacagggtgttagactgttagttcacctaaggcattctgctaaactgctgccaaacataataaaagtgtccattcgtctcgagcaaactagcatggcttccccagactagcgaacatcaagaacacaggtaaataatactagggagcatgttcatgtacagagaaaaccagacataccaatttatagctttcagatcttagagaacattttgaaacagggaaaagatgcatgaaaattgaaaaggctcacaaaatcagaactctcataactttcttatttcagatcactcaccagctcagtagataccagaaagtaaccatttaagaacaataaaacagaaacagtgaagaagttataacatagactcgcacaaaaccaccaaattttacaagatgtatttagctcaatatcattaacaccaaactgtggtttagtagaatctgaatatctgatgatattcaggaagatgtgacatgcccatagatctgccaaattttcagggatcatatccaaatacatcttgtaaaatttcatattcagtgaaaggcttatagcatggcacagcaacttggttaggcattggagaaatagcagtagattcgttagaaaatggcataagtaagaagcttcagcaagaatgaaaaataaggaatgaaggtatagcagattgattattcattgcttcaagaactacatgcaaagcacaactttgtataggacgagcaggtgcatgacacctagattggcctaatgctaattataagccgtactgcttataatttgtggccaaaacttttatgtgtccttagttttctaaaagccagtgctgaaaaataaaccttaaaatgaacttcaaaattaagttttaaaattcaaattgacagtggcttataagctgtagggaaaatgatgggagcctaattactctagcattatactgtagctacaactttatctataacttaacaaataccaaattctagtttgaaaaatgcatatattatctttacctaaggcaagcaacaaactccttattcatatgccatttatccctgaccccagaccaatgcccataatgtttgagacaggcagatgaatcgtcaacacaaaagatcatatcacttaaaaccttcctccacctaagcaaacaattgtaaaagctgaaagcattcatgaacaaagataatacttattctggaaccaatgttagaacttaatgttgtagtagtcaccaataagcacggtccaaaacgaagataagcaaagcatattatactccttgtgtctttaatcaaagcaaaaataagaactaaataatgtgttcaccaaattaagtttagtaaagcacctcatcacattgcaactagggactaaattagtttgttataacccaaggttgcatgaccatgaactgtttcaatctttggcaaatgggcttccttactacactatatttctaaaagtaccacttcatacagttcataattagtgcagctgtaccctagctttgacttttgtgtagactcctgactttctgaattcaaatatgagatgcttgcatgtcattatgtcaataagagcatgcaagttatcaattatatgaacatgccttgttacgaaacaaaacctgacaaaaccttttctataatgttcaccacctgaacctgcaagcacagagcagaagaggaatgcatgctcttttgtgtagactcctgactttctgaattcaaagatgagatgctcattttcgaggaaaaaaaagttgaggtgcttgcacgtcactatggctgtgttctttgcccagggttcccaacccctctccctcgttttccgcgtgcacgcttttcaaactactaaacagtgtattttttgcaaaaagtttctatacaaaagttgtttaaaaaaatcaaattaatccatttttttttaaaaatagctaatacttaattaatcacgccctaatgaaatacttaattaatcacgccctaatgaaccgccccgttttccacgatcactgttccggttgggatcctgggctagcgaacacaccctgtcaacaagagagcacgcaagttatcaattatatggacatgccttgttacataacaaaacctgtcaaaagcttttctataatttttattagctaagatcaccacctgaacaatgtacaagcacagaggaattcagcaaaagagtgtgttgagatatttgaatccataaggaattaagaaccataacacagcataaaacatataatgttattgctgaattaactaagaacatagacacgtttatggtattggaatacctaaaagctattctgtatgtgaaacatgctgaatgaagatatatatatatatatatatatatatatatatatgcttgtgttaggacctatttttagcatccctgactctgctggatgatatttcatataaggcatcccaatagcacatctaaggtcagaacaaatgaagcttaagacctaacaaacttgttttcatgttcatttcagaagacaaataactagagtaccaaccaagccctaggaaactataaattcaaaagatcaatagtaagtacagaacacacacacacacagaggaaaaattgtatacttgcctgcccttgctatgactgctgataacattaaagtactgagtagaaagaactagggcacacctgaattcattaactttatatatagtgattccccacttcatgcggccagtaggaaaactaattatgtactgactactgagaactaatatgtaagtagtgtcgcgagtcaagatcagcaaagttattataacgatgtgatcaccttgttcatgtaacaagcagagtgatcaccatacacatattcccccctacgaaatcatcaaaacaaaataaaagtaacctgaattttattgtctgaagcaacaaaccctgaaaagatatttaaaacatttcacttttaacaagtacagcaattgaaagtatctcatgatgctacgaaccaagtacaatgcaaataaaattctttgacatgtcaattccccctgcatgcaatggatagatgtcccgaatcaattaaaatcttaacctgagcgcatttagtcacgcaccggactggtatgtgttctccatagacttcagggcatagcagtgaacccaccatcgaacacaaagccacggtatacgccatcactgtacccaggaacaccatcaacccagtcccacttgccaccgctgttgcctagctcatcctcctcccacattgccagcttccctcgcacccgctttccagcaaaccacaccttgccatcaccgccaaacaccttgaccttgttgttgccaccagcaacagcagtaggcatggcattaccctgtgcagcagcctcacagaggccggtgaagcaacggtacatattgggaggcatgcggccagcttcgtcccactccatggtggccagatctaggcgtaggatgagcaccgtggagcatggcgcgtctatggcgaacgaggacctgaggccgccgatcatcaggacacggcggccgccggcaccagcgaggaggcgcgggcgcttgaggatctcgaagacatcgccccacgcggagcgctcgacgggggcccaagccgcttgtgagcatggagagcgggcaggagaagagcttccactggctgcgccacggggtgccgacatcgcaaagcgcgaagacggcggcagcgccggaggcgagtatagggctccgcggcttgaaggggagcgagaggggatgcttcatccacttgccggatccggatggggtgtaggagagggcggcgagctcggtgagcacgaggacgacgccgccggggccagcgaggacggtgccgtggcgcgcccaggcagatccgagagggggcaggaagctgtaggtccccgcgaaggggttgcagacagcgagcgatttgggcgggtgggcggtggaggcggtgaaaaaacagaataaggaggaggggagggatggcggggaaggcgaaggggactcgagccagaggtagaggagagagggggaggaggcga

SEQ ID NO: 8828 - DNA, 16188 bp, Oryza sativa
gagggaaagaaaggaccttgcaatcgaacttgtccttccacttggcggaggagacgggtgtggagtggaaggaggacgcggcgagacgcgtgggatcgacgaggaggtgggtcgtccgtagcacggccctccatggcgccgcggcggcctgcatcgtagcggagaagaggggaacggatatggtggagaagcaaaggaaacctagctaattaggtagcgtgttcgccaactcctcctcctaacccgccattgaaaattggaagcatcttctgctacagtatattcgattctccctctccctcgccgccggccggccgcccgccgccgcttctcgatcggaatctcctctcctccgcgagaagtggaagaagaaattaggttgccttggtttaggcccatctgcctaattcaagtggatcttttatgggccgcacagtctggcccatgtgcttcttcttctctctctcgcttctactttgtcccggattgaagacttcattctcactaaaaaaatgaaatgaaagaaataaagagcaactactacactagcaacagaaatatcggatgatgagaactgagaagagagcatacacttttttgttttcatatctgagttaattgtactgtttttcccgtttggtttgctgatgatatctatagtgggtgagaagttgagggtgcttgcctaatttccaccaaactggcctttcttttgttccaacttatcaataacggttggccacatgcatacatacagaacagctagctagctaatatatatatgtgcattgcatagttatagttaaaagggaaaagggaaaaagggaaaggtagcaaagcatgatacctagctagatcaatcgatcgatcgatatatccataaggcatcagcctagctaactgtctggagatgcctaagctagatagctacatatatactgtaatgcactatccattatattgcaccgtaattatatactataagatgagcttttcatatgcgtcgattagtcgtgtatgcacagaaatgaaatgttatagtgcgtactagctacaaaattattaaagatgcatatatataagcctgcactcgatcagcactccggcctactacatgtttttgtggtacgtaagtgcgtcgctgtcaaataaagatcgatctagatctgctatctcttctagtaagttgtacgtatctatcgatcgatccatcaaggaacactaaataaaatggtgtttcttatggccgattaattagagctgatgtttcttatggccgattaaaatggacggtctgtatagctagagcctcgagataaagtatatagcttcccacttgcatctagctaattatgaaattaagtcagtcccagatcatgcatgaaacaaacgtacacagactctacctggagatcatatatataatatagatatatactatatatatgcacgtactaaccagctgaatctattctttcccatgtttctttctttctttaattcagttttctttcatcaaattaataaagttaattagtgacctggtcaaggctatggtacgttcagtaaagctgctttaccaatacccggaacctagatatgtgcatcgtatacacacgataattgttgggaccaaatgtcatgaagaaaatggggatagctagctaggccggaaaatactcttctccctgtttatccataagataaaagtgaacccgaggagtattcattggtactcatcgctactgtctcggtaaaaatataatctggtcttgctacagaatccagatggcttttatatagcctttcaaagatataatagtatatatctatattattatatagcccttcaaatctcagtaaaaatataattctgcacattaggacgactctctggacctctagctagtatcagcgtgtagaaatggttggagttgtccccctgcacctactaatggaatattaccgccgggccacgtagctatatatcaggcctcctcctcagcctggcaagttctatttgccctcctatagcaagctcaaatcccttctttctataaagttaaggtcaaaagcttaaacctcgtgcttccacgtcatcatcaaattatgaaccgttggatgaatacattagatcgcttctcagacgttcgatggaatgcagcatagagcccaacccatgccattagccaccggatgagtctcttcgcctcctcagtgccaaatgtggcccacatgaacacattggcccatctccacacacatctacatgtatccagcccatcaatccgcataaaagaactttatggctgaacacgtcttcagttgatatgtgctacctaaattatctataaattttggatagggttgctaaaaaaaatttctccaaaaaagctatttgtttctgccgtttcttcttaagattgtacctactatgtaacaaatgtgcggggcattctctagtaatatatgatgggtaaacacccagactcgaataggatttgatgggtaaacacaactttctcttgaacaacttctcttttgccttcatctaaacctgctagggaaacttcaagaagtattagccgttggttaagagtagctcgatgtcgtgttttggtcgaatacgtgaggtgtggcgtctagcctctgctacaataataatatattgtactccttaaatataagagattttggatgaatgaaatatatcctaatactactattactatgaatctatacactgtaaaaattcatagtacaaggatagtttgccggcccttccaaagccagcttgctagtctacatcaaattgaggggaaatgtacagaatctgactcaatgaaatgtgtttaatagtgagtaaaatctacacctcccaataacacacttgcgtggaataaagggatcgtatttttttccaggatttggttctgatgtcagcatatcaatgcgccattgctagctagtagaatatatgccgtttaccctggaactgatctcttttgtggtacgacgtgcaatactataatctctctaaaacttaattaacagggtaacctttcttttcatacggcaaacttgtgcgaataaatgatgaaaatggaggagggacctatgcattctatactctctttttttttcataacttattactccctccatccctaaatatttaacaccgttaacttttttaaacatgtttgaccgttcgtcttattaaaaaaattaagtaattattaattcttttcctatcatttgattcattgttaaatatacttttatatatacatatagttttacatatttcacaaaagttttttaataagatgaacggtcaaacatgtttaaaaattaacggcgttaaatatttaggggcggagggagtaattaattgcatcattcgtggctcatctcatagcatgcatactgcatactatatactagtacgaccacatatgtcgaaattaaagcggttgcaacttccctgaaagccatgggatgaaagctactggtagcacagcatgaagaagaagacaggaacaggaggggagcactttttgtttgaggcagacaagacgcatcgttttcatgctgcaacctcctatcaatcgatctctcaatgcacgcgcgcgtgtactagtgttatccatgtttctatgtggtttcatgtaagtaatctgcgtctatttttttctcttcttggcatgcagttgtactgctactagtgtggtagtatgattgattcaaacacatgcatggtgccacgggaagaaaactagagatgtcgtgtcacctttttttaaaatggggaaaagcagaaatttaacatcggtcggtcggtgtgtgtatcgtgcgtgcatgaatgaatgatgtgtataagcaagaaattaagcatgcagtggatggatggatcatcatgctgaatttggtatttgcaacctatagctcgcaagttaattaaagtcatgcgcgcgacttcagaagaagatcggatcgagcaaattagagcacgagttatggaatcttcacgtgcatcctagctagtccttcgtgttgattggtctgttgttgtttgatttgaataccatctcgatcgatcaccaattatgtacgtacgtatgactaacaaaatcacccggccggccggtcaccatgtacgacgacaccaccccacgtacgccaggtagctatagcagctattgaccaatgaccgatgactaaaattttgtgcacttactttaatacaaaattgacagttagactttaagtgattttgattaaattttagcttaaacgtcaagcatatataaccagagggactatatattatcaacaagatacatgtagacacctagccatgtaagagaacatgtgcatgctatattcatatatatgtccattattttcttcgacaaaaattggacgaagattaagattttcgtggcacactttttaaactgctaaacggtgtgtttcgtgcgaaaactttctatatgaaagttgctctaaaatatcgtattaatctattttcaagtttgcagtaattaaaacttaattaatcatacgttaataccacctcgttttacataaaaaaacataatctttatatttatctttaggagaaaagaacaccacctatggtagtataattgccccacaaaatacactgtattataaactgtcttttctttcccactgagctagtagctcgcaggagatgtcggtcactccataagttttaatcctttttatttttacacgagttaaaaaagacacgttagtacaaaaaatgaaggattccgatcacgggccacacgtgacaattgattttcactaaaaaaaagaccttttacgaggcctgtcctatttttattgatggccctcttagaatcccacctaataaattctaattttcacagagaacacccaaaaaatattgcctgcacactagaaccgcattaaaatagagcgccgcacagtcaaatacaccaagtccttccttgctagctctcactccctccttttctctcccctctcttgaccataatggcacctcctcctttctccagcttcccacctccgaaacgatgctaccagccttccttcacgctgtcctcctccgctctagtcttcctcttttgttgccctcgtttgctgcagaggattggtggccaccacgggtcatacaacacggttcaacggtaatgtgccagggaagatcagatctagcggctgttaatgaccaaatttggtaaattctatcactattggcgttgaaggtggaaatcagatcgaggtggaatccaagatgaagatcgttgcggaaacagagtaagaatcgactgtagtccaaatcggctaaggtcaggttggcagagttcgagtcgggcggggctagccgatacagccgattccgataatatgactcggcgtatgtcgtcgggttcaagttgatgtgcttcaaagatgactgccacgcatggatagagtcctaggaaggcaattgtatctattaattaggatattttgtgtaattttcttagagatatgtttgggcaaaagtctgccgtaaagacttatggtatcttagagtttgttagagataatagtcgtgtccgttatggacgtatcttgtaattctcgggtataagtagacccgagccctatgcaaaaaaaggactcatccaatacaatctcggcgcatcgccaccctttttgctttacttttatttcgacgagttcgtgctctcgggttgagctgcatcggtttcgatcttcaacaagaggtaaaacttgtcatgacgatttatgttatcaggattagtgcttccatccttatgatactctaatcttgtctatataattcgtcgagttatcatatatctcacataatcttcgataatatctctatctaacctataaccggctaacatctgttaatggaaggcagccgattaggttagacaatgatgttaacttagattatgtgatatatctaccactctatgaaacttccagcggcttgattgtctagatattgttcttcttttcatacttaatgctgcatcagttgagtttgatctattaagtcgtgcttagatttgcaatctctagcctgctttctggttgccgattaggtagtatcggagtttcagccgatcttatctgatttaactacttttattctatatgcttgatctatgtgttaaatctgccttttatgttaggatcttgtcgcatctaggtatattagacttatgtttggtatattctacttgctttaacatcttaatatagagtggtatcggagtattagccgatacatgctagatccatttgatcggctatgatataaatgtatctaatcccactattaatatatatttcgatttaagtgatttatactgtctcggcaaggcgaccgatccatcccaatcacttgatttaagtatatatcgatataaggattatatatcattaatatctatagccgatcgagtagatttagttctgatttgcttattgatatttgtcgatcgatgtacgcatgacatcggcttgaaataaatgatatgtcatcggcacctagccgatcggctatcatttataggattaattgcggtttctttgttctatttcttgttgattgcaggatcaaatcaactggcacgctcatacacccgaaggcgagttttggacctgcactggagttaagcagatctcccaggtctcgtgttttctgtcaacacgcttttggcacgcccagtgggacaaattagaagtcagaaatcaatcttcctcatgaccgagaagctaccaccgtcgccatcctcggctagtccgggtactgttaaagagacaatccaaaggttaggatttaacaaagtcaatgaagggaatattgtggctgttgatccggaaaagctcacacctgaccagaagaaggatttcgaagcaatgatgcaacaagcacgagaacagttcttcaggtcattcacacagactcgcaatggaacatttgttcaaaagtacaaggtaaaggtgattcccgatgagccggagaccagtatctctaaggaaggagaagaaaaaagagttttagatggctcggctcaagagaatcagggtgacggctctcagggggtacatgcagttcaaggtgatggtgcttatgagccacaaggaggaaatcttaatcagaatggtgagacagcacaagatttcttcaacaagatttcttcaacaatttccaagatcgagtggactacgccgtacacaacggtttgatcaatcaatctggagtgttagtcaacaccttgtctaacatgatgaagacgatagccgatgggtcaatagccgagcatcaagctgcaggcccggtctacttgccgagaggtgtttttccgaattatcgatctttgattactgatgttcagccgcttgctcaggcagttcttccaggtgcactatcggctcagccgatggcatcgccattgacttctttgcctgctccatcagcgtcgacaccaggtcagccgattaatcctcggctattgatgagggagtagccacagcatagcgggcagacggtaaatcggccagcacaggatcaggtggctgctatgtttccgcccctccaatctactgtcaattcgattcaacagactccactaaggcaataggttgtaccgccagttcagccaacagctccaggacaacaaactatacagccgattccgcagcaagccttgatgaatcaatcggctgggcaatcggctggacacgccctgaatcaggttgttccagagcatttggttcaccatatacagccagatggtacgatgatgcctcaaattgtgccggagcacttggtgcaaagtattcagccaaattaccagaattaccaagggggcaatataaattatcaatatcagcctccttcccctcaagttcagtatcagcaaggagggctaacccaaccccagtttgcttctcaatataattagtttgaaccaatacagcaacaatcgcaaggagcagttcaacaacgaccatgggccgatgtaattgccgatgtgatgagagaacaatttgggcttaagccgagagatactggaaaattgtatcggcaaccttaccctgagtggtttgagaaagtccctcttcccaaccgatttaagagtccagacttctccaaattttcgggacaggatggtgtgtcaacttatgaacacattagtcgatttttagctcagtgcggcgaagcatcggctgtagacgctctcagagtcagattattccgattgtccttgtctggatcggcttttacatggttttcttctttgccgtatggatcagtcaatagttgggctgatttggagaagcagtttcatagctatttctacagtggagttcatgagatgaagttatccgacttaacggcaattaagcaaaggcatgatgaacctgttcatgagtatattcagaggttcagggagatgaggaacaagtgctttagcttaagtttgactgatgcccagttagccgatttggcttttcaaggcatgattcctccgattagggagaaattctcatatgaagattttgatagcctgtcgcatctcgtgcagaaggtaatattgcatgaacagaggtctgcagaggctaggagaagctctaagagggttaatcatgtctgcccttacatgtatggatcggatgatgacgacgatgactccgaaatagctgcagtcgaatgggtaaggagtaaaaaggttataccttgtcagtgggtaaggaattctggaaaagaggagagatatgattttgatattaccaaagctgacaagatttttgatctgctactccgggagaagcaaattcaactccccgctggtcatgtaattccatcggctgaggaactaggcaaaaggaggtattgcaaatggcataattctggatctcattctactaatgattgcaaggtctttagacagcagattcaagtagccattgaaggggggaagattaagtttgatgattccaaaaagccgatgaaggtcgatggtaatcctttccccattaacatggtgcataccgttggtcggacagccgatgtgggacgagcgagaggttttcgcgtgaattcggctaaaattataaataagtatcagaggaaatgcgacaaacaacaagagaggcattatgaagaagataatgatggtttcgatcctcattggaattgtgagttctttcggttctgctggaacgaaggaattaggttaccatctattgaagactgtcctgggtgcagtaatattacagagagttcaagccgattgtacaaaagaggcaattggctgaagcaagccagagttcccgttcatcaaaggttgggcccggtaaatcaaaatgattacttggagggagacgagaacgcgaagactcagtggtgtccttctggtatttttacaaagaatcagaaaagaagggttcaaaggttgaggagcagggagcgctttcaggaggtcgaacaagaaattggtcatcggctgaggaaagcaaagccaaggaaggagtggcatgttaagaatcaagttcttggagccgatgatattgcagccgacgaagctaagaggttggcaaaagggaaaagtattgtaacaacgccaattaacatggtctttactttgccagccgaattcgggattgatcaggccgatgttgacgaactggaagaggaatcggccaagttggttctatcaccagaacgagcagtctttgaaaagcctgaggggacagaaaatcggcatcttaaaccattgtatataaatggctatgtcaatgggaagccgatgtctaagatgatggtcgatggtggggctgcggtaaatttgatgccttatactacgttcagaaagttaggtagaactactgaggatctcatgaagacgaacatggtgcttaaagactttggtggcaacccatcggaaacaaagggtgttctgaatgtagaattgacagtcggcagtaaaactatccctaccacattttttgtcatcgatgggaaaggttcttatagcttgttgcttggaagggattggattcatgccaattgttgtattccttcgaccatgcaccaatgcttgattcaatggcaaggcgacaaggttgagattgtgccagccgacaggtcagttaatgttgctagtgccgatctagctctttgggagatggatggccttgattgtttatccgggaagatttgggttggagattttctaaaagtgtccgattctgatatacagccgattgaagatgaagaacccaagctattattttgagggcgtcgtggagggttcaagcatctacgccaaggacacggtagatgatctcgatgacaagcaaggtcagggttttatgtcggccgatgatttagacgaagtggatataggtccaggtgatcgaccaaggccgacattcattagtaagaatttgtcttcagaatttagaaccaagctgatggagcttttgaaagagtttagagattgctttgcttgggagtattatgagatgccaggactcagccgatcgatcgtcgagcatcgattacctttaaaaccagggattagaccacaccagcagcctccgaggagatgcaaagccgatatgcttgaacctgtcaaggctgaaatcaaacgtttgtatgatgctggttttattcatccttgccggtatgctgaatgggtttctagtatagttcctgttatcaagaaaaatggtaaggtgagggtctgcattgatttcagggatttgaataaagctaccccgaaggatgaatatccgatgccagtggccgatcagttggttgatgctgcttcaggacataagatactaagttttatggatgggaacgcggggtataatcaaatctttatgaccgaagaagatatccataagacggtcttcagatgtcctggtgcaatcggcttgttcgaatgggttgtaatgactttcggcttaaagagcgctggagctacgtaccagagggctatgaattatatatatcatgatctgatcggatggttggttgaggtctatattgatgatgtggttgttaaatccagagaaatcgaggaccacatagccgacttgagaaaagttttcgagaggactaggaaatatggtctgaagatgaatccgacaaaatgtgcttttggtgtatcggctggccagttcttgggatttcttgttcatgagagggggattgaaatacctcagaggagtatcaatgcgatcaaaaagattaagcctccgggaaacaagacagagttgcaggagatgatcggcaaaattaattttgttcgaaggtttatttctaatttgtctggaaaactggaaccttttacaccattgttaagattgagagccgatcagcaattcacttggggggcagaacaacagaaagctttggataatattaaagaatatttaagttctcctccagtattgattcctccacaaaaagggattcctttctggttatatttgtcggccggtgataagtcaatcggctcggtcttgattcaggagcttgaaggaaaagagagggttgtgttttatttaagccgtcggctcttggatgcagaaacaaggtattctcctgtggagaaattatgtttgtgtttatatttctcttgcactaagttgaggcattacttgttgtccaatgaatgcactgtggtgtgtaaagccgatgtgattaagtacatgttatcggctccgattttaaaagtgagagttggcaagtggatattttctttaacggagtttgatcttcggcacgaatcaccaaaggcgattaagggacaggctgtagccgattttattgtgggtcatcgtgatggttcaatcggtttggttgacattatgccttgggtattattctttgatggatctgtatgcagtcatggttatggtatcggcttggttataattgcgccttggggggcaagttttgaatttgcctatgctattacacaccatgtgactaataatcaggctgagtatgaggcggttttaaaagggttacagttgcttcaggaagttgcagccgatgctattgaaatcatgggtgattcgttgttggtgattagtcaattggcaggagagtatgaatgcaaggatgatacattgatggtttattacgaaaagtgtcgaacgttgataagtgaatttcggctggtgactctgaggcatatatctcgagaacagaatatagaggctaatgatttgtctcaaggagcgtcgggatataagccaatgacaaaagatatcgagatagagattgctacaattacagccgatgattggagatatgatgtgtttcagtatttacagaatccatctcaatcggctttacggaaattgcgttataaggctttgaaatatactttattggatgatgacctctattatcggacgattgatggggtgttgcttaaatgtttgagtgccgatcaggcaaaagttgcaatcggtgaaattcatgaagggatatgtggtacacatcagtcggctcataaaatgaagtggttgctccgacgtgctggatatttttggccaacaatgctggaggattgtttcagatattataaaggttgtcaagattgtcagaaatttggagcgatccaaagggcgccggcatcggctatgaatcctattattcaaccgtggccttttagaggttggggaattgatatgatcggtatgagatgataaaagtatcttactggtggagctggtttaagggtcgaagtagccgatctcttcctcacagcgattttctttctctatgtttattaaaattgtgaggaatcggctataaagtaaatgactgcaaaagtggacggagaaagttgcttacctttgccaattgagctgaagcagaaggggatggatgagcctgcttaggtgaagccgatggtgttctttcagtatcgcttatttcggctgcagcctggtcgatgtcttcctcgatttcttcttcatccaaagcctgttcaatggatggatctagggcgggcagatcgtcagctgacttagctttctttgttttagtttttttcttcggaaccggggctgaagtatctgcagccgatgatctggttctccgcttcttgctgacatcagctggttctctgatgagcccttgaagaagtgctgaagacttgggggcatttaagccgatggtagaaggagatggcccacctccatttggaattagacccggagcatacttaatgaccttgtcgctattgctctggcgaggaggagaagattctgttgtctgcaaaacagaagaaaagttagtcaaggtttaaatcggctgagtgattattcaagtaagattgaagaaatgaagattaacctgagggatagcatcagggaataagtctatcatgtacatggaagccgattgatggaacagatgcagcttccattcaccgcaccatctgtcaaacgccctactcctgaaccttgccagctttatgttctcgatgctgcccaacggaggtccagggatgttcaacagccgatccatcattaaagttgaggagatgtcacctctgcattggatcttgtcggcaaagtacaggccgattggcaattgtcctattccaagttgtctggccgatgacatcggatgataaaactcataggagacttggatatttctcccttgatggatgccgactgggaggatacatgggttgatagcagtagtaaagatttctctggattgctgaaatttttcatgattaatatcctcgaacctgaaatcggctggcagttcgaaatccattgagtcagcatagaaaaaccaaactcgggcatctttttggaatccatcataaaagctgaagaaccagtccttcagaagttcagccgataactttgctcctgcatcggctggtgtagatgcatattctccgtatgacatacatctgcgatgggtgcgttcttctccatcatcttccacaatcggctccaaccttggaaattcagcttctgtcacagatggccgattgacaactttcatgactaccaggttcagccaggattgcaagagccaccatggtccacctgctccaaccactgagccgataattatcttggccaatgcgttgtttaatatctggtaaagatagccgagaaggattttgcctaagggaaattgtttcttcgttgctagggcctcggctatgaattgccagttggttgtaggaccgcagcttgatccgcagaaaaggaatttttccaaccacatcagcaaaaaagctacgtgttctctaggagtgactggccctttgcccatatatgctgtgatatatcctgaccaacccccaatgctcttagttttgaactcaaaagtgctcttggtgttcaggttcatggggttagctgatgaggttacatctaggctagtgagcatgataatatccagcagcgttggggtcatcggcccttggttgaaaagaaaagcattgagagtgttggaccagaaataagttgcagcagccatcgggggttcatctttggccgaatttgctattgtgagggctagggcttggctgattccgatctcatcccaatgggcttgtttgctagccgatatccgcgtataccatgcgggccagcttttctccagagaaggccaggatttgaaggtgtttttccaatggcttgtgtttggattggccgacctaaaaggggttctgttggtttcggctatgataaactcagtggtgtctagattgccgattggactgagaaagtattgttggtcatgcaacagactgggaaccgcaacaagattggaaagatgctacatgaatagagaagaagaaaacaagataaggtgagcgaaaactggtctgatgaacgcaaaaggggatctagccgatggggacttacctcagcatattcggctgatggtgcggtggtcggattggtggaggtcgacatcgccgcgggtgaagatctggctgggagtggaattgcctggaaatcgccctgcgcgtcgagtaggttgccggagagagagaggacgggatctgtttaagcggtgaagatggaaatcacggtgtgaagatttttgggggcaacggttagtatttaaagtagagcgataacggtcgggaagacaacaagtgcgagtttctttcagagtcggtatatggcaaatccgaaacattatccaatataccggacttggggggcatgtgttaacgaccaaatttggtaaattctatcactattggcgtcgaaggtgaaaatcagatcgaggtggaatccaagatgaagatcgttgcggaaacagagtaagaatcgcctgcagtccaaatcggctaaggtcaggtcggcagagttcgagtcggacggggctagccgatacagccgattccgataatatgactcggcgtatgtcgtcgggttcaagttgatgtgcttcaaagatgattgccacgcatggatagagtcctggaaaggcaattgtatctattaattaggatattttgtgtaatttccttagagatatgtgtagcgcccgttccgtcgtggcgcctagcgggaaaattatctcttaaaaaccctaattgcgaaatttgtttctttgcttgctgtctagtgtccgtgccatctcaaatctcaatccccgatctatcgtcgagtccaattccgaatccaaatccttccaaatcaaatccctccgcagaagtctattttgcctcccccggggtcgagggggcccttttatctaggtccatataggcctctcatctccatctgagactacatcagcctggacttaattgcccatattactatcagcattttgggcaaaaccaacaagtctctaggagtttccaactttcccacatcttcctgtcttcttctgagccctccaatctgtagcaacctctgcctgttgaccagttacaaagttgcttccacatttttgggtgtccctatagcggggccttactgcctcgggaccaatgtactgtattcatcagttctcacgctgctatgaagaaatatctgagactggataatttataaagacaagaggtttaacttactctcagttctgcattgctggggaagcctcaggaaacttac

SEQ ID NO: 8829 - DNA, 25171 bp, Oryza sativa
tgaagaaccctttcccggtaatggcgatctgcaacaccgaaagaagggcataagcctaatgaattcaatagaagcatcaacgtgaatagcatatgtttttccagatgattttgcatccacaccaagtcaccaacacaaagcaggggagacgattgatttcagtcatggagcaattgctccatgaacaagaatttttgtatgcttaccattatataggcatttcgattcacagacttgagggtccagtctatgcagcccaggcagcattgagaagaggatgatgtcattttaccaaagcagctttcacgagcggaatcaaatagcttcaacttgcgtctgaggcattctagtataaaccgcacccactcaacagcagatacaacaagtgaacctatagcaactgaaccaaggctgtaacgcaacaaccgcttcaatgaagaaacaactgtaacaaatggtatgtcatgctgcataggaatagctcaaatagtcagtggaaaggagaagtaaactaactgctaaatatagagtaaattttttaagtgcctcaattcacttacggatatttcaccacgtgcccaatagtatgaagcaactgatccagcaatcacggttgaagagcacgcaataaagaattgggttgcccagtaacagccaaataagtggaaaagaatggcaataccaatatgaggggtgtaatggatgctgtacccacagcagttgtcacagtttactttgcccaacttcagatcatatgagcaacaatctgtattgcagtcatttcggagaacttgaccagagctgaagagatggagtgtggcagaaaaccagaacatataaaagatagcgaggataaagtatggcacaactgggaaaataattagtgcctgaacttcaccaatgaccttcgcagcaacctgaagataataatttatcaggttagtgcttaggaactattaactatattcttgccttcaaagaggaggaatggcattgatgctgagtgtcttcaaaaccaagcttctgcttatacagtgtataatagttagctaatcaagcttgtacatccaatgattcacgtaccttcaggacaggtgttgctatcagtatacgacggataatagctatggaggtcagaaatgcaataatcattactactgtcatcaccactgtagcagcatgaaggtggcttatttcctagtaaaagaatgaacaatcaggcaacatgaagctggatattgtaaaaagtcaaaaaattggatatactcacccgcccagttatgtggacatatggatcactttcgccaattacaactgttaagggatcattgcctaaccagccagctgaattaaaatgtagccaattaggatcgtatgtgtgtaacatgttaaatggcatacaatggaatttcccttgctatattttggaattatgacatgcaaaagtgaaccatacctttaatataaaaaaacatggtaacagagattactagagcattgaaaaccactacagttatccatggcgtggcaacaacaaaataacgaatcagaagcaaccagataactgacaagaaaagagggagcagtccaccgcaaacaattaacacaggccatgacttcccaatgtcagcaacgtatctctgcagacgaaggaaatggtaattaatatcttcaaagacaaaatgggactccagtgctatatagatcatgttgcatcaggaatttctcaaaatacttcaaaaggaatatccatttcagttgctagaaagtaatatgcttctttcagagcaacagtgcaacaaagttcttttgtaaggataaaaagaattactgcagtgtaatgtacggtcagcgttagctataggaatagctggataatttgtcacttccaacgtaaatcagaaatgtttatgacaaaaaaaaaggaatgtgcagataataaaacagtgccaggaagtttacaaaccttcaggactgaagatttagaattgatggccttgtggattgttttatctatgagaatattttcgtcgatgttgataccacccatctgttgccaatgcttcaaagagacatttgatgctcgcgcaataaattggcagctccagtagactgaaggcaacaaagattttggatcagctatctcattatttaaacttattacatgaaggaataaagccctcaatttaatccatgctcacaaaaaatggtcgcacggaagtgctacaaacagagcaaagattaccattcacacttggaaatataacagggtagcatggaccctgcagttgaagagaactatttctcatatctggtgtgagaaactcaaaatagtcatagtccctgtcgatccaatcatcgacagacaggcgaatgtccccttctggataatcacaaacaaagtttaatccgtctgctgctggcatggggcactccatcaggcagatggctttggcatcagcaaggttaatcttgttgtccttgaccccactttggtacacctggtttgggttcatccaatatctaacatcaagctcatgcaaatccgggtcaccatgcctactgccacaaatgttccctttgtagtctagttcataagtaagcctgtgtcatcaaaacaatataagacatctgtattacttagatacacatgcagcatgtactaaataggagtagtatggttactcatcatagtgtctgaataatagtaaaatgatagccatgcaaaagttgcacagcactgagttttatccctaaacaaattttcttttggtcagcactcagtagtgggttttggtttctattaatatataaccgtagtgtgaattgcttttagggagcacaaatcctgtatagctgggctgtaagttttttttcggagggaatacaattccaaggaccacacaactctaatatataagagtaaccactaaaggcacattttctccctgcaaagcaaaagtgggattctttacctatccggttgggaggttgaaacaaagcaagcaaagattattcgattcagagtacaaataacaaagtcgggagctagaagtttcattccgaaataagcaagatctgctattaaagtatttaatagcctaaaaaaaagtcatctgaatgttccatagtagcaagtggcaccctcattttctcactctatgtcagttcaattagactgaaagcctgaaaataacacatcaagttgaagaattgaccaggatccgcgcgaaaaaaatgagccaacaagaatgcgaaggtatgcactaaacacccaaacacatccaacaaggaacatagcccgtaacacctgaaaatgctccgttcttggtaaattgttgctgtctgaagaacagctcaaaatgtaccgcggcattaatcaccacccagcaaaggaaaagttccccggatgaacgctcttagcatctagctacagggaaccgaaattaaacagcaccgacagcacagatcggcgaatcttgaggagaggagaggtgaaggcgagtgggtgggtcacgggtcacctcacctgagtgggttgccctggttgaatccgaagctggagttgacgatcatggcgacccagaaggccgcgaagagcacgaggaaggccaaatcccggcacctccggttgtgccgaatgatgccatccccgccgccgccgccgccgacacctcccagctcatcccccccgccgccgcccgccgccgccgggtgcctgcctatgatggcgccgagtggccctcccattccgccgcctccgccgccgctcgccctcgatccgatgctgtggtagctcgcggttgtgcttcttgtgagcggaagtgggcgagctcaagctggctggtggagtgatgagcttgtcagtgtgtgcagctagcttttcttttttttttttggctttttgctgctgcggctgcgtgaaaaggagagtgggagcaggagacctggaaactttaccaacttcacagatttcgcacaaatttttgtccaagatttgatggtgtttcaaaagatttcgcttagatttaaatccagaaaagagaatggatgaaacggtttggtgaagactggatcattaaccacggtcaatggagtaagcttcgcaattaagagcgagatttaattaatatggctggatttggttacctgttcgcggccgatgggttgcccgttctggtcaaatgaatcgaccaatcgtgtgggtgcagttcgtggagcacgctactgactgtcgtcactgcatgcatgtagtggtacacgttaattacggtgaaggtacatggaaaataaaatgtctttttctttttcttttgcaagagcaagtaaaggtttcggaggaatacaagaaaggtgtccctgtctttcggccttcactaacagagattgttgcgttggctcgaggatgggatgggtgagctaggctagtgcaggaggcaagttggtagtacaaaactacaaatgttgcataaacatactattagtactacccctctttcaaaaagactatagttttacaggtttatatctaacgtttcatcatccgttttatttgaaaactacaggtttatttgagaaatttatgattagtatttttattgttattactatatgataaaacatgaatagtacatgactattttttttattttttcataaatttttgaaataagatggacggttaaacgttggacaccaaaacctacaactacacttaaaatgatatggagatagtaatatactccctccgtttcaggttataagatgttttgactttagttaaagacaaactgtttcaagtttataggaaaaatagtaatattttcgaatcatggtaagtttattataaaaatatatttaactattaattaaataaaactaatttggtaatataaatattactatatttgataaaaaaaacatcttacaacatgaaacaatgggagtatatctgattagtactttacatcacatactgatagataatgatggggtgacctctatgcatagtatagtgttgacttagactaggtcttgtgagcaggccatggtatttcttacatatactacatgttgtatcgttggtattcaaagttgaaatatgtatattctctttcaaattattcgcctgtccctcggtagctctttcaaatgactgtaactctattgcttctttagagccaagtagtatctcgttgacgcgaccccatactttacagtgggataaaaacggagcggatagtttctgtatgctctgaataagaacgaatatggatacctttcagatcggataattcccagatagttcggatacgaatacgaatattttctcatggatacggatacgaatatggtatcggggtttctatcggatacggataataattcggatatccagtgaacagtgttattcggatatctacagaagccatgagacataccttatttttttataaatctatgacctttaatatagcttttttagattttaacagtagttcatatcttaacactagttcacactattaatattatttacctttttataatatatttataaattatattacattttatataaaatgagctaattatatatgttgatatttgtttctataagaagttgagttggttttcgtgttccgagaaaaaaattatttccgtattcgtgtccgatcatattcaattcttattcatattcaaaattatccgtatttgtttctatatatggcaaaaaatataaaaacgaacatggtatgagcattatccgtccgtatccgctctgtttttctccctactctacactctacaggcatacgcgtacccatcgtacatgtacagatgaattttgcatgggctctacgctctatctagcccaccgagcctagaggagggctcgaaatgggccaggcccaacggggaaaaaaaacacgagctcgtcgccggcggcggcgcgcatttccggcacaagaaacacgcaaaatcaaaacacgcggagcacatggcgaccatggcgtggaggttggcacggtgtggttttccatcggtttcggaggcaatgcgtcatcctcggagctcgctgctacaaatgcaacctcacctgcaccgcctgctcgccccagccgaggcgggatcgatcttccaccgtgccgttgccagtgccaccgggggtgggtgagcaccgtcacggcgtcacctcccctcccctccctccggccggcatgacgatcgagggaaccatatatggcgggcgcggcggcgatggccctgttgctctcgaccagcgtgctgctcgtcctgtgccttctccccgtcgacccggctgccccgccggtcgccgccatcccgcaccgccgatcggggcgccacgacgtgccgttcggccgtcacgccgcgttcggcccgttcgccaccgaggtcgagctgctgctccacggcggcggcgccgtcccggacatcaggacgtgccgcgacacgctcgaccgcctccccgactggtcccacttcgacgccgagctcggccccctggaacggtgcgtgcgccgctcgccgcgctgcagaactcggtggtcttccacgcgcgcacgcggagtgcttgatgttttgcgcgcatggatggatgcaggtacttcgggtcggacggggagctgaacgtgaaggagcggctgctgtacctgttcccgatgctggaccgggcgcccaaggacggcggcgtcagctgcggcgagctggaggcctggctgcgccggcaggcggcggaccgtctcgacgccgtcgcgcggagggagctcaagaggcacgacaaggacggagacggcgtcgtcacgctgcgcgaatacctcgccgtcgaccacgatcaacacattggtacggacaactgtaattttagtgtcagtgtctgcacggtttttgttgacgcgtcgccacgctttaagcacgttatatgcagtccgcagcggcacccgacaacacgtcgtcgcaagggaggtagatgtaccgaatgaacacccaggagggaccccgtcagagtgaacgcgcgtcagtttatcctagtctcggcaggccagctagaacattctctaacatcatagagacgagagacgataagcaattgggggttgagaggtgaatagacttgggtacaagtagcaagaggaagggagatgtagaatgtagaggttagggcattcacaatgtgggaatatgggtgggtattacgacaccaaagtagacctcatacattgtgaggggatttttagggtggtctctagctaaagttgtccatatgcttatagcctgctcttatggcattaaaagaataaaaaataacttcactctctcaatgacaaagagaaaagaagagatggatggagagagaaacaacgattttttttaaaaagtgtgggtcccatcttaaggttggtcccaccttaataccaccctagtacatacacactgctgatgcccttatgggcaatagattgattttgatgattgattggttgttttttcaatctgccttagcctctatagttataggaggggtgatcttacgtttacatgactctttttcacgtttggaaagctttacaatcaagaaaaccctaagattaaggaaagaaaaatgaaaaaactcaattcgattcgaactatgtgctgaaggtctgaccgcccagacatacgtggtctgaccgtagtttattgtttggtctaaccggctatacattggcggtcagaccagtcttcacgggaaagctttggtatttttcatatttggtttgaacttgctataaatctaaactagtgccaaatttaagcgttaacaatttcattgggttatgagttattaactgcatagattggaccgacacggagcacggcgaaccaggatggtggctgcataagttcataagcgcggatagagatcatagcggcgccatggacttcatagagctcaacgagtaccacactcatttctgaacctttttttagattgttgagtacatcggaaattcaatagattaaactctcctaacccttggtctatgtgtgttgcatatatactatagcttcttgcatccagaagatagcagccaggagaaagtgaaattatggctgttgaaggataaattaaggcaagcagtgtccaaacacttgcatatacttataatgttgctaattacggtccactaatatgataaattgatgtatttgatttatctttttcatctgcatggatgcatggaatacagtggaatggatcacgatagagacgggaaattaagtttggatgagtttatcagtcagtttcacatgatcgaccacaactccattgtagagcatagtgctgatgatgatactagttgtgctgaagctgagaagaagtttcgagagctcgattctaacaatgacgggtaatacttgaaacagaagaaaatagcaccactttgtgtagtgaatatttgcaagataacccttttttactccacctttccccttttcagctatttgacagtggaagaagcacgtccagtaatccagagcctcatctcgggagagttttcatatgctaaatcacatgcaaagcttttgatgaaggtgactaactaaccataccaaatataactagtaagcaattttcactatttaattgataaccactataaactacctttttttttggcaaatatgataatgacataggctgatgataacaaggacaacaagttgtcactagaagagatgctgaaccactacctatctttctacaatattgtttacatggatgatcactatgactacgatgacattggcaacaatatccacgatgagcttaggtgacaaatttagccaagacggtatatataaactgttccctatgacaaacaaattatcatgataaaagctgtaaattatgacaaacaatatgaacgtgtacatatgggtaactacacgcgtaagtaatctgacatttgtgcgtttatactttccaatggaatatataacatgtttttgatagggcaacaacaggtggtggacccaagaaaattccaatgtgtgcccacatcagagttgcaaatactgaccttaaagtcttaataaacagaaatacatattatcaaaagtacaatatgaatatagttcgagttaaatctattacattgatttaacttataaattctagttcacattgattaattagaaaaatcatttcgttcacccaaattttccgctgctgctaaattcaatgtaaaaaaataaatcctaacaccctaacacaaactacgaagatgaagttgaacagtacaattggaggagctttcagctgtgtcatcatgcttctatagaagattacaagggattgtcgacttcttgtactaaggtggatcagtttgctattaagggtttcaatatctacagagaaacaatcatctgcaaaaataaggaagtccgataggtgcattcagaaataggatgcccatggattacagaactggtaatcatttttttagcctacattgatgttcaacacaaacaaactaaacagtgtaaaccgtataggcagtacaagatatatctcctttcactaatacaccaacatctttttgacaacgacctattcgattcgatgaggttcataaaacatctagttcagctaacattgacatttgcgacgttgtctatgctacaaagagaacataatcgtgaacagttcagaacacaaacctctcatgttgacatctacaccagcagccagatgcttcgctatgtcatcaattactccttcccttgcagaaacatggatatcaccaagttctctgcagttacagataagtttgttgcaattatggaaacactgtgatgtgactagatgactgaataaataattcttattagcatcaatttggagataactagtagcatactccatgaaataattaatcatgtcattgttatttgctagtactactacgatttatcagccataagagataatgtccaaatacaatactacctgcacttgaatcaaggcagttttaatacataagaccaaaggtacagggtatacctcaattcaaaaacttacgagtcatttccctgatcttcctcctcatacattaaactgctaaatacaggccccatcggtcccttcgaacttgaagcagatattgtgctatcttcatctttctttttccgaaatcatgtaaaccagattatcaaacaagtcaatatcaggggggcaaagcctgacgctgatagatgcttgaactaaatccagaaaaaaaaatcagggagccagggagatcgaatctaccacttggcgcgggccttgagcttgagggcggacggctgtggcgcagtgcagggtccctcggtggcgatcttgtagagtccgtagagctgcagctgggtatcaactgagaaatccaggatacagtcacattatacgtcttaacaactgagattgcatttttcagtttgcaacagaaggctcatcctgccagcgtactggtctgatcgcacggccataagcaaatttcaagttccagccccaattatgtaagcaaatttgaagcgaacaatattcagacattcagacaagatataaccttcttcactatcattgtattagcaaagtatagtaggagtacatacgttagatcaggccaggggtactagtcacgctatagaccagactttcagcatcagagtgcactaccaaaatggtgaaattacccactagccagcaacaaagaacataatgacaaggcttctacttaatttctccattctgacttaattctacttgcaagaagaagaaaagtcaaggcccttgagttagtctatggagttcactctgttcatccagtgtctccactaggagagggggagcgtactgcgcgttcccttggtgctcttctgaatcttgacagaaggagaggattatggtgtcgatcgacatctcgacgacttggaagaaaagcttggcgactataaaaccaagtgcccatgatacctgcagtgtagcagcatcagaatatatacagacacctttaggtcttagcaatggaaatggcatttgtcagtttgcgagccgcaatgacagaacgatgaaatgcttaccactacaggaacaagaggagatgatatcttgttatgtgcagacttgtacttgtgagtgtctaacataaggaaggcaaagagcgcacagaacaagctcacacagagcttccccagaaagaggatgacgtctccaatgacgttaacttttccaatgcgcagtatgttattcatgatcaaaccagttgcgagaacagaagctttgaagaaccctttcccagtaatggctatctgcaacaccaaaagaagggtataagcctaatgaattcaatacaagcatcaacttggatagtgtatgttttccagatgattttgcatccacaccaaaacaaagcaggggagacaattggtttcaggcatggagcaattgctccatgaacaagaatttttgtatgcttaccattatataggcatttcgattcacagacttgagggtccagtctatgcagcccaggcagcattgagaagaggatgatgtcattttaccaaagcagctttcacgagcggaatcaaatagcttcaacttgcgtctgaggcattctagtataaaccgcacccactcaacagcagatacaacaagtgaacctatagcaactgaaccaaggctgtaacgcaacaaccgcttcaatgaagaaacaactgtaacaaatggtatgtcatgctgcataggaatagctcaaatagtcagtggaaaggagaagtaaactaactgctaaatatagagtaaattttttaagtgcctcaattcacttacggatatttcaccacgtgcccaatagtatgaagcaactgatccagcaatcacggttgaagagcacgcaataaagaattgggttgcccagtaacagccaaataagtggaaaagaatggcaataccaatatgaggggtgtaatggatgctgtacccacagcagttgtcacagtttactttgcccaacttcagatcatatgagcaacaatctgtattgcagtcatttcggagaacttgaccagagctgaagagatggagtgtggcagaaaaccagaacatataaaagatagcgaagataaagtatggcacaactgggaaaataattagtgcctgaacttcaccaatgaccttcgcagcaacctgaagataacaattatcatggttagtgcttaggaactatatattaactatactcttgccatcaaagaggaggaatggcattgatgctgcatgtcttcaaaaccaagcttctgcttatatagtgttttttttttgcgaggtgcttatatagtgtagctaatcaagcttgtatccaatgattcgcgtaccttcaggacaggtgttgctatcagtatacgccggataatagctatggaggacagaaatgcaatgatcattacaactgtcatcaccaccgtagcagcatgaaggtggcttatttcctagtaaaagaatgaataatcagacaacagggctggatattgtaaaaaagttgacaaaagttgatatacttacccgtccagttatatgcacatatggatcactttcaccaattacaactgtcaagggatcattgcctaaccagccagctgaattaaaatgtagccaattagaatcgtatgtgtgcaacatgtgaaatggcatacaatggaatttcccttgccatattttggaattatgatttgaaaaattgaaccatacctttaatataaaaaaacatagtaacggagattactagagcattgaagagcactacagttatccatggcatggcagcaacaaaataacgaatcagaagcaaccagataactgacaagaaaagagggagcagtccaccgcaaacaattaacacaggccatgacttcccaatgtcagcaacgtatctctgcagacaaaggaaatggtaattaatatcttcaaagacaaaatgggactccagtgctatatgaatgatattgcatcaggaatttctcagaataattcaaaatgcatatccattttagttgcaagaaagtaatatgcttctttcagagcaacggtgcaacaaaattcttttgtaaggataaaaagtattgctgtggtgtaatgtacggtcagtgttagctataggaatagctgggccacttttcacttccaacgtaaatcagaaatgtttgcgacagcaaaaaggaatgtgcaggtaataaaacagtgccaggaagtttacaaaccttcaagactgaagatttagaattgatggccttgtgtattgttttatctatgagaatattttcgtcgatgttgataccacccatctgctgccaatgcttcaaagagacattggatgctcgcgcaataaattggcagctccagtagactgaagggaacaaagattttggatcagctatctcatcgttttaacttattgcatgaagaagtaaagcccttaatttaatccatgctcacatggaagtagtacagactgagcaaagattaccattcacacttggaaatatgacagggtagcatggaccctgcagctgaagagaactatttctcatatctggtgcgagaaactcaaaataatcatagtccctgttgatccaatcatcgatagagaggcgaatgtccccttctggataatcacaaacaaagtttaatccgtctgctgctggaatggggcactccatcaggcagatggctttggcatcagcaaggttaatcttgttgtccttgaccccactttggtacacctggtttgggttcatccaatatctaacatcaagctcatgcaaatccgggtcaccatgcctactgccacaaatgttccctttgtagtctagttcataggtaagcctgcgtcatcaaaacaagataagacatcagtattactaaatagtagtttggttactcatcatagcgtctgaataatagtaaaatgatagccatgtaaaagtcgcacagcactgagttttatccctaaacaaatttcctttggtcagcactcagtagtgagttttggtttctataatatataaccgtaatgtgaatttcttttagggagcacaaatcttgcatagctgcactgaaagtttttttttttttgagagagagagagggaatacaattccaaggagcacacagtctcactccggtgctttctacttggagtagaaagtaatctggatcgttgatctcatttaatccaaggtttcagatttatttttactaccacctcacttaacggtagtagaatcgtggagggtattattgtctatgaaaaaatatttgcggaggggtacaatcgtcttttacattcactaaccctagtagggctctctcctccgtcgttcgttcctcacgccgccgcacgaagagaagtcccaaatcgcatccggcgccgacgccgagcgaccccgcctcgtggctcctcccttcccccgccatcaccgcctcagccgaccttgcctgctccaacgtcctcgcctcgtccgccgccctcacctctttcgccgcgtctgccgcctcaaccgccctcgacgattcctccgccctcaccggcttacggcctccgcctccctcgcctcttctgccgccctcacctcctccgacgcctcagcctaccgatagcgcgggcttggcgacgtggtgagtatacccctacatctctcggtagtcggtactgaaatcccaagctattactatttgctagtgagaaggtttgatatgaatctctcgattccacttttatctgttgacacactgtatcatgctactcggtcagcctgcgcaacgacaagcactgcagcatcgagaactccatgaagaacaactgttccatctgttatgaggtgtgttcttctaccagaacataacagtgatgctaccttctgtacctactgttcattaaaaatccagtctcttatgtatgaaactgtgatcatcgatcacaaatgcagtgctcatcatcacataagaggtaacgtcctgtccttccatttactcccatgcagatcagttactgatctttgattgctctattcgaatggtgtagttgaatgtaaaaactgaattctgtagtcgggttttgtatgactgattagatgaatgcttgttcttttacggaactatcaatttagcattggttagtaatgtactgatcagctgttttctcttcgggaaaaagaccttgaaaaacgaaaataattcgttcaggctgttagtagtaggttcagtacatatatttggataatgcatgacagaaatcttgaggctttaaaagaactacaatagtacaatgcataaaggaggaggcaacaactgtgcatgtttgtatgctaccagaaaatactagtatcctacaactcacaactgaattgtgaactagtatattgaaaaatttatagtaattccattacagctaacaaatgtgttctgttgagtaccctgatgaagtccactccctcgtgttgctggcaagcctcacagcattgttgcctcttatttggcatccatttcctgcaccgtgcatgttgtttggagttgagtttactcatgttattattgaaactagctgggtggcccgcgcaattgcgcggctagcacccaaacaaaatcgtatattttttagtataattttacttaaaatttattaaatagctatctcgttgtcttaagactttgaaagactaaactaaatagctatcatccccgtatttctaattatatagtttttaaaagtcacaccagctgctactccttacttctgtcatatccttttttatttgcttgctcgatctaccgctatttctattcattctccttgaaacctttaaaaattagatcttatagtttttagagtttattgtctcgttgggtttcgtttttataatttctagaagttccgtcaaacactgccattatacttctctacagcccgtgcactgtcttttctctttattatcattgggattttcaaaatcgaacatagctatcgttcgggttcaattttttactttctagaagtcccaccaaaccattagcggctttgccactgtactccttaatggctcacccgttgcctcccttctttattgtcattgggttttttttttactttttagaagttccgaacctttaaaaattgaaccttgtagattttagagtttattgtcttgttaggttttattttttataatttttagaagtccagtcaaacgatgccactatactcctctacgacccatctgtcgcctactctttattgtcattgggattctaaaaatcgagcataactatcgttggaattcattttttattttctagaagtcccgccaaccgtcggcggctctgcaactctactcctatgcaccccgcccgctgcttctcctttttattgacattgagattttaaaaatcgaatatgattatcaatggggtttattttttttgtcccggcaaccgccttgcctgtttgcttcacggcttgcctgtcgtccctccttttaatcgtcattaggattctatttggtgttttattaacagtttttatatgtcgtattaaccgtccaccaatgtactcctttataggcatgttacttaatttatctcttcaggtgttttagacggtcttttctttcaatagtttttattttatatcatcatttttagttatttacaaattgtattcctaattgaaatctttttttctttttataatttcagaatttatattttttttcaaatttttatttaatttatctcgtcatgtgttttagacggtcttttctttcaatagtctttctttttatcaccaattttagttatttacaaattttattcctaattgaaatcttttttatttttctaatttcagaatttattttttttcaaattttaattaatatcatatagtgtaattttaatattttttttttgaatttaagttgtttcaaaattatattcctatttgaactctcttttagtttttataatttttgatattattttatttttattctgaattttaattaatctcgtattgggttcttatatggactattcttttaatattgcttatttttaattccgaatttcagctatttttaaattgtatttctacttggacttttcttttctttttctttgattaatgtgagaatttctagcccccacaacgaacgtggtgcctcctttcaaggctgttttaataatataatagattggatacaggatgatatcctataactccgatgcctctgcaacacatctccggatcaactttcgggtaaacagctactaatttatctgtggcctgactaacattagttgctcataatattttctatcttatcttacaattagtgctgtgaagcactcctatttgtttagtttcttgagggaggctcgaagctgtttctgatcttatcagagactagagaagaaaggagaataaccagatgccaatgcgaggctcaaggagtattttaaaagtcatgtttttatgtgacctcaactgtgcttacatgtttattggtccaatgcctctctgacttctttgatgttggctcgaaactgggataaggttgtaattttgcacataggaaaacctaggaccttgaattgtatagttttagaaatcaagtttttatctgatctcaactatgcttacatgttctggtgcccttgtgacgtcatgttcggtgaatgagtgcaagtgctatctatactgttgctctgtgtgcatgtgtaaatgtcaatggttccacaaaacagttgatcagtaaaaaagcagctctttctgagattggacgatgtcaccccaatcacctatcggtagtgtactacacacggtccaattttgaacaggataatggtaatgttttgagtgttgctaacgccagatggtttttagaaaaaagtctagaagattttcgttcacgaaaataccatcaaggagtcacaccaaaataccagaaggatttaccatgtgagaaatttaccaaacaaattgcctgcagacattagcgaagcagagcgttgcgacagtgatgaacgctggctgagatctaccggaatagggcaacaacggcaatagtgctaaagtcagcgaaggatcgatgcgatacaagattgaaacgtaataaaaatcacgaatattttcctaataccaagtttacccctaatcgtagtactaacaaagtactaatatgcccttggaaatcaacggtttggattatttctagttgtagtatatactacaagtagaaagcaccggagcgtcgcccataggagtaaccactaaaggcacattttctccctgcaaagcaaaagtgggcttctttacctatcctgttgggaggttgacacaaagcaagaaaagattattcgattcacagtacacataacaaagccgggagctagaagtttcattccgaaataagcaagatctgttactaaagtctttaatgacctcaagaatgttccatactagcaactggcaccctcattttctctctctatgtcagttcaattagactgaaagtctgaaagtaacacgtcaaggtgaagaagaatgagccaacaagaatgtgaaggtatgcactaaacacctgaaatagctccgttcttggtaattattgctgtctaaagaacagctcaaaatgtacagcggcactaatcaccacccagcaaaggaaaagctccccggatgaacgctcttagcatctagctacaggaaaccgaaatcaagcagcaccgacagcacagatcggcgaatcttgaggagaggaggggtaaaggcgggtcacctcacctgagtggattgccctggttgaatccgaagctagagttgacgatcatggcgacccagaaggccgcgaagagcaccaggaaggccaaatcccggcaccgccggttgtgccgaatgatgccgcctccatctccgccgccgccgccacctcccagctcatcctccccgccgccgcccgccgccgccgggtgcctgcctatgatggcgccgagcggccctcccattccgccgccgctcgcttcgatccgatgctgtggtaggtcgcgcttgagcgagacagcgagcgatctgtagcttgggagcagaagtgagcgagctcaagctggcggggctggtcgagtgatgggcttgtcagggtgagcagctagctttttgttttttttggctttttgctgatgcggctgcgtgaaaaggagatcaggaaccttttccaagtttaccttttccaaaatttctataaaggcatcacgttgaatcttttgacacatacatgaagtattaaatataaataaaaagaaaaactaattgtacagttagaagagaaataacaagacgaatcttttgaacctaattagtctataattagccataagtgctatagtaacccacatatgctaaaaagatgatggatgaaacgatttggtgaaaactgattcattagagagacgctccggtgccctctacttgcagtattctactccaagtagaattaatctcgaccgtttattttaaagggtaaattagtaaagtgctaaaaccgaataggggtaaatctggcacttaatttttttctcatttgtgcgtcctatggtcaagcgtcgctcgatccctctccatcgaacagcagagtcgctctccatcaaaaaggagagcgcagggaaagaaaaagaaaagcagatcgcgaggtccggccaccgccggcgcttgtgcatcgcgttccatagatgtttcttgctgtaggtatttggtttccattcagcttgattgtttcatgtaaaatttaaatatattagttatatatctgaatattacacacgatggacaaatcgaaacactccaatccagcaatgacagatacaaggcaacggaagaataatccggtatgtttttttacgtagactttacaattgcaattacaacaagtaatatacattgaaccacgtacaaaaacgatgatatacacagataggcactttcaaaaccacaagctgttaataagctatagttttgaaaaaaaaaacatggccatcagtaacaagccaaagccacccaaagccatcttgagataatgaattcataggaattacaggacatagcacaccaggaatctctcaagcgttcattgacgtagtgatcattagcttgtccaccttgtcatgctcagccattctgaacaagctcacttgctccggattcagtttactggcattcaacttgaatcccttcttctaggaggaaaaattatgaccaagaactacagaacttgagtagacaagcagaaaaactattcgagaactagaggccaacgaaaaagaagattcagtgcagatgttcgagctgcaaacctacaagcagcaagaaaaacaaatcaaatctgacctgcaaagcagaaaaagagtcttctcatgtcagctaatccgttggagagcagcgctatagccagcgagaggagtcttggatgatgattcggaggtcgagagattggtggtcattggctccggaggttgcgggttccgcttgggaggcgatggattgggggctcgccctcgcggctgtgggatcaacggcgggtggagatggacagggctggagccgagcgtgggggaggaggccgacgacgaggaaggggatagcgaggtggacgaggtctcggcggcggccagtggcacggtgctgggtcggaggcggagatccgggaggcgaactcgtcggaaggtgggccgacgcgggggagcggcagagagggcgcagctctggcgatcccagacggagatgcgagctcgtcgagggcggctgaggcagccagtgcgacggaggcgagggagtaggaggcgtcgagggcggtggagcaggcgaggtcgtcaaggtggtgatgggagccgcggggttctctccgcatcggctccagatgcgcgattccggaaggacgaaaatatccctccgcagataatttttcctggataaaagtacccctccacgattctactaccactaagtgtggtggtagtagaaatagatctgaaccattggatcaaataagatcaacggttcagatttttttctactctaggtagaaggcaccggagtgagactcgattcattaaccatggtcaatagagtaaactaagagcgagatctactaatctaaagctgacggttaaactagcttttgattgggccacgtggcacccataagttatcaaattaatcctagatttcatcaaagaaaaaaaaaatcaaaagatagaaaatggcataagttttctatgacaattctaaaagcaagcagtaccttaatctagttcttaaaaaaaatagtaacttaacatcacaacatgtataacattagaacattccgatcaggtgggatcaaaaggaggatgtagcccatatatgctggtccacttaaaacttacatatagagacatttacttaaagaccctaatttttttatttgggagagtgatccagttgtagaaatcgcttaggatttattgccaatttacaacatatattgttgagaattatacatttccatgttattttttcaaataggaatatcgcaaatattccattccacacatcttttagaattaatcattaaaaattaaactaattttgtatataaccccatacatttaacctccctagcttttagtatttgaatttcacgtacattggtccatccatgtgaacaaattgacttatcttacaccacttactttaacttgattttgtggaatatgtctaactaaatgatttccagttgatacaattgccatgtgttccagaaataaatttcattccaataatttcatttctttttttatcagcctatttgcttctgcttgtatagagtaaggtattcaatctctcaagaaaaagaaggaataaaaatggtcaatttatatatatcgaacaaaaccaacaataccaccgcatgctatattaattggagcgctgaccgacgaacctattttctagttaacaatatggctggatttggttacctgctcaaagccgatgggttgtccattctggtcaaatgaatcaaccaatcctgtgggtgtatttcgtggatcatactaataagacattttgctcatgttgctaatatgactatagtgtgtacttcaatcattatggcatcttctcgaccttggactatcacgtagatggttaccaaagaatgcctctccttcatggtaaccttcatgaggaggtatacatgcaatcgccttttaggcgtggaacatttacttttgttttctctagttctatgtgccctagactagccggtttggtcagcgtcaatgcatcacgtcaatcgaagcactgagtaagttgttttgtactggttttaatacttaggggacgcgagatataaccggttttgcggttgagatatacgggttagattcagctgatagttgagggagtcaaaaaggactttctgttcatgtaaaataaaaaaaggccggatcgggtaaacgagttggacttatggtacttaggcctggccgtatttggttacggcttttctccttccttttccatgtgtagggtttcagccgccgataatccagagacgtagggtttggagagtgttcgagaggtgtcgatcgcgggcggcgatgagggacggcgagcgtgcggaggtcggggcggccgggaagaagaggaaggaggtgagcgcgtcgtcggactcggagccggccgctgcgtccgggaagaagacgaagaaggagaagatcctcccggcgtggagggccaatgcgatcccatgcgaggggggcgaggtcctgaggaggaagaaggaggcggtggcggccggcaagctgtggagcacgccggatatcccgggggcgatggggagccatctctgggatccgatcgaagtcccggcagagatgctggagctgtggctggagaggcaaaaggcgaatgcggaggccgcggctgcgaagaagaagaagaggaaggtgttcaagtgcagggtgccgaatagcctcgtcgaagtgatgatcgcgcggccctacaagtgcgttgatcacgatcgctctcaggaggagctggccgaacttactgtgtcacatcgccagggctacatcctcaggaagttcatcgatgaaaagaagatgaagtacgagcagaccctcatcgaccggtacgtcaagcagggctatgcggaggacgaggaggaggtcaccgatgacgatgacgattgacgacgaagatccagctaccctaacctaggtcaaatgtctgctgatctgctcatcaatggctatggtgtaatcatcatcagtatcatctcctatcttatatggtgctccacttaaaacttgcatacagatgtatttacttaggctctgatggggaacctagcgcatgattaattaaatattagctaaaataaatttaaaaaatagattaatatgattttttaaagtaacttttatatagattttttttgcaaaaaaacgcactgttagtttgaaaagcgtgcgcacataaaacgagggaggtgagttgggaaaggggagataagaccctgtttagatgggactaaaacttttaagtccctatcacatcggatgtttggacactaattataaatattaaacgtagactattaataaaacccatccataatcttggactaattcgcgagacgaatctattgagcctaattaatccatgattagcctatgtgatgctacagtacacattctctaattatagattaattaagcttaaaaaaattatctcgtgaattagtttttatttatgtaattagttttgtaagtagtctatatttaatactctaaattagtgtctaaatacagagaaagttaagtctctggatccaaacaccacctaagaacacagccttaatgaccctaagtttttttttattttgggagagtgatcccacggtacaaatcgctcaatttataattataacatactccttccattccataatataaggcacaaccacttttcttagatgttctacaatataacgcatgcatgcaagcatgcaattaactatgacatcttctccattaaattattattatttttaaatcctctactctcatgttatctaatcctattggatgcatgggttatatttattaggatgattcaaactacaagatgataataattattttttagtatttgggttaagggtggttgtgtcttatattttggaatggagggagtatatagttgagaattatatatttttcatattattcttttcaaataggaatatcgcaaatattccatttcatacatattttagaattaatcattaaaaattaaactattttttatataatcccatacatttaatctccctagctcttaactatatgaatttcacatacattggtccatccacatgaacaatggacttatcttacaccataaaaaaaggaaaaaggaaccttcatgagatatacatgcaagatgcaaccgcctcttaggtgtggaagttccaattttttttctctagttctaggtgccctagattagccggtttgatcagggtcaatacgctacattagttgaaacagtcgagtgaattgttttgcacggttttaatacttaggagacgcgagatataacccggttttacggttgagatatatgggttagactcggccaatagtcgagggagtaaaaaattgacttgttttatgtaaaacaaaaaaaggggccggatcggataaacgggttgtgcttatggttaggcctggccatatttggttccttcatcctcgctatcttttattgggattgctatatgtcattcgactgaaatatggggatgaaatcttacagattttggaccattggatccatgccaagatttgtgctccaccttctcccctccaactccggcgctggcgacacccgggttagggtttagggttggggtgagggtaggaggaggggttgggggagggggaagaggggggcttagagggatggccgtgggtggcggaggaccggcggtgggcggcgaggcggcgggggctaagcaagagtgcggt

SEQ ID NO: 8830 - DNA, 11381 bp, Oryza sativa
tggggcctgggaataatggtagaggtttttcttttcatttggccaatttttaaatgacatagtgttgccatacccgccccccccccccccccaaaaaaaaaaagtcattggctgctactggtcttagaacgacgcctttctatattatggaacattatggaacataatgttttgtgctctgcagagtttgaaatcgtttcttggagatgatcagctaaaggtgagccttttttagttatagtgttgcttgttcacacataaattttaaggccatgcaatcgatgatacatgttctttgcaggaatttattaacttcacgcttcattacattgctgacttggacatcccaatcaaaaggtcagtgaacaaacctatctactaattcccattgggcaacagctccttatggaccaaataactgtttcatcaggggtacattcatagagttccgaagtggaatgctgaatgtgtcgcccatagggagaaattgtagtcaagaagaacgtgatgagtttgaaaagtatgataaggtacaaacaattctttacaaagagcaataatttgttatcattcaggcaccatgaaacttaactgacttatttactataggtacataacattcggcctaaaatggtctcagtgcttcgtgaaaagttcgcccacttgaacttgacattttctattggagggcagattagttttgatgtaagccttctatcctcatacaaatgtgccagaaattattggtttcatgatatttactgctgtatcactttaacaggtgttcccacaaggctgggacaaaacttactgcttgagatatcttgaggaatttcaagaaatccatttctttggggacaaaacctacaaggtgatatgtactctttttagcaaaaaagtgcttcctactttatgtgtggttaagtattttatccatacaatgctagaataacaccttatatatgctttgccccttttatgttcactacagtatattcttgttgttatctgtctatcatattcaactatataacatttccactatttagttcttcgcctgacttttttttcattcaatagggaggcaatgattatgagatatttgagtctgaccggacaattggacatacaggtgtgctgtttgtttcataaaagctattattctcatgacattactgtatatgcgttggacttgaacttcttgttataacttaaaacttgtgtataagataggattaggtttattggacacaaaaattttataatgttactgtgagacattctataaccatcagcacacagtcgtagatcagactgtgaaacttgggtattgacccaaccagacaggctattccaatcaagcaatactgcacagatcatgcaaatgaatgttcagtagcagtatacttgctggcagtttccatcattagaattgaccaattcaggttaatgttcatgaataaaattcagtttgaaacaaccacaaacacttgggtcaagtcttgaataaacaaagcaataacattttcttctggaaatacttcacaagttccattatggttgagctgtatcctcttactaaataggaatactcttgcaagcttctcatatgtggctgagtcttgtttgccgaggttaaacttgctttaaatcttttctgagctaatacatgattgatgccatcaccaagctgatttcatcatttatatttgcagttaccagtcctgatgatacagcagagcagtgcagatctctcttcatgtcgaagtgacctgattaccgtgcattttatttattttacatagcattcctcacatttcctgtatttcccttttttttataccatacaagtgctgcttcttacagaatgtacttctccgtattcacaagtttcagattatatgtgtacactttggttcaaataaatgagagctggcattgtttaccccgtctggctggttttaaaattcagaggtgtaaaaggataaatatacgcggacgtttggttgtcactgttagttattttctgctaaatccattattcatatctgcgagcaaggcgtgaatgtgtggcctttgtgaatcaactgtagtataaacgattttcggcttggcttggacctgttaatttgtgattccacatgaagtgtaactgtgagttagctggttgaactgccagtgatttccagttttttttttttcaccaaatcttcatgcagcacagtgaacgccattgaacctctataaaagttttactttccacacacaacgtctacttattattgcaatttagctgtactttgcgtacagctggaacaacaacgttgtgggacaagaaagtgaaacagaaccagtagaaccagtaagtgaaactgaactgaagacgtagttatacagtagtataaagctgtatacacaagaagcaagcaagacagaaaaactcaacgatcgtcgacctgggtttcccaaaccgccggggctgggttaccgcgccccggcggtaagcacggttaccgcgcggtaaccgtgataaaccgtacgaaaccgtgcaaaatttatcaaaaatttaaattattttttaaatttatttgaatttaagaaggttatcgcggtatttatattaccgtaccccgcggtaagcccattaaccgcgataaccggcggtaagtcgaatcctgggacgtcgacacgcgcatattcacctcatgatcaaactgaaccaaatactgaactgaataaagcagttaacattccagaagtactacaccgtcaaccagacaaacatggaaggggacagcaacttaccttaacaagttcagatagcatgaagctccaaccaagcatctctcactcatcagagtggtcatcagttggcatcatgattcataaacaaacatgcaatggttccacatagaggtttttaccattacattgcactgacattgttttcatctaccatctagctcagataacctgacctctaagaagtactgtactgacccaataaagttaggacatggtcttttctccaaatgggaaaaccagtcaattaaagagaaatctccctacaaaagaaaacgttgacgactaataattcttaagtgatgggaaacttaggtagattcttccatcaagttagatcaagccacaagtggcctgaagtgaatggtgctagacgattgaacgccttttgtggccacctcctgactgtgcaaaatgatcctttgaacaagcttgagaagcattggacccagcagtacatttcttggagatggcatgaggctcaaagccaggtggaccagcccaagctgttggctgtgactcagaacaattggcaactttgttcgacgcagaagagcaatctttctcagcaaccaaatcgactgatttagatccaggcaacctttccttctgagatgtttgagcagcagaagcatcggttgcagatgtagtggtgacttggcccaggttctcagctgttgtattgtatgcggattcatcgtaatagtgcggccaataggacgtaggtattccgacagccgcctttgcgggatcatgcattgtgaagtgggagtagaaatgcgccatgtaactgctcatagcatctggatgaacaccagctatcctaacctccaacacatgcccatccagagggtaaccattcatgtgagtgagagccacagcagcagagtaagcatcagcaaacttgacaaatccaaatcctttgctcacaccagtgtatctctcaacaactacttttgcttgagtgatttggccacatggtaggaagaggtcgataagtctttcgttgttaacatagctcgggagatggctcacataaaggttagtcatgtcgatttgtccctgctcattagaagacatctgtgatgtcagagcacccttggctgcattggattctgctggaagccccgcgactctcacagccagtatgcttccaccaatctggtagccatccaaatgatcaattgctgcagcagcacatgaaggattatcaaacctaaccatgccatacctctgaaatcgaaacattctagcttgaacaactcgtccaaatgggcggaagagatcgatgaattgatcttcagttaaacttgatggaaccctgccaacatagagattggccatgtcgatttccttgattggcttgccacctgcttgtgaagcgttggttgtacataactctgatctcttgaccactaacctctttccttcaaccatgtatccatccatgtgttggacagctttggtagctgagggtgcatctgcataccacactagactatactccagattcatcaggactttagtgatctgaccaaagggcgcgaaaagattaaccatcttatcggcagtcatcgaccgtggaagattagtgatgtatagtctagacttgttgatgtcttgagtggtctgtacagctgagatggatgctgatggggaaaggcctgcaactctgacaattatcatttctcctccaaccaatgctccattcattgctgcaatagctttggtagcagattcagaatcagtaaacttgatgaaaccatatcctttggctgaaaaggtgtcaggatctgccaccactcttgcatgggtgatcttaccaaatggaaggaaaagctcaaccaacttcttggtgtcaattgacgatggcatgttacagacatacagattagacatgtcaatttccttgacggttctggtggtgctgggtgattcaacagctgaatttctggtggtgctgggtgattcaacagctgaatttggcagtgttgaaggtatgccagatactcgaacctctatctttcttccatcgacaagacgtccattcaaatggatgacagcctcagctgcatggtgaggactagagtactgcacaaagccatatcctttacttaagcctgttgtgtgatctttggccacctttgcattagttacttccccaaaaggcagaaaaagatgaatcagcctgtctgtgttcatggacaaggaaaggttgcacacatacaatttagccatgtcagtttcctttgaaggctgctggctattatcctctgatgatggaaaaccagctactctgacctctagagctcttccttcaaccaagcgcccattcatgcgcttaatagcttcagaagcacagcgaggatcagaatacttcacaaagccatatccctggctcaaaccagtgaaacaatcatccacaactcttgatctgacaatttgaccgaaaggtagaaatagctcgatgagcttgtgagaacctacagaagcaggtaggttgcccacatacagattagtgttgtccacttctttcagcttgccaccatcctgaggaaacgaaggtggagtgtgttcctgtttcttatggaggtgcttgtcctggtcatcaaactgagctttccttttctccaactttgcagcagcaaaactctcggtactgtatgtgtaacatgatacatcatcagcaaacttgacaagccgttttttgaacggtttcattcccatttccatgtccactggtatctccttttgcttaatgctgtaacccattttctgggcctgcttgagctcttgctcatttcgttccttcttgaaagcttgcagagcagagttctcaacagattcctcctcaccagccaccaaatcatcatatggctctgcttcatgcataagcttcctgcaagtactgcgagaattaagcaccagattgatgaaatgctccacatgaaatgtgtctttgccactttacctgtgcacctcctcttttggtactgaatcatcacagggatccccacatattgaatcatcattgccatcgtcttcatcatcataaaacacacgttcatatggttcttcttcctcactgccatcttcatattcagcaccagaattcatcttgtcactgaaaccctcctgctgagcagccaaagtcacttttccacctcgtaattgtgcctgcaactggttcacaaagaagaggttctgaaaaaaaaaagaggattaacaagtgtttgagtaacagtacacatgcaaaaaaaaaggaggattaacaagtgtttgagtaacagtacacatgcagaagcttagagcaagtacaataggagaattaagcaggctataatatatccatcatggcaaaaaagctgagttggcggagggaatcaaggacagagaacttaagcgggcgactatattagcgccggctgcacgcagcctccaagactaggtgaatttactgcaattggccatacccttgcttacgcatagtgattgggtactagctgttcaggataaatggtgattggacagcaatcagtttgtgcatgcagcttttggcctgcccaaggaagaaaacgcaagctacatctatatactatatagcctactaaatgacatggcgaattttatagccagcaacgggcggtattattgatcctgctcttataagaagtaagcaatgtgcctcccaacagagagctgtgaaatctgtttatatatagttcaaactcatgtaaatttgcactgcacaacttgttacttctcttgtagttctatgttgcttttaacatcaatgccaacatgttatagggcacacattggtgatgccatcatgacaccatatttcacacatttatccgtgcaaaacaagcaaacatacacacaccttcctaaaaatataataatttcatacgatctgcagcacagtgacaccccggtgagatgacaaagtgcaaataatcaaacatcgcgttacacatctctagctgccccattgtagcaaatttgtggtttctttgccgtcaataatccatgatctctgcatattatcattccatcacagaccttctattctcaagaactcaccatgctttataccaacacaaacagtagtaaagaaagcttctcaaggaaatatgtgcgcagtaacacaaacagtacacatgcagcagctataataagcaagcagtgtgcctcccaacggggagctgtgaaatctatctagttcctcacagcttggcgcccttgcctattaatctttgcacccatgtaaacttgttagtacttgtcttgcttttaatttgttcttaagatgaaatagtcaaaaatcccgacatgttataacttataagtcatctttttttagataatggaagctttatttaacttataagtcatacgctggttatggcatcaagattcaagaggcaccacaattttacataaccttcctcacaaaacaattaatactagtgatttcacacgatcttcctccaaaatattaccaaaaggaaaaaaacaaggaaacaatttcacaaaacccgcagcacggtgataccatgacatttttaacactccacatctctagttagccccctgcaacaaatttgtggtttctgtaacgccaataattaatgatctttacatttttttagcatttccatcacaacccattaattcgcaagaactctccatgctttacaccaacgcaaacatcactaaataaagctttcgaagagaacaggtgtgcgctaactgaatccttgcatcaaacacaaaaccctaaaaaaagaaaaagaaaaaaaagagcaaagaatcaaactataaccaaaccccacggcacaatcgcacagcacaaacaaaagaagcacgcacgctggctgaagatcgcggggggttaacaatcaaaccgattgcttcccagcaagaagatgaacccagaaggccaagaaccatgtaccatgttccaagcggatgaactagtacacaaaaattaaaagaaaaaagaaatacataccaaaatgccaggcttgttgcagcgcgcggggttcgatcctggaggggagtagaaggagagggggaagttggaagaaggtgagagaagggccaagcagtgagtggagcagtaacaatcccgagaagagaggaggtggtggaggtggtggtggtgattaggtggtgaccctgcgtctccctctccctctgtgtgtgtgtgtttgtattgtgcgttgagaactgaggatggatcgagagcagcagcagcatgaggaaatggattcattttctttcgcatggaaaaagaagggaaaaaggaacagtaattgcgtgcaggccctgtgcagtctgcgagcagggaagagaaaaaaaaaagaagatttgtcgttacacagggacgtgaaaggctgaagtgaaggccctgtatatagtctactcctacaatctacatgtctaaaataatataatagcaatctaaaattagatagaacattttagggtgtggatcccctggagttgcctccaaatccacacagtggatttacttaatctaagccatccctttaatttgatggattagattaaatccaatccctttttccctggttactactagcccattttctttcaaaagaaatactacaatgtagagtctataaaaaaatattatctagtacagtagagaacatgttacctttaaactttctgacaacaattagataagaacaaacaaaacaaaaacattgcaccgatagaagcttcttgttctgtcgattattagaatgaatgagttcgatacaggtctcaataccgttaatttcttaacaactcagttaaaaaagtttaaagataattattttttactccatgatgtataatgctcttccgagactattgatctgaatggacggacaacacaaaaaaataaatttagataggattatttctgttgtaaatgtgtaattagaaagaggtgacatggctacatctaacccatataaacaaagtaaggggtcagattggtccaaattcaccggttgaagttggaagccaactccaggggatctgcacccaacattttatagtacaacgaatttgaatattcttttattcagattcgttgtactataaaatattttatctggttttaaattgctatattataggataccggttgctatattatggaacggagggagtacacgtatagactgtattcatttctctcattgggttctcatgaaaacttttcttttttcatgtcaaaagaaaaactttttttctttcatttttaccctatagtaaagctataccctctagtaaagctactactacgtactccactggtactatttagatgatgtttggattcagtacctgtcatatcggatgaatttaaagtattaaacatagactacttataaaactaattacatataaatgagagctaattcacgtgacaaattttttaagcctaattaatccataactagcgcatgtttactttagtatcatataggctaatcatggattaattaggctcaatagattcgtcttgcgaattagttcagggttatataatgggtcttattaatagtctacgtttaatatttataattggtatcaaacatctgatatgatagggactaaaaaattttaaaaagttttagtcatatataaacaggtcgtacgtgttgccgtgttcatgctaaaattgtttagcgtgccggctgcaaactttgcctttctatcatcgataggtaaacgcgtgtggagatgggggctgaaatttcgggcggcacgccttagcgagaaagtatgaaacgatttacacttccttatttcaatgatttagccctattagctggtcttaatgcaactttccatatctcatagataaccgttatctcatactaggtattgggagagtagaaattttcgttttgagtccatcgatctcatcttattcatgtgtttttcttttgatatattcaaatggatattctgtattttataatatttagttttacacttgcatttctataaaaatccatgtttttttaatcctgtgtttcaaatatacttactagacaattcatgtatgaaaattttagatagaaattgctactcctatatgattattaacacaacccaaatatccaatccatatcaaatcagtcacacgtcacatttgcagtatagagtagcagccttactgtgctgttcactggagtgtgcagataaaattaaaatcatccgtgaagaaaaaaaggggtccaaatacaccaaaaaggaaagcatcttgtctgcacaaacgggatacacgaagatccacgctagtgaaaaggattcgcaacctatttactaatatatctttctacaagggtccaactgcaaaaatacctcccattttgggcctttttgggaaaaaccccaactcttcaggggctcaaacgcataattccaaaactttctcgtcctaatcgcgacgagctcgaaacgaacatggccggcggcgatggcggcggcggcgggggagacgagagcgagtttgtgggggtaggcggcggcggaggaggaggaggagaaggagaagggaaccagagcccccccaaccgtaggttcttcgtggccgtgcacgtcggcgccggcttccacgcgccggcgaacgagaaggcgtaccgccgagccatgaagcgcgcttgcctcgccgccgccgcagtgctccgcgaggttttgtactttaccctatcccctacttaccccccactcgcctccttctcctcctgctctcgtgcttggttggttttgtatggcatggagctcggattgacgcgcgatccccaccaagtgttccatctgagcaatggattttgactggcgagcggatttatgttctagatggggtattgattgaagtagtgtgaaaatgtaatgctcgagcggcgtccatgtagctttgcagtggtgaattcctaaatctcttaatacttttgcagggaaatggcacaagccttgatgcggttgcagctgccattcaagtattggaggtttggatcatctctttctacgtattgttacaatgtctacacgtactatgcagtttagttcaaattttacaatgggtgacaaataggatggtgtatgatatatggccacattttgatatgtcaaaaggggggaaaaaggaagagtggttctatagatcatataagcagggtttgcagacctcctagatataagcgaatcgagggtgatacagtgtacttgtatgtagataaagggctaatggtgtttgttccaagcaaaagttgtcttagtttatccattctcatctatggctgattaggatgatcccatcacaaatgctggacgcggttcaaatttgactgagagtggtcatgtggaatgcgatgcaagtatcatggatggttctactactacctttggagctgttggagctgtgcaaggtacttgtagtaatttgcgataaatcaatcctcctgtgtaaaagttactatttgtgttaccacacgtcttatttcttgtagatcaggtgtaaagaatcccatccaaattgcttt

SEQ ID NO: 8831 - DNA, 14280 bp, Oryza sativa
ttgtccgtgacgccgtcgttcacccggaacagcacgtagtcgagggtgtcgttggtgagcccgccgtagaacgggtacgcgttcaccatgaacggcgcgcccgtcgcgcgcaggaagccgagcagcggcttcacgacggcggtgtcgtagccgtcgtggaaccgcccggcccgacggcggcgtggacgcggccaggatgccgagggaatgcggcgtcgacaccttgatgatctcgcggcggcgcggcgacggcggcagcacggcggccagcgccgcgtgcaggttccgcatggccggcacgaggctgagcagcagcgtccggttggcctgcgagatcacctcgtcgccgacgaggacccgcgagacgttggtggcctccgcgtacggcgcgacgctggcgcgcacccaccgccgcgcggacgcgcggctggcggcgaggcgcggaacgtcggcgttggggacggtgacgtccacggcgaggccggtgccggcgaaggcccgcagcgcgcgcgggtcggcgtccagcagccggacgcggtcgaagatggtgtcgcgggagaggaaccgcgcgacgtcggccggcggcggcatggtcgtcccccgcatgccgtaggtgacgccgacgccgccggcatccgtgcctattccaagaagacgaaccagtgcttacgtcatgtgtcacgtcacactgattcacacactggctcaaatttgcatagtgattagtgaccttacctttgacaatggaaatcgagagtagagcaactgagaggaggacaccaagcatgtttggaagcttgtgtgtgctttgctctagcttgttaattactgtcactgacaagagtgagtcttgatttgtgagatagtggcaatgcaatgcagcacgcaattcttaaaggatgggagcttaggttgttgcgtgatgacagagtaatctgtatcgtgattctttctggggagaggagatgttaaagcctaggatcatatgacttcagtatcgcttatgttttctggacagttcgtagggttcctttgtgttgtagatgaaagggattcttttctttggctttgagttgtaggtgtctttggtcgatttgtctgcgctttttgttcttgctcgttagcttttgtccctttcctcacaaacacttttgagacaaattggagatcggtgaagcttcaaattaagtggtctaaatgtgctgaacgatgcttatttcagccctacaccacacgaactctgttgaacaaaagaaacagagcacaaaagagagagggagagagagaagtgagaacaatgaactgttgccactgcaaacatagcatatttagcagccctacaccacacgcattcgtcaggtaaagccaaatcacgacgctgtaacatggtaacagaacgtataataaattttgagttatagccaaccacaagagcatgtatgatacaaggagatttccaacgaatgagcgatgaactgatcacatttttacatcggtagcacctaaagctgattctcccaagacccaaccccctggggtatcgagacagtgccagcttgttctgtagacaacacaacgagtcatttctattcacccacacataaacaagggcattcgaccgacgtgttggacgcaacgttttctgtacctcatgaggtcagttttgttccttcactaaagaatctgccattcctcctctcctgtttcacctgaggcatcgaggtcctcgacattgatgttgccatcccctgagatgcccaacacatcgtcctgattgtacatttgttttgacggttgaaccgactgcacaacagtgaagagtggtgctccattggctttatctactagctcagtggcgcgagaacagaaatcatcgaagtcatctacataagcaggcagacagtaaataagaaaaccaagattagagtgaacttaaaatgatgacgcgacatttgttcgacaatcacagttcacctttatcacggcagtaaaaaccaatagccaatgacggatctatcaggtctagggccaaatctcgtacagtgctgtcaaagtgcagctagataataagttttttcattattgaaaaattaaaaggataacgaatattaggtaccatttaccaaatcataactgcaattgcgaacatacctgcagtggtatgaagaagtgtctgcctctatgttatcagctgcaatatcaactgcctgagatgtagagaacaccccactgtaactaccatagctcaaaaatgaaaaacaaaaatagctccctagtcattacattgataaatacaaaatccatctacttctacaaggttactaaccaaaatggattccaagcaaaaagggatactgcaaaaatagccagataataacggtcgctgactgcatgcataatagacaaaggcgaacactaatataccgctttgctgtttttttgtgttgccattgttgtgaatgggaggacagggcaccattaaaaaggcatgaattacttatcacattgatgaaatcaagattctaaattacaacctactacatatgaaagttttacttattgaccagattgcagatagaaaaacacatctataaaattggcgctcatatatgctaagtaaataatgcagttttaccatctgaacttcatggggatctaggtagagcgccctgtcatcctgtaccccagcaatgtaggttgatgttccaggctttccacccaaaatccccaagctctgaggaaatgtgaacgtctcctttagtaaaggaatgtacctgatagtaagggcaatggcaggaagtgattaatactagaaacaaccatcagtagaaacatcaaccgttcaagggtgaccatatgaagcctacaaagaatgagatttaatagcttgctgcttaccttggattaattttgtcaagaccaagaaccagagggaccagcaaaagaatcggtgaccaagttgattgacctttgttgaaatcacagcaaagctgagcagcaacatcaatacaaacaactggagctccacctctttcaccatcttcatcaccggataccacataaagagccatagggaaactttcattcccatcaacaacttcatgttgctccctattggtgcggacaagggtttgccatgcccgacacatggcgtatggacccacccatgatccagcagccagaccataactatttccagcttgaagtaaattgtgaattgagaaagcacaagcttcagaatcaccaaacatgtgtaagatccctatatattctgggttatatggctgcatatgaacatttgatcattgtaaaagaggcccatcacctactacaactgaaaaaagaaaattttcattgtcttaagatcagcaggtagtcatgtatctcaccttctccaagggccttctccaagatctgccaagatggtggaaaatcaatgcctgcaaaaatccatccaagtacattttacaaatgcagtggtaaaaaaaatgctgttatttcaatcaaataaagtcgacaagcacctgagcaaccagcatctggctgcttctgaccatgcagccccagttcacatcactagtatacttggaatcagagatggcatcaaagcctgcaacaaaaagacagtgcaaacaactcacaactgatttccacacattaacatgctgtaccaggcatatggtcgtgtaaacaaacctacctctgcgataagtgatccatatccttgacgagaagtcctcaagaaatgtggcatgcccactttcggaatctgagtcactagacgactcctccgacgaaagcttgtaacatttaccaaggaaccacacatcacttgaagtgagaaccttggaggtgcccagaaaacgccacattgagccagagcacacgatcctcctcaataccctcgaccaatcataggatccagaggacgatttcggcgacttgtttgcggacgaatcctggtgcgcctcaaagatattgaaaggtgaattgaaaacgcaggacaggatcgaggttttcgattgtttcaggctacaatcctccttctgttccgagctagaagaacaaggtgcaatgttaccctcgcacaacggatcagatgaagacgatgatacacccctatcaggcaagctcgtcattacctaacaacgcacgtgtgcatattccatccgcaattgggtctcctaccgaagcaaaatcaatctcctgtccaagaacgacaggagtaccaatcaggtggtgttggcacagttccttcctttcacgattgtacttcagcacgcatcaaacgaatcttctgcaacgcaacaaactggatgggccaattattacatttattcattcattgcagagaaagaaatatgcggattagattagccacagcaaaagtgaaacagactagaacaaaactccgaacacaacccaatcaagcaagctaagagagtccatcaccaacaaaagaacacagcccaattccagatggatctctgcagttttactccacgcaggcggtgcggcgaaggaaggcttgggggagaggaataccttgggggttcgagagtcgagaccgaagcgtggctcttcagttgaggccgaagcgacgcgtgtccggcggagagcccgaatcgccgcacccccgtccgcgtgggggaagaggatagatagagaaagcacggcggcagcgaaggccggagcaccggcggcggggaggggaggggaggggaggagcagccacggcgaggcggcgaggtggggggtggcgtggcggacgcggggaggaagcgggagacgagatggagacggcgaatcgcggccgaatcggctggctcgcgaggaaaggaagagggagtttagttggtgggatggttaccctggccccaccagtcagtgaccgcggtgggcgacgggttggtgtgtctgttggttttgtggtgccgtggcgtgcaacagataccacggagtagaagtagaagaagatgcttattaatacgctggtattccctaattattttggtgtttttctttaagcatagatgctagtggtagcggaatttgcacgggcacgtcaaagaccatccatttgtgtttgttccaaacgtgcagaaaactaatcgtgtcatcagggtatctatccgtttggatttgcgtaccaagagaatttagtcgcatcgtttcgcatgctataacaaaataatgtacgaagatgtttttacgtttgtttttagcgatttaagagtcaatgctgaatatataaatcacaatgaaaagttaaaatcaacttaaaatttaaattctgattagaataaattgcattttacacgggggtagaatgtatcttgtttcactttacatcagagtatataaaataaaaatcacttcgcaagatcaacagagagcagcgagcagcgacgtgcgatttgagatttgacagttccacaatgaaacaacagtgcggtactttctcagttattagtacagatatcctcaaacaggacgcatataggcgagtcacactcacacatgaaacctgggaaccagaaagtggtaataactagcagggactacagcaaatggtcctcttctatccatactcacacccatacttgaccagcaacttaacatcctaacaaacgaacgaattaaagaagccaattcctatctgctgctgtcgccgatgttcctttctatcatcacaagtcagccgcaaggaagttgccaggcagggcaatctgccaatcagagaacagtgagttgtttcttaaaaacaagttcaactggcatcttggtgttctcatgaatcaagaatttagggtcaggagagataattaccttctcgcccggcttgaatgctggtagacctctgtatgggcaagtaccacatcgaaatgcatcgcccaacccacactgcaattatcatttcacacataagcataacaggaaggcaacaaatctgggtaacaggatgaaactatggattttcagagggagaggaccaaaggcaaaaaaaaataaaataaataacacttaaaaagcagtcatgctcacattgccacaagctgactgagggttattgatctgttctgatgtgagatttagcttctccaccttctcctcagcctcagcccggccacaagtacagttcttgcatgccttccttgtggctcccacctcacaatccccaactggtaaaacataagcaaaccttcaggatctacatattaaatttatagacgttgaacaaagctgaagggttctataaaacagtaccaactggaagttctggtttcttcaagtcgtcttcagtcaagaggctgtcttcatcaatcagttcagaatcatcatcaatctgaatctttggaagaccctttgtggctttcttgagggggaaggaagagcccatgctccaagagaccttctttgccttaatctgcatgtgattcagttagcactagaaagtatgacggcacagaagcattaacacatattgtggcactagatcactcacagtaacagaatgctcgctatcctgggaacttgcagcagaagcttgcacgtcaacaaatcctcctaacagtagcttgcgctgaatagagttattgggctgatgaagagaagatcagaagatcagggagtgcaaattaagcattacaaaataaagtatattggcaaaacagtacatacatcctgatcagagggggaactctgtataagcaccatgcctccagctttaagaaccctgcttatttcagttatgaacagatcgcccaagttttccactttcttaatgacagcaagaacagaaccaactgatgcatcatcaaaaggtaacttcccacctgaaccatgccaacatggaatgttcaaaacgagcttatgacaaaccaaaatgtatactacaaggataaggtatactaaagcataacagaaatcgaaactgaacatatagcagagcaaaacagtgtgtcggttgtagggtccaaattttggaatttagtagtcattggtgagaattgcatattgcatattaccactagatgaatttagataatcaatgcagacatatagggagatgttctccaatattttcccctcgtgattaatgcgagcatatggaaaaaaatttttccttcgtcaaccaatagcgctgtctcacaggtgttccctatttggtcctacatgtggtgaaatgaatctacatagaattagcatatgaagtataataagggggcgtcgtcagaaatgagctccaatcccaaacaggtctttcaaggagctaccatgaatcgattgaactagtgtgatttgtagggttggaacaaatcaaaaccaaaatcagcaaaaggacaaacgctggtaacacagcctaggcacaattccagattgattctaagcacgcaaagtcctaatccgagtagatggattcagtattcaaacaaatttcaggcgaaaagtattcaaacaacccaaacgagacgaggagaagctcaccaagcgaggcgcactgcgtgatgaccaccacctcctcccgcgagacccccgcggcggccgccagatcccccaccgcgcggagcggcaacgccagctcgtccgtcaccgcgagcgccgcagctgtcgccgccatatggacgcagatcgacgcaccacctgcaaccgcgcaagcggaatccaaaaaaagcaaacccccaaccctcaaaacgcgatcggtcaatcggtggagcaagcaatcaggaaccggaaccagatcgaagcagccagccgacgattcaaccggcgtacggatggaggggcagccacggcgaggcggcggcgagggagacgagatggagacggcgaccttgcgggcgaatcgggggctcgagaggaaagggagagagagtttagttggtggtctggccccaccagtcagtgaccgcgggggcgtcgggttggtgcatccgttggtttttgtggtgccgtggaatgcagcagatacgtagtagtagtagaagatacgctggtattcccattttggtgctttttcaaaaagttactcccccatcgtttggcttttttcttataaaccaaaacggtttattagggaataaaaataaatttataggtaaacgttttatatatgtgttcttggtgacttaaagccaatgctgtaaaagaaactacgttgaaaatatctcaaaatcaatctcaaatttaaatttaaaaattcaaattttagctttttctttggctgtttaggccatcagatgggagcctagatgtagtataaacctggtgtaaagggagattacattttatcaacgtgcattctactcttttgattaggactaataataagatgaaaaggagtccttttaatattcatatgcatcatgatttttttaatgaatcggcgagccgtcaatttcattgaacataaaagaagtaaacaaaagaaaaaaaaagatgtacatgtatcccgggctaactaaaaattaaccaatcatggagacttctcacgccagacccaagttttggcctcctccttacatttgccagtaagctggccattggaagcatgattgtggcccaagagtgaggcctaatcttgtttgggctgggatggctgaaccgtattgatctacatgctgcatcgttcaaaacttcaaatgcaagcacgcgtgaatccctcagccaaatactcccacaaacatttttttttcctttttcaagtcaccactaatcaaatcttatgttgtaaaccaacgcgcctattaacggattaccggatccgttccctgtccctcccacagcagtagagacgtgagatgatgtaaatcacccacgtctatccctttttttttatacaattaggtgaaaatatgcattgcatcaagccagtctccccggcatgttctcgtctcatgagttcatgtgccggttccagctcaacctaggccagaggaggctgctcggctcgtctctttctgcaagataaatgctaggaggaggtcattgacccgtacttaattcttctttttttttaattctcctcaataattaatggttattagtaagacacagactgtcagagtgggccatgctggctacttggccaccttggctggcaccttcaacgacttgctatatgagttggtgaagattactggccatactagcaaaggggaaagtgcctgtgcaacatcatcatcaagaagaagaagagatcaacggcaagaagactagcgactagcgagagatcgatcgaagagaagaggagagatggtgcacgggaagctggaggtcctcctcgtctgcgccaagggcctcgaggacactgacttcttgagtaaacacacatccttctacctcttcttgctgtgtttgcaaagcttttgtttttgattacgccatttcttctcttctttgctggttgactgcttaatcgtttctttaggattgtgaacctgacagattagatgcatgaacaaggcatcaatagatatcatgattcattaccagtgaggatactagacagagtgatcgaggaggggcatttcgcggttggttaagcaattatcagcatgttgttctagctagatcatgggtcaacggtgacttatagtgcttgatgtcctgttgttaatgcctaacaattgttttatttcacttcattactctaaagcaaacctaaaaaaaaatatgtatctgcatgcgaaaacgacgaaggatggataaaagcacgccagtatatcgtggagttttgcttgtgctgtcctgtcctacactcctactcgagtaaaaagttaaaaacatcatagcgttagagtgagaaagcatgtgtacgtaggggctagacatactcaatcacaatcttctcaaactttatctgagaatcactgttttttacgctcttcatttgatgccaatttgtgtgtatttttgccaaatcagacgacatggacccctacgtgatcctcacctgccgcactcaggagcagaaaagcagcgttgcaaaaggtattcgttaactgttagcacatactaattccattgcattaggaacaaggttcagtgctgttgctatggagcatcaactgatttgtactgtacctatacctaaatgggcgggaatacgatcctaatctgatgaacctcaatctttgctttcaaacgattcaggagcaggaagcgagcctgaatggaacgagaccttcgtcttcaccgtctccgacgatgttccacagctcaatgtcaagatcatggacagtgatgccttctcagctgacgatttcgtcggtgaagcaaagtaagcatctaaattatgggtgacactctgcattcttccattttagcagtgcacagctgaaatgcagcttctgaactcaaacatgtttatccatcttgagagtagaatcccttcttccatgagacaacatgagcttctgaagaaagttcagaagaacacctttctctgaacatctcttcagagtgatatttgtcagtctatgcatgtatggttcttgctcacctgtgcaaaatttcagcattcctctggagcctgtgttcctggaaggcagccttcctccagccgtccaccgtgtcgtcaaggaggagaagtactgtggagagatcaaggttgctctcaccttcactccagcagcggtaaaaacacttacctctgtctcttgcaacatcgatggtgttgttgccattgtgtctgaacatctggttggagtgtgtgatgctaatgtgctggacactcgaatttcttcaggaaactcgccatcatcacaaccacgagaacgagggggagggttacagcagctggaactgattgcctgctactaatgagcatcaacgagaggagatcttgtctcaagaattaatgtgcttgtcaacaatactccgtgctatgatgtcctaagaactgaaacatccatttatatgtatatcccagaccattgacttgctctgcctaaattttgtatattttttactacaaagatgtgatggtgtgaaatccagaatatttttatcgaatcatgcactttctttcatgacgagggcaaatctactttgcgaacgcgacaccgacgcatattttcgctgatataaaattaaccttaccaaattttgggaacaccaaaatttagcaaagtttgataataccaaaatttggtagggtagaagtgtgggtgttgtttgctttgctaccatgccaaatattcttgtgtagtgttatgtggagaagtttgtaaaaaatcaccgaattttggcatggcaagacatggacatacggggcctgttcactttgatgccattttcaaccttaccaaaatttggtaaggttgcaaaaaaaagtggctacatttagtttgctgctaaattttggtaactatataagaaatcctgcaaaaaatttagtaagttgccaaaatttggtaaggttttttttttgcatcaaagtgaacaggcccattgtggagtatttgggatgtgtttagaactttagattactaccttatcaaaatttgacaatattaaaaaatgcaatagagatcctctagcacgtgagacccacatgtcagtgagcagcgcaacacatacagttatgcagaagacattctccaaaacttggtacggtagaaaacgaaaatgacatcaaattgactatcccatcccaagtgttaacaaaggcaacccagacaaacaaaacggcccaccgtagcgagatgggccgagcaggccacggcccacaataaaaaacgtactcaggcctctcacagtgctcctagctggatcagtgctacaccatgccagctaggcttttcgtgtgcgtggcagatggatgcgcgccctagctgagctcctcgcccccaagcagagccgcgcggaacctggtccaagcgagggagcgcgcgacgccgaaatccccgggcatgcgcactgtgggcagcatcgcctcgcacacgcgtgccctagcaccgtgaaatcccagaatcgtcctcccaaaatccactcccgccgcagcgaagttcctcctcccgccacaacactagcgctcccgccacagccactcttcctccagacaccaagttaggcacgaaaattttcgggattggaagagaataactcaaataagacggattcaacaaaacaaatcgagacgtatgtacaccacatgatgaaaaaacaaatccgccgtgtccgccaaatccgacgccgaccgccgcatcggagtcatctcgccgccagggggagctcggggagaaggagggaggcctggagcggcagcgtccccatggcagcgctagaggaggcggaggagtcgaggtgcgcggcgacatccaccatggcggcggcgtctcaccgccggatctacgcccccaccacctcctcctcgtcgctacagggccttgcgccgaagaacgccgcgtccgccagatccgccgccttggccaggtcgtcgccgagctccgcagccaacactgccgcaccgagcccgtccaccacgctcccgtgcggggccagtgaagagggggtgcggaaggaggggccgcggtggcggtggggagggcggaaggaggggcagcggccatgcaggagcggaggagtaggggcggggcgggacgagacgaggaggaggaggagcggtggcgtgggaggaagtagagcggagaagacgatggaggaggtgaaagcgagaagagaagacgggtcgttgtccgagggtaggtggggaaattgatttccttcggtccccttcgctgccatccaccaagtcacgagcgttgtgggccggtttccttgtacagtgcccaaatccaactagtcacgcaaaataagatccttgtaccgtgggaaagggtgtctttgagctaaatgtctggggtaagacactaccgtcggtgcttgcaatgtgaatggcctcacctcaccccaatccataggcgcgattggtcacgtgacgtggcgctcacccccacctcgtcctcctcactctcccactccacgagacggcttgactttcttcgtcttctcctcctcctccgcttcgcctcctcgcgcagatcccgacgcacacctcgcgcccgcgccgcctataaattcccccgcctcgccgttgccgccgccgcgggaagcgaggcgaagcgagggagcgcgtctagatccgcaccggcgaaacgacccaagctgcctttcccgtcgccgcacgcatcatccgggctctgttgctgctgctataccgcgcccgttcgctgtagcagcaggaggaggaggaggaggagcggagtggtggcgatggcggcgaggaagaatgccggtgtcctcgcgctcttcgacgtcgacggcaccctcaccgcgccccgcaaggtttccccattctccggatccgcttccgtcatctcatctcatctcttcccgagcgatagtttcctcgctgcagctgcatcgtcgttgttgaatgaatcttgttcttctcttcttttttttttgggggtataggtggtgacgccggagatgctccagttcatgaagcagctgcgcgaggtgagaatggcgtctctgcgcttctcctcttcacttctcttcctcctggtttccatggaccatatgggattcatgtcatgttttggttatgtatgtattgggagcagcatgtcactgtgggcgtggttgggggatctgatctggtgaagatttccgaacaactcggcaaatcaggttttgaacctgtactctctagcttgcggatttagttgatgtgtgttctctaatccaagaacacattgcttatgctctatgaaacctctctgagtagctgcattcatccttgcaccgcagttactactgattacgattactgcttctctgaaaatggcctggtcgcgcacaagaacggcgaactcattggaactcaagtaagtccttaggcaaatatatgcattatatagtgtctgaaatttcacttggagatcatcaaattcctggctggggcctgggaataatggtagaggttcttcttttcatttggccaatttctaaatgacatagtgttgccatacccgccccccccccccccccaaaaaaaaaaagtcattggctgctactggtcttagaacgacgcctttctatattatggaacattatggaacataatgttttgtgctctgcagagtttgaaatcgtttcttggagatgatcagctaaaggtgagccttttttagttatagtgttgcttgttcacacataaattttaaggccatgcaatcgatgatacatgttctttgcaggaatttatta

SEQ ID NO: 8832 - DNA, 28922 bp, Oryza sativa
ccccccccccccccctacccgtttcggaatcctgtccaacatcttgttaggcgaggataaagatgcgctgcaagcaatgtcatgtggccagaatgagagcataagtgataatccagttggtctattccacccacaccaaccgattcattcaccatgtgcacaatgtgcccaaagaaatggcactgagctcaccggattgcaacctgtaatcacaggagtaaggaacatacccggcggctttcgtgcccgtgctgctctttgatattaggctttagaaatgcccggctactccgattctgttaaggtactttcaactgtgctaatcgatcgatgcttattctgcaacttggtattttcagttcccaaaccaaagcatctcaaattctcaatgggatgctacaatacccagccaaacacttaattgccaaacttggaatctggaacaagccataaggccatggattatgcctcgttagttttagtaagaaagaacacacatatctagtttgcccatagacattcaaaatatctatactgttacgtcataattgcaataacattttaagtaactagaccatgtcaatgatatcaataagtgatcatgaacattgggttcattgtctctagaatcacgaccattttacttgatagtgtgataaatacgatttacatcattcatgttttgcctttttccctatatgcatagcttgtgtgctaacacaatcttcttgctgccaatgcattattcagcatgaacatggagcgcggaagctatccaaggtatgatttgatatcttcctttgtaccgaccacctgatggaactgattaattgttaacgtcaactctctcgaaagacagaaactcaaattagcagtttgggttgatgcttgatgcaagaaaagaactagtgtattcaatatcagtgctccattatgatactaataggtgccacaaggaatggttctcagatgtattttattaatttgacatttttcttcagggtacctgctttctcatatgaataatcaaaacctttttccttcaattaaattttatggttttctagctggactaccaaaatatggttttgttaaaaccatagtcacaaagttcctgggtcgatgggatcaaggaatggggtcgaggaacgtgatacgctacttgcgagaggtttttacaaggtggggacgaaaatgaccccgcgttttcgggacggggacggcgttcccgggtcgaggatcgctgccaccgaccccgtttcctgtgactatggttaaaacaagtataatattgatcttctagaggggttggcaagtagccaagccgaattatgttaaggaactgtagcacacgagtagctggccttttatttatcttatcaataatatcaatattttctgcccttcctattatataagccacattgattatgcttctgaatgttgataatgcaatacttttgtttcattcttgcaatacttttgaccttccaaactctcagtaagacgattgttctgacaaataattttgcaacagaactacgagaggtatgttgttcgtcaaaaacgagcagaaggtaaaaaggccctaaaagattatcttctatttggaaagagttcacctcatttacaggtgagaatttctgttttgagttgtcatttccagatttttgtccttcctctaactagcacaaataatctatttactcttcaaaaagcttttgatggtaatactttatttcttttaggataagatatttgcaaaaacaaccaataacatttgatgtcgcaatattacatgtgtttatccagggtggaagtacgggcagctttgctaattcgcatgatatcccacgattcaaaacctttaggaaaggatctcagtctcatggctcaacaaagtcgcgacaaggtgtacaccatcacagaaaatgtatgttcctcttccaaaacgaaaatagacgcgtactaccttcacttgaatctattcgtctggttttgagcatctctgatgtatcatactatcatgtatcgcattcataatttatctgccgctccagtggtatcttaaggtcatccgtggtcggttaactttatcatgcattagtatgattacaagtctgaactggttaagttgaggagtaggaggtgtctgtgtgggttgaacccctaaccgacatattaaccctgctccttaaaccaaatgcagctctaggctttttgctatgttatttctgctattaccttttctgcatatctgtaactgcacatatcaggatgttatttattgacttgaaaatggtgcaaaaacatactggtctgttcatacttcatattttagtgacctgcagagcatgcataattcgactgcagtttgttgtgtcacatggatttgtgctgttgctgtgacccactcagatcacttcaaattagtttacagaacaccataaatgtcacataggtgagaatgttcttataatattttgcaggtaaaaaagacagggagaggttctacaatttcttccgtgaggagtattatgtgcatcctgacaaaatctttgaagacatgttcggtgagaatcatcgttttacctggtcccatatatcgtgggagagttttagcttcagagattcatcgtccagatttcgaaggactggtgaatcgaagagagaaagagtttgtagcgatagtgacgatgaaaatgaggatgaaacaaccaacattgggtcacatgcacaccgggctattcttggactaccagcttgtggtccactaactctagatgctgtcaaaactgcgtaagttgtgaatttttgtaccattcctcgaattattgtcttgctatcactaccatttctgtatggcactacaagtaggtgctccactagcgttcacctgaattactttcggtgtgcagtttccgggcatctgctctgaggtggcaccctgacaagcacccaggctcatcacaggtaaccctttccttcttgtttgatttggagtaaacaacagcatacgacattgtcttgatgcagccaatgtactgattggtctgtaacaaatcaatgtgcaaaacaacggatggtaagttggtaaacactaaacagagggtataactgcatactctgttttacatgtgcccaggccgtggccgaagagaagtttaagctttgtgtcaacgcatacaattctatctgcaatgtcctcaaggctgcttagctttcctcttgcatcgatggtggttcaagcttgcagttgctggaggctgtgaactcgcagcaacagcatttcaaggcttgtagctgacaaggccaagcatgaagctgctgcattgtttcagagcatcaatcggatgacacattcagttcaccaactcaccaagctcagagaaggaaggggatttgtgctgttgtaacaaacatgtacgtactactaatcactgtaacaaacatctattccttcatttgatttgatttcctattccttgagcgaataaaacaaacactgttcacagaaacacacttttacacaaacaatatgagaaaagttgattgaagagcctatcacctgtgtttgccgtttcttcttgtgtcatgtgttgtgcggcactgtgtaacaagctctaactaatgacgatttgattaacctaaacaattgtctggacgatgtggcgtcatgttgtctttgggtttatgttatgatttggccgggagaaagcaggactggaaccaagaaatatgtactattggtacaatgaaatcgtcgccgtggtacttaaaagcgacgttggttgcataaacatcaataatgatagcaacaagcttggcagcttttactcacaaactaaccaatctccaagagagatcatagtactagatactgtagttaaggataaatacagttgcttttgccacagtggctgctggctgctgccgcgatttgagcgagtgaatgtgacactggctgacaattgagataatgcatgtgagggcctctcgctgaagggcaattaacatagaacattctactaataaatcacaatgaatacgacaagaaagagaaagagagggagggattacagtagagataaacaacgaacgactcttccatcatctgatctgatgatcaatcaaaatctcctactagtaagattggattggaggagtagtccagttgagaggagatctgagagctagaagcagaggatggcgacggcggcggcgacggagaaggcgaaggtggtgatgaggaaggcgaagtggatggcccagctgcgcttgaacttggccaggtagctctcgggcggctcctggtacggcacctccacgtcggcggccgccaccacgtcgccgccggacttgagcatccgcagcctgtccgccgccagcgccagggtcagcttgtggcaacgccgctggtacctagtatattcattcgcgcgccattaattgctgctaagtaagtaagcaagtaattaagtagtagcaagcaaattaagcaagaggcaattagagcgacctgaatccgttgaggcatcggaggtggtgtgcgacggcggcgtagaaggcgaggtgggcgagggagaggaggccggcgggggcccagaggtggcggcactggaggcgggacggcggggactgggcgacggcggagaggaggatggcgaggaagaggaagaaggcgaggaagaggcgccacagctcctgcttctgcgcgtccgccgcccgcttcttctccagcgtcttgtcgaagtgcagctgcaccaccgcccccagcgcctgcgccgccgcctcccgcgccaccacctctcctcccccgacgtacgcctcgcccatcgccatccccatccgcatctccaccatccgctgctgctgctgctcgtggtgctggtgatgatccatctctctctctctctctctcttagatttctctcttctcttaccactactagtatagtgctcgctcactccctcacctgcacaagcagcagtccattgctttttactgatgaatatactgagatgagagaggctattagcgttagcagcaaaagctgatggccagtacagtaataatgagaagagttgctactaacactagacgccatccatgccacgacgaccaccaccatgcttcctttctgttccattcgctgctgttttacctcttcatttcgcccatggagtacttttctagtgtctgtaactgtaagcaagcaagtactcgatcgccttgtagaaagaaataagacaagatgataattaatttacgactagtactggagtataaattctgtgtatgatccatctccacgcttgtactagctgagatgggcaagtaggagtactagctaggtaaggaagagtagtagaagagagagcactgcattggatgctcgagcgtcgtgtaattatttgcgagcctccctggagcagtaaacttggctgttgttacctgtgtgaccgaccgaccgaaaaaaccgagtttgagtccaaaacgccatggaatcgcaatcgcaatcgaatcgatatacagtacagtatagtactagtatggtcgagctatctatctatagtcaggagtgaggaggcaaagcctgctgctgtcaaacatgaatgagcccacatgggggcatgagaattggactactagcacggtcactgtaccatctctctctctctctctcgatcacttgtggaaaagtttatcataaccaactcgctaggatctcaatctataacccagtggtggaaaaaaagggggcaattataaatttattattggtttgaatcgttattataagattaccgctataaaattacaaaaatatcgtcaaaattatcgttcaagtggcatccttgtaaaattaaaaaactcggccactgatttgatcttacgatctaactaaccgaattttattcaattaccaacctcagttaactagattgactgaattactcccagcaggtccaataggcccattaacagttcgatacattacacaagcataccaaatacctatatctttacctagcgctgcgacaccgtctaatcccgatgtccgcaataggtggtggcgactctacccaactcaaatgacgtccccgcctttaccttctttgcgacgaatccgtcccattgggccgccgtctctgcctccacctaaggatgaaaacggagcggatacggtcggataattctcataccatattcgttttcatttttttttaccggatacaaaaacgaatatggatagctcgaatacggaaacaaatacggattatctcgaatacgaataagaatcgaatgtgatcggacacgaatatggaaacaaatttttctcggaacacgaaaaccaactcaacttctaatagaaacaaatatcaacatatataattagctcattttatataaaatgaggtataatttataaatatttcttaaaatttaaataatattaatagtatggactagtgttaagagataaactactattaaaatctataaaggtatattgaaggttatagagttagaaagaaatgaggtatgtctcatgggtcttgcggatatccgaatagcactgttcaccggatatccgaaatattatccgtatccgacggaaaccctgatatcatattcgtattcgtatccgggaaaaaatattcgtattcgtatccgtatccaaaatatctaaaaactatccgctccgttttcatacctacctccacctccgttgtgagccggcaacgtctgtcgacgctttctttacctcggacgtcgtctcaagttgagccgcaactcaggcacaccgcacactgacaaactgcgcgtttcctccaatcttatggcgacaggctgcactccaacaacgccttctccactcgagtctccaacaacgttgctgaatcacgacatgaaaaggtctagtacctactggcacaacggtgaccactataccttctttttgtttcattttttttccgttgccgttttgcttcttcatttcgcccatacttttgtaatatttgtaagcgagacgctcaattttcacatttccacacaagcaagcaagaaagaaagaaaataagataaaaaaaatcctaataatttactactagagtataagggtgtgtttgaggaaaaggagattgggaagatatgcaaaacgaggtgagccattagcgcatgattaattgagtattaactattttaaatatcaaaaatagattaatatgactttttaaagtaactttcctatagaaaatttttgtaaaaaaacgcacccctatatcacacgaacaaacgcagtcaaaattctgtgtgatatccactcttgtagctgagatagctgagtagaagtactacggacaacagaagagagcattggatgctcgagcgtcttgaggatcagaaaagagcatcgtgagaaggactatgcagcttggagcggtcaacctgccttctagtttacctgtgtgaccgaccaaaaaccgagttaactccaaaacggcatggaaatatggaatcgcgatctaatcgaatccacttgaactgagcttggcgctgtcaaacaagagcccacatggatggacatggggatcgattggaacactgtactaccaaccaactcggcaggcaatgtcccgagccctttttcgaatgttgatcggcctgtctgcgaatgcgatgaccaacacaaaccgcatcaggtcaactttaattcagtagtgtactagttgagcaggtgcaagtaatttcaagcaattcctctcaaataaaacattttaaaacaaaagccttgaaagggacatgattttctaccatcacaaagaaagaataaaaagtttctcccttagtgatgagtatataaagttcaggggcgatattggatattcccacttgctgccaaaacatgggagctcccagtccaaagattggcacacaagacgcgcactagccttagcacaagtacttccattaggggctcattttgtattaaaacgttggaaggagggagttaagtagaaattgtcatcccacccgtctttaatactgtttcctcagacggagggtgcagtgcagtgcagggaatcatttcatttcttcttcttcttcgccgccgccgccaccttccaccccttcagccgccactccaatccaaggtatcctctcccttccccctcctcatccgcgctatttctcaggacttggatttattttctgtgggttgcgtccaatctgagcggaagctatattacatcgagtttagtttgttgcggatttggtttctgcttccaaagggattgggtggggttcatacatgaccctggatctgatctgagtgtagtaggtaggtgttaagatcaatcggatcaacgactgtatcttgttcggatgctcatctcatggatgttagcctcaggtcagggggttgtatactgtatacagcttgactgtatttagttccggtaggggaaaagaaagcaactttgcaagttgcaactctgctttttgctagatgtttgctcgacctgctaggctgcagctcaagctaattaaaaatatattttttttttcattctgatagcagctatattgatgcttgatctatggttcctattatgatatgatcataggaggatgagtgaagaggacaccaatgctgctgctgggcagcccaggcgcgcccctaagctcaacgagaggatcctgtcctccttgtcgaggagatcagtagctgcacatccgtggcatgatcttgagatcggtatggaactgtctttcccatctctctttatggctcacccacaacactatgtggcatgcatcatctcacttaatttggttcaacaggccctggtgctcctgctgtcttcaacgttgtaagtgtcatctctgcctttacctatacatatgatgccagagtgcgtgcaaaataagtttccttggcgggctgtaggctgcacaattttgccgctagacgggttgaaacatgttgaaatcggaaataatatctgtccaattaatatcgactctgtagaggtccgcgacagcttttggtgtttgctaaatttacagttcaataggtgttgtactttccagttacaaagaagtaacatgacactctcaaggaataaagaaattcactcaccaggcaaagagcatgatgaatgaataattagaattcagctcttcataccaatttaatcaggcaagagaatgggggccactgaatttaagttaaacaaaaattaaagacagttgcaacatccttggtattgcaccaaacctggaactttaagtggattgatcaagccatggaacaacagatgccaatcataaataaacctagttggaaaagtacttacatttataagttcttaacatttctaaaccttctgctgatctccatcagtttctcagcaactttgttgatatcatggcatcaagcatctatcttttgtgggcgcagcatgtgccttctgtaaatcttggtagtagcaggatgatgtgtattaggtggcagactggtaggtgtagccatatgctgccatgggaattttatgcttcttgaactgtttatacctttggataaattgtagctaggattttgattcgaattaaaatagaaccactagtagactcatgggcacgttgtgaatttcacctttccccctttttctactattaagattttcactgaatattttaactttactgatatttgattctggtgcaaacaacaaggattttttttttgtgggggtaaacaacaaggaatgttagtctgctgggaaacaattgcttatgagtcaaaacaagtgtgtcgagtggttttgattgttctgtttaacgattctagaagctttatctacagtcggttcctgacagtgcatgcaacctacatggttaatggcttccatttatatcacaccacaggttgttgagatcaccaagggaagcaaagtgaaatatgagcttgacaagaaaactggactgattaaggtgtgtgttctatttgtaaaatgattgcttgcatatcattaccacaactctatttcaagaacaatatggactaatttcataattattttttgtgtacttacgtaaggaattaaaagtatgcaccaccaccatgtacttgtgttactgtgttgtattatttgataggtctgcatttgtaagctgtaggagtttattcttgtcaaagaatattacatttttgtaactgtgcttcataatttgacaggtcgaccgtgtcctatactcatcagttgtgtatccccataattatggtttcattccaaggacactttgtgaagacaatgatccaatggatgttctggtcctgatgcaggtaactccattgtgcttcttttcttttaaacatgcaaaacagtcctttgcattattaactgatagtgtctgagagcaggggatcagcctgcaagtcctttggcattgacacttttgaacaagcaccagtagttttttagttgcacctcaaaaccattctcttttttactacagtgtggaatatattgtgccattatctcgtggtaatgtgttcttttaatccacacaggagcctgttattcctggttccttcctccgtgctagagcaattggccttatgcccatgattgaccaggtatattttctactgttctgtttgtagcaaagggaaaaagacctgcacgggttcactctttttgttttgttttttttttactgacgatattggattttgtgatcagggtgagaaggatgacaagataatagcagtatgtgctgatgatcctgaataccgtcattacaatgacatcagtgagctgtctcctcaccgcctccaagagattaaacgcttctttgaagactgtatcctcatagtccgttttatggtttaaattgcatatcccatatagtatagtattggtcatgcatacatctgttattgtccttaacaatatgtttttagacaagaagaatgagaacaaggaggttgctgttgatgcattcttgcctgccaacactgctcgtgacgccattcagtactccatgtaagttctctgttctgcagtgaaatataagtccataacaagatgtgattgtgtgtgttgtggaataggtatgaagataccactattccttttggcatatattgacacatatttttgtttatttaatctcagggacctgtatgcgcaatatatcttgcaaagcttgaggcagtagagtgctacccgatctttatcgtgaaaatattgtatttgtgccaactgcaaaactggagtagagactttgttcacaaaaatggagtgctatggggctggctatgatttcctttaccctccagctgtgtatcaatttgcatgtggtttcatacttacaaattatgaataagtgaagtttgggcagacatgaatttgttctgtgtcatgcttctgtccctccggatcgtttattgacatgaattactgttcttgttatattatttctatctgctctaaggctgtgtttgagaaaagcacaagggggagaaaaatccctcgttttttacacttacgcttcctgaaggttaaatagtgctttttttccttcaaaattttcctatagaaaagttttaaaaaatttaatccattttcaagtttgatataattaaatacttaattaattatatgtactagtgacttatcttgtgttgtgtatattatcaatctttttattacgggatgtgcttctatgctccgaaaaaaaaacttgcacgaaagttaaagcgaatcagtggctgtgattaaaagggagattagcacttaattatcattagcgaggggtaatttcgtctaaagattttcgagcccatatccagcccagtccgatccccacccccatcagtccaccacggcgccgctcctcaaccgcaccgccgcgctgattttcgccttgccaccgttgctctgccctcttcttcccctcgcaacgccgccttgccgcccggctccctccccacgctgcttcctgcctccctccgccaccgtcggtgctgccatcgctcctccacaacccgcgcgtcggcggcgtcgcccaaccatcgtcacctattgcgaatgccattctctcaattctattgaaaagtggcagcgctgagactgcatatgaggttttcatggtgcttgtaaatatgtacaaccaaatttgcaagtcgggttgcagcaataaggtattgactctgttctgtaacttgaaggcaaatctttgaggagacaatttaaggctgaaactgaatttactgtcactcaggccatagctactcagatatccttttaactgaagaagagggcagagcagcgacggcaaggcgaaaatcggcgtggcggtgccgttagtagggggtggggatcgcttcagatggactgagctggatatgggctcgaaaatctttgcacgaaattaccccctcactaatgataattaagtgctaatctcccttttaattaagtgcaagttttttttttccagagcacagaagcacatcccttttattatttttttcaattctaaaacacaccctaattgtagtgcgatgattttgctagagcgtcgaccatcgattctctgtatgaatttatgaaaatctaaacggtgtgcactagttgttttaacataaaatctaaactgagaggcttctcgctttagtcgtatcacgcgacgcgtttcatagccgatcgatcgcgcctatcgtccatccacgtggccacgctgtaatggcgcaacgagaaggattgatatagtgtgtgccttatttctcaatagacatgtatatctttttcctattcaaataaagttttctcttaaattacttatccgatctataatccgattacaccattgtattcgttacaattaaatcttcacaacaagatcttgcatgattatattacgatgaaaaaatatttatatttataaattacttttattatatatgtaagttacttttatcatatatatataagttacttttagatatgactaaattatttcttagtcatataaaagtaaattcaataaagtctaaaagtaatttacatatattataaaagtaacttaaaacaaaatggaagtaactttatcacgacattagaagtaatatgtgatctaaaagacataagttttttttgaaatgaatactaccaggcatttgcccaccagtgtacctttttaaaaagatataagttattaaagaaattaaaaaagatacatattattacatttttcaagttcaaaggagatggagtacaaaccagctaccactatctgtgtagtcacgtccaataaaaaaaagacatgcattaaagttacactccttttgttataagttacttctataatatatgcaaattaattttaggttttattgaatttatttttatatgtctaagaagtaatttagtgaaatctaaaagtaatttagatatactataaaagtaatttatgttttttcatcaaaatataatcatgtgagatcttgttataaagatttaattgttatgaacacaacggtgtaatcggatcgtagatcggataagtagtttaagaaaaatttttatttgaagtataggtggatagggtctctcatatatggagtggtagctggtttagacaatacagctaccactcgctgtgtagtcacatccttattttaatcgtgtagctctaatctcaccgtcactggttggtctaatcttgcaactcttatctcacccgtccgattatagcaggtcaaaccacgtgctgagaagtgtgcacaaacgcgttggcccccattccgcaaaaacccatcgcagagctcatactcttcttttgtgatcccatcgaaaaaaaaaataaaacatcaaggttaatatattgatttagttccgtccattagatgctgtccgatacaaagttattcccattttaacttctaaatcacttctactttattaaaattattttctggatgaactattaaaatgattgcttgatgacatataatgaaagttttattgtgtttttttttaccctgcaaaactataaattttggatttattactaaattcttttgtgaaaattctggctagacctccgcgacactccgtctccgacgcgagggaggctacgtggagcttgggaagccggaggggctacgacagcgaactctggcgtgaggtggtggatctagtgctgcaccgaccagatccggtgcccccacggctagatccggcgtcgagtagctgatggcgggaggtgacatccgacgcggggaactacactaggaggccagcgcgggtggcatcggcggcagtaggagaccgacggctgcaagggatggcatcattggcagcgggaggacgacgtcaacaaacggtaacaggaggctaagagcaagtttaatagtagagctcactagttactattagtcaatgttaaagctaacatgtatagcaggttggctataaggctatctttattttcttcatcctctctctttctctcaccatgaatttaatacatatttcttagagtttgtgtgcagttagctcttgcatgagagccaacactccacacttttatttatctctctcttccacataagcatatagcttgtttatagcccactattatccttgctctaacattggcaagctgatgcgggcggtagcgggggcggcagcaaaagcgagggaggatggctcgtcggttgcaacggacgggcgacaacgggtgacagcagacaacaacgcgtgaagtgggaggtccatgctacaggacgacacattttctgtttcttatcccgtttccaatctcgcatcttctcattcccatgtcatgtgttacctaggtcaatctcgcctcttctccttcccgtgttatgtgttaccgctcctagccaaagtcagaagatgcatatcctcccttctcagtccagctcttcctccctcccgttcctgttgaagtcagagtacgtatctcgcgctagatagatagtgcacggatttattcgaaataataaaattttctgcgcaattgcacgggtgcttcgtggacagatagtgcatgggttaaattgactctttctgattatatttgttgtcttaaaaaaagaatgattaacaaataaattacccacgcacctacattgattcaaataaacgtgcatatatacatatgttctcaaatatgttctatatatagaattgtacgatacacttttacccacatacataaacgttctatcccccacacccacacactacctcccacctcatcccaaacacacacacaaaaaaaaccacacgcgcactggggggagggggggggcgcacatacaaaactacacgcacgctttgggggggggggggcacacacaagagagaaaatccaattatgtaatgtacactattattactatatgcgtaccctccaatgtaaagtgatatatgctcttgaaaaattgactgggtacgttgctattagtgtactaaacatgtttcaacatttcaaagtttcaactaaaatcaggactgtggtacacatagcttcatcggaacctagaaaatgtccctgaacttaaccatcctttcatgattatcttcttttgtttcatgagaaatgtaatgaatatgaaaccgattgttctagatgtacttactaattttctgtgaactgcatcaatgacattttctaaaaaaaataaagaaataaaaatggagcattttaacattgtctatgccgggacatgatggcaattttgacgatatatacacttggatttcaatcaagcaaagcaatcaaatcgagatctttatcaattctggaatttatgtttaccattgattggaaaaacaaatcttgggataccgtcgtcagcttgtggccagtcactgcagacgtatatgtgtgtatcacacattaattagccttattaactattttgttggtagaaacgcttatataagcagcagttagcacccctcgatcttcaaacttgagcacaagtgttgcatctgtaacaatcagtactgtaagtttggtctcgtatcgatcatggccgccgccgccgccgctcctaacggcaacagcaacggcaaccatcatggcctgcagggcgacggtgatctacagatcaacgacatcgaccgagtcttggagagatctctcatacgatgagtaacacatctcatcttctatctacttgttgcatcaatcctttttttttgtttctgtaacatatctatacatagagtgttgttacggtacagcggtcggtaccggtactgcccggtaccaaaatcctggccgttggatctggcccgatccaacggctggtagagtttggtaccggcggtaccaattctgtccctgtgcagtaccacgtggagaactgaggtggaagggcaaaaacgtaacttcacgtgcaataaccggatcgggagggatggacgggcatctcgaaccctagaagcgctgggattctcgatcgatcgccgccgccgccgccgccgccgggaacgaggacatcgacgccgccaccgccgccgggaacaacgagtttgctgctggcgtcgcctgcttcaacgtcgccgccgctaccgccgcgggaaggacgacatcgacgccgctgccgccgggaaggacgacatcgacgccgccgccaccgggaacgacgagttcgctaccgccgccgcttgcttcaacgccgctgtcgctgggaaggacgagttcgatgccgccgccgcggcctgcttcaacgtatgtcggaatccaccgctcgccgccacttgattgcttcaacgcatggctggcgctactctcttccgatcctacccatgccgaaacgaacggtagatgcgtactggtaccgagcggtacaatttgctggaccataaaaaatctcctatacatatcatgcatgtctatgcaattatgcatacatgattgtgtgtactacacacagataaatatgtgtgttgatgtaagtgtgatgatcgaaaatgtgtgtgatgcagatcagggtgttggatgagacgatcaggaggcttgagcagctgttcaggttcacccaagcaaacaacccgggccctgctgtgctgctgaggatcattgggaggatcaaccgtgcaaacgccaggagatcaacgctcttcgcccagctccacacctacattcgccgccgccgccgtcgccaccaccagcaacaggcgcctccgtcgccacctgccggcggcaacatcgccagcaacggcaacggcgccgccatcaacaacggtaacagcaacaacgctgctgctggggctcctcctgccgatgcatgagctagcattgaccctagcttgatgccgtgatgctgatggacgcatgtagctggagatgatgagtgttgctgtcgtttctttgctgatcgatgttttctagctattgaagttgttactagaagtcatcaatttatttctaccggtttaatcagttttctaataattaagctagcagttgggaatgtgcaatggatttttctaaaagataaattgaatatgtagctggagagatcgaataatttttgtaactcgccttgcctctggaattgatcaatcgggtgatttctgttataaaagatacagcagaacgacgactaactttctcgatcgtttcagttattgatcacctaaaacacgctagatgacgacataagaacacacgacattaatttgttaatgaggttcagctgaagcttacatccccagggctttgattatggatatttttctccaaccaatatagctactagccgctacgagtccatgaccacgccgccatcatctccctgcgtgtctacgctacattgtaatcgctatggttatattgtggtgcccccctaagacatggttacatggctacatggctctatatatgaaattggttctaaaacatactccatccgtcccaaaatatatatagcaacttttgtttggatgtgatgtatcctagtactatgaatctcgacatgagacatgtctagattcgtagtactaggatacgtcccatccaaccaaaacttactatattttgggacggagggagtagataaggtcataacagttgttcaatataatgagggaaatatcttctctagatatgtaaactgagttcatcttagttttgtccttcttgtttatgttattatgtactcctacgactacagcatcgtaatgtaccacgatttgatgagtaatactccaatattcaatagttgcctaccatagttcgcgtaataagaaaaggaatactgataaaatcaacataacagagtacgttagactaaagaaagttttgcatcgggctgacaaattccaacctagatggtgtacacatgcaaagcacaccctctcaacctttatacaaccactaacctgtgtgcaaacataagagtgatatataatcaagattgcaccgtgaaccatttcccgcgcaattggatgaagtccttataaaataataaaaaaaggttatgattctagtatgacgactatataattaaatgaaccgatatatttcccgcgcaattacgtgaataaccataataacgaaccctaccaattatagctgacaacgtgtgagtaaacctattacgtagtttcgtgtaaaataaactccacttttattaagttagagtagtaattaatgcacaatatttccatttgtctgtattgctggtgtccattccccattatttttcttgtgccatatgcgtatgcaaggtgcggcctctccagtggccacgtcagccatatctcacgtcatgctaataaagaagggtgcggggtaggtgggccggcccattgatcaggcattccttcaggcttctcctagacaaaaagttaaactgggcctagttaattagcccgttctccacaaccagatcaaacaacagccacgacgtcctcgcaaatataatggagaacatccatatctccgcgatggtaaaaggaaaggaaaacaaaatatctttgttatactccctccgtttcgaaatgtttgacaccgttaactttttagcacatgtttgaccgttcgttttattcaaaaacttttgtgaaatatgtaaaattatatgcttacataaaaatatatttaacaatgaatcaaatgatagaaaaaaaattaataattacttaaatttttttaataagacgaacggtgaaacatgtgttaaaaagtcaacggcgtcaaacatttcgaaacggagtagtagatagtgggcgacaagacaaaattcttattttcttaagaaaagaaaaggagtgaaatgaggtttagaataaataccagatatatataactagtttagctgttcaaagggaatgtggcgaaaagcaagcgagagcaggcatgcatgcatgattgcccacagcaaaaaagcttggttttgttttgccattaatcgctgttcccaaggctatatacatggcttgatcattagtaacagctgtatgttcaagctgtgttaattatatatggcatcgatttggcgatatatatatatatatagagagagagagagagcgcgcgcgcgcgaagcaaacattataattaaccagagatcgattggtagcttcaaaaacttaaggaagaaaaacttaggagtaatttgcatggattattattattattattattattatatatatgtatggagctgagtacaaggcttaatggttttacttttgctacgtaaagtcgtcgatcgactattagttagcctcgataggcagccggagcagctagacaagcaatctcttgtaagcagaggagatcgaggaggagaggaaagatcgaacacgaagaacgcgtgcatgtgcgctcgtatatatcatgcgctcatggcgccaaaacatcatcgtcgtccacatgcatatgcagttttagtttagtttaattaatgcagtaagttttaaaaaaaaatgaacttagtagtagagcagagagcttaattaactagctagtgatcgatcgatcatatgccgctggccttgaagagcctcatgaggccgaaggtgatgcccatggcggcccacccaccgagcaccaccctcgcgctcgaccgcgccaccgccgcccgccccagcaccgcgcccacgcacccgaacgccgccagcgccacgctcgccaccgccaccaccaccgcgatccgcagcctgtagttgacgatgaacccggccgccagcagcggcaccacggcgcccaccgagaacgccatggccgacgccgccgccgcctgcgcggggctcggcagggccttctcctcctccccgccgcgcttgccatcgcgctccagctgcgccagctccacatcgcgctgcgagcacacggacacgaactccccgatggccatgctgcaggcgcccgccaggaggcccgcgaagccggagatgaccatggcgcgcgcctccgccttcacggcgcccacccccagcatcagcgacgccgtcgacaccagcccgtcgttcgcgcccagcaccgccgcccgcagccagttggcgcgcgccgccaggtccagctcgtcgcccaccgccgccgggttctcggcgtcaacctgcagcttgttgctgcttgatctctcgttgttcatcatggccgccatggctgattggctggcctgttagcttaattaattagctgagatcgatcgagtggatggatgggcagtgtggcgagcacgcttcttggcgtgttttatagtggttttcaggaggttttggtgtggctattgcgtgtcgccaactaattttaaagctactacactagctgcagtgcagtgcatcgttatatatgcatgatcgatccatctctttttagctatctacctctctagaccaacacccttcacttttgctcccctgtattgctcctcgacatgatgccaccttccacgaacatttaaagtcacctattcttcaatatcggtgcttgccgattgtgtatgtgcaaattacatttatatctaatattaataattattcattgacttaactgacaattacttaataggctatatatattaccaatatataaccagctgatgtgtttgatttgtcgccaaaataaaccttaccatattttggtattatttctcaatatgtgagttgagtatagatttaggattttatgaagttgtatgtatatacattgtatgaattttgataggagataatactttttagcaaacgagtggacatccctttgagaaatcaaaagaactagcacggtagcccgcgcagattgcgcggctagcatcattatattttctctcatatatttagcatatatattttctcattattttattaaaatatattacaatgacaacataattttaaattttgcaataacttttaatttcaaatttcagttacttctaaattgtattcctatattgtctttaaactcttcttcccatgtttttcttaatttcgaattttatttatttataaaatgcatttttatatggactctaaacactacttttcattttattatgtttattccgaattttagttagttttaaatacctatatagactctagactctacttctaatattccttattttttaattccgaatttctatttttttcttaattatatttctatatggcctctatactctacttctaatattcctttttttaattccgaatttctattatttcctaatttcctaattgtatttctatatggactctatactctacttctaatattcattatttttaattccgaatttcagttatttcataattgtatttctatatggactctagtctcctcttctaatattccttgtttttaattccgaatttcagttattttctaattgtatttttatatggactctagtctcctcttctaatatttcttattttttaattctgaatttcaattatttctaaattgtatttctatatggactctagtctcctcttctaatattccttattttttaaatttagaattttagctatttctaaattgtatttctatatggattctgccttttctttttctccgattaatgtgagaatttccaggtcatgagagcgaacgtggaggctcctttttctattcctttaataatataataaatttcccatgcatttatatcttcaaactgtactgttcagtgaaatttgtcataccagtcgattgcactgatcgattccctgttctgacttctgaacaccatggagtgcaagccatatagtaagtgcctagcacgtactagatgatgcttaatttcagcttcaaggtaactgtgcaagatcccttgaagacaaaagaggcctctcgtaccttaacttactacatttggtggactactctaagcagaagatcgactcgtttgccattaattgtacctgaatgaaatgattacattagtttcactgtgcaacatatgcgctctctttagcatatactcctcctatatgcatttcaaagtaaaggagcatatgccatgcattgaagatcatgcatgttgctagctcaatttactactggtagatgaagtactatacttagaatcagagaaaagcccaccttaaattaacactaccttaacgttgtaagcaattacatatatatcgaagttatataaatattctttgtctatatgagtttttcaattttaagacatctttttttatttcacgccactacaccagggctttaaattcctaaagacggtacggtatactgaaaacaattgtagctagctagctcatacagtcaaagtgtgcgggattcggttaagttgacaggggaatgttctccttgtcggatgaaacctcattatttccttaattgtcacttcatatttacggccagtgcttgggagtggaattgcactttttttaacatgagaatccaagaaggaacaaattaaagaaagaaaagacaccggtctgtattaattctagaacggcttcgatcgagcccaatggacgaatctgcttgctctcatcttgcttccctcacagaagagaagaaaaaaactatacatatttatattagtcaaaatgtatgtagtagtacaaaaattaatgtcaaggtgtgcaatgcaaatcagttaaattaatcaaattgcaggcatccctctcgtggagactgttgtctttttttatccgagcaaaaaataaaggaaaaaagctttgagcggacattagacatgaacttttggagggaaagatgacaagtggtgaacggaaacacaactttgcaaatggaaaaaaagatgaagaagaaaaggcagctcgatggactccctgccatgggcaaagatcaacgacagaagaagaagagaagacaagagttttcaaagaaaacgaagaggacgatgacaaagtgcagcagagcaggtcaagatgttaggtacgctactcgatggcactcatccatcatccatgtatgttggagattatggagaaataaaaacaatctagtggagagatttgttgtattgattattcgtgaaaaatcgggcgagatctagtgagtgctgaatcggcagccactggaccataggtcgatcagagaaatggtacgtagctgctgcaagcaacggctcgcccaaacagccgaccggaagaacggcgtgtggaaagagctagcaatcagagtaaattaagaatgatgatgatcgagctagccgccatcacgcgccatggatcatcaattggtaatcaagtgatcagattgattaggggttaagagttcagacagacacaatagaggattaataataggcaagcacatatagatatgtagatatagtgcgggataagcatggcgtccacacgaaaggcaccactctaatccctctttcggttttatcaatcttatcccgaattctggctggctgctgctgcctgcccatatctttgtgttctgctccatctctgctttaccatctcattctccactctatgttgttgtatcatgccactggtctctctctctcgctttctctgatccctgcttgctttttcattgtagactgactaatgccattttcctgccttgatcgatcatataatggagcattttagctgattgaggatggcccttggggtcgcccaagcgagcatgcatgcactgcacgagcacaaatgcagtttgtttgttcagattaattaaaaaaacaacaacaagggctgcctcttgcaacgcatgatcgattgatcgttgaaaagaaacatgaaaagattgagatttttgccggccagaaacaaaacatcgctgtgctcaccgcacctggacgggatccggatctgactgcagttctcatcaacggatgcaaatcggacgatccagactgtgatcacactgttcatcatcgtactatagcaaaaacatcgtagcaagggatactattcatgctgttactgtaacagtaaatctaaaccatcgatcataaaaataaatggctgagattacgtacagttctcagaatactgtcacaacacttcttttagggaatcatttggcgtgctttattaatatacaaacattgttacaacattcactagaacgtttagaacgttaacaagaaaatatgggcctcatcaaaccaattacaagaattcctaaacttaaaaaagtaagatttgctagaacatgtgccacacaattggcttccctattacaatgctcaacagagattttaacaaaatcatatatcaaaatctggcattcatagaaaattgccgtagccgttgttaccaaaaagcacccatcttacatcgtctctaccacctgtaaacaacctgatcgggtaataatgcagtcacaacacttatctgaatccaactcgacggttgtaacttgtaaagccgccggtttagactactataaaggagatggagggtagtgggttgtacataaatgggcttggcctcttttccaattgtagtggcatacggcccacttcccttttaagccctcccccaaacacccgacactgtactggcctgcatacgggcattacgggcacggacggacaggtggaccccacctgccattggcttccaagtctactccccacggtgggaagggaggcagcaagggatcgcgacgccgcagccgcaacggctttcccgtcagactcacgtcttccaccagcgcctcccttacacgcttcactgacagtgggtccagtcttccttgggacccacatgcatagggggccaccgcgcgagtaggtgaacccaccgtatagtactagtattataatccgctctacagcctggctgaaatgacggaaatgcccccgggctcctcctctgtgttgtgtagttgcgcaccgctatctcggctcggctggctccagttccccaccaaactctctctcgccatggccgcatccgactccgactccgacgccgacgccgccgccgccgccgccgcctcgctgctgccggcgcccatccacctcctgccgccggacgcgctccacaacgtgctcctccgcctccccctccgcgacgccgtcgtctgccgcccggtatcgcgcctcttccacgaaaccctctcccacaacttcctcgccctcctcccctccctccgcctcctcctcctccgccacccgcgccccgaaggcggcggctgcctccacgccttcgaccccgaccgccgccactggctccgcctccccttctccgccttcctccccaaccagtccttctccccgtcgcctcctccccctctctcctctacctctggctcgagtccccttcgcttccccgccatccctcccctcctcctcctcctcctcctccaccgcctccaccgcccacccgcccaaatcgctcgctgtctgcaaccccttcgcggggacctacagcttcctgccccctctcggatctgcctgggcgcgccacggcaccgtcctcgctggccccggcggcgtcgtcctcgtgctcaccgagctcgccgccctctcctacaccccatccggatccggcaagtggatgaagcatcccctctcgctcccctccaagccgcggagccctatactcgcctccggcgctgccgccgtcttcgcgctttgcgatgtcggcaccccgtggcgcagccagtggaagctcttctcctgcccgctctccatgctcacaggcggctgggcccccgtcgagcgctccgcgtggggcgatgtcttcgagatcctcaagcgcccgcgcctcctcgctggtgccggcggccgccgtgtcctgatgatcggcggcctcaggtcctcgttcgccatagacgcgccatgctccacggtgctcatcctacgcctagatctggccaccatggagtgggacgaagctggccgcatgcctcccaatatgtaccgttgcttcaccggcctctgtgaggctgctgcacagggtaatgccatgcctactgctgttgctggtggcaacaacaaggtcaaggtgtttggcggtgatggcaaggtgtggtttgctggaaagcgggtgcgagggaagctggcaatgtgggaggaggatgagctaggcaacagcggtggcaagtgggactgggttgatggtgttcctgggtacagtgatggcgtataccgtggctttgtgttcgatggtgggttcactgctatgccctgaagtctatggagaacacataccagtccggtgcgtgactaaatgcgctcaggttaagattttaattgattcgggacatctatccattgcatgcagggggaattgacatgtcaaagaattttatttgcattgtacttggttcgtagcatcatgagatactttcaattgctgtacttgttaaaagtgaaatgttttaaatatcttttcagggtttgttgcttcagacaataaaattcaggttacttttattttgttttgatgatttcgtaggggggaatatgtgtatggtgatcactctgcttgttacatgaacaaggtgatcacatcgttataataactttgctgatcttgactcgcgacactacttacatattagttctcagtagtcagtacataattagttttcctactggccgcatgaagtggggaatcactatatataaagttaatgaattcaggtgtgccctagttctttctactcagtactttaatgttatcagcagtcatagcaagggcaggcaagtatacaatttttcctctgtgtgtgtgtgtgttctgtacttactattgatcttttgaatttatagtttcctagggcttggttggtactctagttatttgtcttctgaaatgaacatgaaaacaagtttgttaggtcttaagcttcatttgttctgaccttagatgtgctattgggatgccttatatgaaatatcatccagcagagtcagggatgctaaaaataggtcctaacacaagcatatatatatatatatatatatatatatatatatatatatatatatatatatatcttcattcagcatgtttcacatacagaatagcttttaggtattccaataccataaacgtgtctatgttcttagttaattcagcaataacattatatgttttatgctgtgttatggttcttaattccttatggattcaaatatctcaacacactcttttgctgaattcctctgtgcttgtacattgttcaggtggtgatcttagctaataaaaattatagaaaagcttttgacaggttttgttatgtaacaaggcatgtccatataattgataacttgcgtgctctcttgttgacagggtgtgttcgctagcccaggatcccaaccggaacagtgatcgtggaaaacggggcggttcattagggcgtgattaattaagtatttcattagggcgtgattaattaagtattagctatttttaaaaaaaaatggattaatttgatttttttaaacaacttttgtatagaaactttttgcaaaaaatacactgtttagtagtttgaaaagcgtgcacgcggaaaacgagggagaggggttgggaaccctgggcaaagaacacagccatagtgacgtgcaagcacctcaacttttttttcctcgaaaatgagcatctcatctttgaattcagaaagtcaggagtctacacaaaagagcatgcattcctcttctgctctgtgcttgcaggttcaggtggtgaacattatagaaaaggttttgtcaggttttgtttcgtaacaaggcatgttcatataattgataacttgcatgctcttattgacataatgacatgcaagcatctcatatttgaattcagaaagtcaggagtctacacaaaagtcaaagctagggtacagctgcactaattatgaactgtatgaagtggtacttttagaaatatagtgtagtaaggaagcccatttgccaaagattgaaacagttcatggtcatgcaaccttgggttataacaaactaatttagtccctagttgcaatgtgatgaggtgctttactaaacttaacgtggtgaacacattatttagttcttattttagctttgattaaagacacaaggagtataatatgcgttgcgtatcttcgttttgggccgtgcttattggtcagtgctacaacctttagttctaacattggttccagaataagtattatctttgttcatgaatgctttcagcttttacaattgtttgcttaggtggagtaaggttttaagtgatatgatcttttgtgttgacgattcatctgcctgtctcaaacattatgggcattggtctggggtcagggataaatggcatatgaataaggagtttgttgcttgccttaggtaaagataatatatgcatttttcaaactagaatttggtatttgttaagttatagataaagttgtagctacagtataa

SEQ ID NO: 8833 - DNA, 17931 bp, Oryza sativa
ttctcgcctgtctctcagttgttttgcttttctcgcctttcaaagtgcaatcttcttgcctgtgcagctatttgatcgatctggatgtcagcaaggcagagcaagtgctgctgcaccggaggattctcccgactgcgccgaccctgaaaagcgcccaatcttccatgcccgctacataggggtagactctggatcaactccaactgaaaacggtaatggtgggggctttctccctatcaatttgaggtataggtcaccaactttccaatgcttttatatatatatatatatatatatatatatatatatatatatatatatatatatatatatatatatatacatacatacatactttactagttgaggacacagttgatttcagtggagtgtatgtacctttcttttcgtgttcggaatggtatctctttgtccaaacaaaaatgcttcttcttctgtaaatatcaagccaacttatcagtatatctttcgtgttaacatcgattgtgcctgtgaatattggacagagatgatgaattcacagaatccgagccatatgaaaggatgatggaagacctgagtctagagagaggaaaaggtgtggatgacttcgaagccagttctgcaaggtatttttgttactaagctgttgtgctgtgcgaatgacatatctataccataataacaatcaattaatccggaacgtcagtttcaggtttcaaccatctggttcgatctaaaaactgcaagaatgcgaaatttccatttcatttgtataaacatagattatgtttccagaagggtgctaacttgactgaaaggttgttctgtccataaaacaacactgtgttcctctttggtacaaagcttccgtcatgatacttaagagcaacctttatagttggtgttactgctccccgcaaaaaaaaatagttggtgttactgcagttatatgcaatcaggctagttgctctaatcagccttgtttgaattgttgagttttgtggatatgagcctttgctctctacatcggtgcacaacagttctcatataattctttgaaatgattagtaacgtcttctttgcctattctttttatatggacttctttctgatatccagactagtttagcactcatgtattatatgctttcttttcgtgaaccattctcttaatttgcctgagcaatcatctttaatcattttttacatgatttgtccataaccattctcttaattttgcagaagggactcgaaattcgtccgtgttcatgaaattattttttcttccatagacaagccaaagctcctcagtaaggcaaggccatgtactttgtgatttctatttagagacctccatacgaataccacaccttcttgtgtcaccgcttgaactgtgagatattgttttacagctatccgcgatactgtctgatattgggttgaacatccgtgaagctcatgtgttctcaacatcagatggcttttgtctcgatgtgtttgttgttgatggctgggatacagaggtaaacttagagcatcgtcatggttatagcttatttttttcacacaattacagaactctacaaattatgtttcgaacttttaatcatgactacttatggtgggaaaccataaaattagataatcagattgttaagtacactatgcttcaaggtgttccacaaattaaaacattgcctaacactatgtgcaggaaacggatggtttgcttcagaagcttatagaggcagaggcaagcagccatgtatggttcttcctatttctccatttaatcaacacgattgcttgaaatttaaaggtgtcttgctggttaggaagtcaacatgcttgcaagttacctcctttttgcattaaatgcagtcctgtaaatactctcaagtcagcattacaagacttgaagaaatgaatatgccatccctatccttttcctttacagaattgaacttcttgtatgtagggctcattgtctaatccgacaaatttgtcacaatcagagaaagttctagagctgcaggaaaagataggagattctgaattcgacaggagtttgctgcaaattggggagaaaattgcatccggatcttctggggatctgtaagaaacatgcaactcttattacttaggaataatgaatattaggaaagaacggaggtagttatttagaacaacaggtacaactcaactgctagtgtggattgcatgacctttcttacatctgtttacaagcaaatggtttcacaagggggcactatcaacaaatagtcacaaagctagttgtgttctgggtttctgatttcaacttgtggagacatattgctgtgtgcattattctatattttttaatgtttctagcaagatcagcagttcattaaccaagtggtcttgtttgtatcctcggctgcagatatcgaggaacttatctcggtgtggatgttgcagtaaaatttcttagatctgaacatgttaacgattcttcgaaagtggagttcttgcaagaaataatgattttaaagtaagctttcttttgaaatcactttgatgcatagacttgactttgaatcatttaaaattccagataattctaatacagtgaagtcatgtccaggagtgttgatcatgaaaatgttgtccaattttatggagcttgcacaaagcatcgaaagtatctcattgtaacaggtgacacaaatattgctgataatcttgcctgctgatttttttcgtaggaatcaaaatccttgtttctcaagattcagatagcagtgcttgggcatatttacaatctgagtagcgttggtggctaaaagattgagctcatgtctgggtataaccaatgtgcttggtttttcatctccagtttccttggcatctaatgtaaataactgttgattgaacatttttagttttgcattttggtgagcgtcattaggtggaattgttaaaaacaaaaaatctcgaaagacgggggataactcctgtcttttatccattttggtagggacttcaagagcagctaagtctataggagggatactgtaaccattacatttgcttgttgcgtccatgcataaagaattctacaccatgatggaaaatagtgcaagatatgtctggtcagaagaatattgctactctattcctatcaacaggtctctacccacccttcaattagcctgtgaattactactttctaattcatgcatgtgaaataagtcttcgttcctaatgagcacacaaattttcattttctaaattaccagccaaatttctgtattgtttacacatcacatgagtatttttttctattattgtattgcaaggcgatgagttctgggcccctagctgcaaagttcatatcagactcatcctgtatagcacctataaataaggagatgctatccatggatttataagatacatgtatcatccacacgttttaacttgacattagtttattgagattactcccattgcataattgattagcagtaaggtattggttgtccaatcttgctgttaattaaatatttagatgttttgaagagctttattaggagggtgttaattcattttactgcaagtgaacttgtgttcagaatcccaactaaactcttttctagtcacttaaaaaaagatatttgtgcatcttctttactgaatcatcgtattcacatgggagtttggttcaaatatttcgtacagtctagtctttatttattcagaagatgacaagaattatactttttttagataatggacaagaattgcatggatagtaaataaataattacttatgtacaatactgttattctgttcccttgtcatgccataggatttcttacataatatcaagagccagcgatctagatgagttaagttagtagtagtatcattgtagccatgagatcatttatatatttatcttactgcttttttagggaaaaaaatgtttgtatgtgtcagttccgatttccaactttccaagggtgcactctgttttcttgcttcaatcccacaaacgagcataggccatggattgcttgtttgtatttttatgtattgagttttccgaattgatcaagtcagctcaatgtagagcatttatctatctagggtatctattatcgggcaatttcttttctgcgattatttcatgtcaactgatattttgctttgttatttgtgtgtctcatccagagtacatgcccggaggtaatttgtatgacttccttcataagcaaaacaatactttggagcttcctgttgttcttaggattgctattggtatctcaaaaggaatggattatttgcaccagaataatatcatccatagggacttgaagactgccaatttgctaattggctctggtcaagtatgcatattgtttcgaagttgcttatcaattgaaggatgtcgaagcactgattcaattcttaataggtcgtgaagatcgcagactttggtgtctctcggctccgatctcaagggggagaaatgactgctgaaactggcacgtatagatggatggcacctgaggtactatgttgatccttttgttccttatcctctggtgtcccttttttccctttattttcctttctgattactcgataagacttttgtactgcaacagaaagtcttttctgtttgctaatgataagttcagtttcacaagcccatttcaccaggcttaggcacatatacagatgcatgatgcactattttactgttttcacatgtatgcatacacagactacctgactatgctgtccttgcaagcatgttggcttacatattgatcacgcttgcatttacttactgcactgattttttggatcagtgtgcaaaagccatacttagaagagttatgcaaagctaagacaatatgcatgtgcaatgtacttattagaatcgcgtgtgttaccaggtaataaaccataagccttatgaccataaggcagatgtcttcagctttgctattgttctatgggagttggtcactacaaaggtaacctgtggctggcaaggcattgtgtgacgttttcatagttctcaatttttttaacagcagtgaactatggtcagatgtaataaccactaatacatgtgctatgtagataccatacgaaaatctgacacccttgcaagctgcactgggagtaaggcaggtatgtatttgatgccaataagctccaacataacacattggatgttaaaaaaagtaaataatattaacaaataatggatgctcaaggatgaagggatgactgtaaacattgacccttatttaattattttagggaatgcgcatggagatcccaccgaaggtgcatccgaggttgtccaaactgattgaacgatgttgggatgaaaatcctcatgtgcggccccttttctcagagattactgtagaattggaagatatcttacggcatgtcctggtaaatttctgaactttgtacactttaggtttaatgaaacgacgatcggaaaaaaataatgaatttgaagtatctaggttcatgcttgagactgctgaaaagctgcatatctgttgtaggtttccaagacaggaagtcgacatcccaaagcaaagatacaaaagaaatcggcgcgatagagaatacatgggctccttgtgacctttgtgaaaacagcttagaggttttcttcaaaactaccaggctactgtttgttgctagcacggcagcatagaaatgattttgtatatatgtcggatgcttgcatgtataatatttttttactcacacctgattggtatgagttttctgttttgtcatataatatgtgtactaaatttagaagaacgctgaacaaggcggcagccactgggatattttaatacagctctagtttttgtgtttccagcctgtgcaattttggctcatgtacatccggcaataacttagttgagacttcagaacttcagatgaagaaccatatctcttttgctgaattccattttgatgcttgtctataggattggagccaaattgttggctatgcccaagcttaatttggtagcatcccaaacccttgtttatactctagttagatttggcacctaactggaagcaattcaaacatattaaaaactagttcctctgtttcataatataagtcattctagcatttttcacatttatattgttgttaatgaatctagatctagattcattaacaataatataaatgtgagaaatgctaaaatgacttacattgtgaaacggagggagtagtatgttttgacacgggtaaagaaagaaaatagcagtttgggctgggcctggcccagttagttgcttgggccaaaatctgatgagatcgaaaactgaggaggaaaaaaaatccaatccatccatttcctttccagtggtttcgcgatggcgagcacgccggagccggagacgacggtgggaggctacgagctgcgggagcggctgggcggccggccgccgtccacggtggtgtggcgcgccgtggagcggtcgagcggatcccccgtggtggtgaagcaggtgcggctgactggcctccccagcaccctccgcgacagcctcgactgcgaggtccgcttcctcgccgccgtcacccaccccaacatcatccgcctcctcgacctcatccaggtctccttttgtcttctccatcgtcttcttcttcttccttctctaccaatcctagtgaatttttctccttaattagacccagagcaacctgtaccttgtcctggagctgtgcgagggaggagacctggcggcctacatccagcgcaacgggagggtagaggagcgcgtcgccagcaatttcatgagacagatcggtaattcacctagtaatatttgccatatcaatttcatttctagccctagtagcatctcttttctcttgttgccccccaatctatcacattacccgcaaccttagttagttgtgttacaaatttttttttttggatcaaagggccttagtcctccatttccattaagagaaatgtcacagtttacagtagagttgtgttacaattacaacaagaagataatcatgtgtaagaaattatgcttgcccaacaccttgtggtaggagctggcttgcaagtgctccgcagacaccatatcgtccatagggacttaaaacccgaggtccacaaatctctctcttttcatctcttaattacttgtgttattaagctctaactgatttgagacaccattgttgactgataaaactgttgtatgccgcagaatatcctgctctcttctcctgacagcaatgcgatcctcaagatatctgattttggcctgtcaaggtacactgctcaacatacataacctgtaggttgaggttactcagtctttaaaaagctgtattagttgcaaaaggcatcgtgctactcataagacaatctaatccaaattttacttctggtctctagagttcttcgtcccggggaatacacagatacaaattgtggcacttgtttgtacatggccccagaagttatgctgtttcagaagtatgatggtggggtatgttgtatgtactcacatggctaactctctttgccacacacacaaacgggagaaatctgaacatatgtatgttgtgtgcaggtagatttgtggagtatcgccgcgattctcttcgagctcttgaatggctatccaccattccgtggtagaagcaatgtccaggtggctactagttctctcttcaaccttgtttatcttatctaaacttcaataagttctcatcacagatttgtctctgcagctgcttcaatgcataaaccgaaccgtgtctcttccattctcagaagtcgttatttccaagctacgtcctgattctattgatatatgcaccagacttctgtgtagcaatccaggtgcgcctttgatcttgttacaacctctcactgaaaatatggagagtgcgaagctaacaaatttccataattgcttccagtgaaaaggttgtccttccaagagttcttcagccacagcttcctcagaccatagacgccttactgaagagcctatgcaagcttagcaatatcatctgaagttcaggattagttgaattgtttgtttgttgtacttggacatatgcaggtacctctttgtgttcaaaaccttgttttcctgtagtcttctctgtagcctgtagactttttacacgaaaaatgtgaatataagttgggagttctgtacacagcaaccaaaatgcattttcatatccactgtttgtctgtgttgaaacccggtctcctatccaaacatttcaagacttcccccccaatccactgttctgttgccaaaaagacacgaatattagggaatgacctaatattaaataactataaggggtgaggcttcgaacccaaattgtctagctcaccaccttgtggagctagctggaagatccctcggcgtttctcactgttctgttgccttaaaggtattttccgcatttgcaatccatctccttgctagcagcaatgatcaggagcagtgccattcctggaccttcagattcgggcgccgtgttgatgtcgcgtagctgagagcgattgatctactggggttccttccgatggagcggcggaggatgatcgccgatctgctcagggcgagcgcgagaggctcgtccctccgcggcggcgtccagctccacgccgcgctgatgaagctcggcttcgggtcggacaccatgctcaacaacaacctgatcgacatgtacgccaagtgcgggaagcttcacatggccggcgaggtgttcgacggaatgcccgagaggaacgtggtgtcctggacggcgctcatggtgggcttcctgcaccacggggaggccagagagtgcctccgcctgttcggggaaatgcggggttcagggacctcgccgaatgagttcacgctgtcggcgaccttgaaggcgtgcggcggcggcacgagagccggtgttcagatccatggcgtctgcgtcaggacggggttcgaggggcacgacgtcgtcgccaactcgctggtcgtcatgtactccaagggccggtggaccggcgacgcacgccgggtgttcgacgtaattccctccaggaacctcgccacctggaactccatgatctccggctacgcgcacgccggccaaggcagggactcgctgctcgtcttccgggagatgcagcggcggcacgacgagcagcccgacgagttcaccttcgccagccttctcaaggcgtgcagcggcctcggcgcggctcgcgagggggcgcaggtccacgcggccatggcagtcagaggggtctccccagcgtccaacgctatcctcgccggagcgctcctcgacgtgtacgtcaagtgccaccgcctgccggtggcgatgcaggtgttcgacgggttggagcggaggaacgccatccagtggacgacggtgatcgtcggccacgcgcaggaggggcaggtgaaggaagcgatgtgcctgttccggcggttctggagctccggcgtccgtgccgacggccatgttctgtccagcgtggtcgccgtgttcgcggactttgctctcgtggagcaggggaagcaagtgcactgctacacggcgaagaccccggccgggctggacgtgtcggtggccaactctctggttgacatgtacctcaagtgcggcctcaccggcgaggctggacggcggttccgggagatgccggcgaggaatgtggtgtcgtggacggcgatgatcaatggcgtcgggaagcatgggcatggccgtgaggccatcgacttgtttgaggagatgcaagaggaaggcgtggaggccgacgaggtggcctacctggcgttgctgtcggcgtgcagccactccggcctcgtcgacgaatgccgccggtacttctcgagaatctgtcaagaccggcggatgagaccgaaagccgagcactacgcgtgcatggtggacctcctcggccgcgccggcgagctccgggaggcgaaggagctcatcctcagcatgccaatggagccaacagtgggcgtgtggcagacgctgctgagcgcgtgcagggtgcacaaggacgtcgcggtggggcgggaggtgggcgacgtcctcctggccgtcgacggcgacaacccggtgaactacgtgatgctgtcgaacatcctggcggaggccggcgagtggcgcgagtgccaggggataaggggcgccatgcggcgcaaggggctgaggaagcagggcgggtgcagctggacggaggtggacaaggaggtgcacttcttctacggcggcggcgacgacgcgcacccgcaggccggcgacatccggcgcgccctgcgggaggtggaggcgaggatgcgggagcggctggggtacagcggcgacgcgcggtgcgcgctgcacgacgtggacgaggagtcgcgggtggagagcctgagggaacacagcgagaggctcgccgtggggctgtggctgctgcgcgacggcaccggagacgatggcggcggcggcggcggcgaggtggtgagggtgtacaagaacctgcgggtatgcggcgactgccacgagttcttgaaagggttgtcggcggtggtgaggagggtggtggtggtgagggacgccaacaggttccacaggtttcagaatggcgcctgttcttgcagggactactggtgaccatcaccatctttctctcaattcaattctacttgcattaccgaattctgaattggagcgaccgtgagaggtagcatagaatgtcatgtacacaatccccaatttagagagtgagtagctctttgacgcggaagacgtgtaaaagtatcatatggttcaacaaaattttcagaaaccgaccttagctcagttggtagagcggaggactgtagtgtttgcagataaatccttaggtcgctggttcgaatccggcaggtcggatagtttttttttctctaacaacttgttcctattgccaagttttcggcaatcctgaagatgctactgctacaccttttcttttggcctgttcttgggaaaacgcgtagtatcagttatcacgaaagtctttctaccataaaattattagtggtatttttttttctaaaaaaacactcatctaaaggattcagtgccaagttgttgttcaagatgtgcagaactccccgtgtttttttcttggattgtttactgccggcaacgctggctgtagctcctagcttgatggatcatcctgccaaggtgatgatgggctgggccttgattgcaaagtatcatctgccgcagcccagttccagcgaccaggcccaaactgggccatatcggttggtttttgctctctacgtctccacggctcgaccagattgtcgtcagtcaccgtcagacatggctccggggaagcaacgaggcaaggccaaaggggccccaccgccgcccgccgcccccaacgccgccgccgccggaggcttcccggcctgcctccgcctgatgccgccctccaccgtcgccatctccatccaagccaagccaggctccaagctcgccaccatcaccggtccgtccccctctttcccctcctccctgaacaccaactttcgccctttacttacttcatacgcgcatccttcgattctgcagagatcggcgacgaggccgtcggcgtccagatcgacgcgccggcgagggacggggaggccaacgccgctctcgtcgacttcatcagctccgtaagtgctttcttgcttgctctgcttgtggattttctgattgagatcaattttagttggcatgatgatttatactccagtatggttgtatgcataggaattttggatacagcaaggctctcagaagaaaatacaccatataacttgcttaaaaactacatcatcatatttgtctagtctggaaagtgagacgtggttgaaaactcccccttttcagtcaagattcaaacttcacattaactagtgctgatggaatatgtagctaacgaaaaaaaacatgcctcaagcagtagagagcattgtttccacaacgtctgtaaatgtgcacttctgctgagtttatacatcctgccacaattaattctttcagcggttgaaaactgatagtacatcttagagatgtgtttcactatcgaatacttgaattaactaggtttgccattctatatttctattcatcttctttgccctactgttcttgttagttttgcttatgttcagcgagttgtgttacttcttccaagtagcctatgatatcattggtttatgtcggggtatttggattttggagtgtccactattcagtttaatactctaggctctacaatttttgcatcgcgtaaatggtttgctttgcgtttggttttagagcacagaaaacaacctttttctttacaagaatcgatgcaatgtcatcactgtttagagtttaagtgtgctgaaaaaggtggctcagttccaaattgctccgcgtggagcacatgaaactgttcttcagaccaacttgtctcagatttggtttccaataacattgttttccacctgttattgcagtagtataagagatattcctgatacatcattaacccacttcatcgtgtcaattattatcatcctgagcagatcattaccgtccatgctccttgcacggttgcaccatggtttatattgtttttgctctacagatccttgcattatatctgttcagataatttcgatcttattcattctccaaaatatgagataaaaaacggagtctgttattctcgagacttggttgagaatgtgtgcttagtctggactctggagataggttctctaatcaaaagagttattgtacatttcatcagagacgttgatacatatatcggataatgataattagaacagatgtttccagtgcttaaacatttttttagctgggttagtgcttaaacatttgatgttgtatttctatggatcacatcagaattttgagaacctacttgacatattcaggtacttggagttaagaaaagagaagtttctattggttctggctcaaaatcgagggaaaaggttgtgctggtgcaagatgcgactctccagggtgtctttgatgctctgaagaaggcttgtgcttctgcatgatgtatgttaaatgtgcatatgtgaaaactactcacttaactgaatagaaagagtgtcaacttaactagtgcccttttatctgtacaactctgtcctgcaatgaaccctgtaaacggttaattaatttgcctagcgagtttacaagatgaaaactttggtcatcgcatattttatcacgagatggtggtacagcaaagggcaaaattatgagagctggtttttagtttgatatgctaaaactctctctcatgatttacgctggtgactctgcgttgccactctcaggtacaatctgatcctgatatttcaatcggattgtacctttcgttttcaaagcatgtccagtttgggcgtttggagttggaccttttggatgtcgaatttgaaaacaaatgacagcatcatttcagaacgtatgtcttcttttttggatccggtaagaaatggactgatttgtatgattgtttgcatactaagggcccctttgaatcgcaggaatgagaaaacataggaataggaaaaacgcgggattttgataggaatgtaagtgtaaaacagaggattgcaaaacacaggaaaaacacaggaatggtcgtttgattggaccgcaggaaaaacacaggaattagaggagagataaagactcaaaggaaagtttccaagaggttttacctcatgttagaattcctccaaaacttgcatggcattaggcaatccataggattccataagatccattcctttgattcaaatggctatataggaaaaattcctataggaataaaattctctaaaattcctatgaattttctttgaatcaaagggggctaaacaggccagatttaatttcgtcgagtatggaattcgttgaggttatttcttaatcggcggcccccaactgaaagcctaccaaagaagctagtatagcaagttgggcactagctggaaacttttctccatgaaacacgcaggacctcgacctgtttgggcgacacgtacttgttgctaacttaatctaagtgtaaagtaatcggatcggacttcgaacatttcgtggatgggtaatgggattgcaagttccacgatgggctcgatggtagatactgtgtgccagctgctcgagctgttggattccaaaggtactccatttgtgatctaccactagcttctcctacatcggttggcgccaaacattggtgtaaaataggggatcaggctacaagagcgagagaaatgtttgatgtttgcttgctgcttggcttgctcgtcgtgtgctttgccttggcaggtactaggtgcctcgagattggggcacagtgcagatagcgccccatagggcatgcattgcatgggccatggtgcctgcagtacatgtctcatgattggatggatggtcaggtggtttgtcttgtacgaatacgcgctgtctttcgtacagtgcccatctattccaaaatataataatagtttatgaatttttacacattgattaaaaatatatgtaaaattaaatagaaaatagttgtgaccggttgagatgataaagttgttgaataaattgttataatctaagataatattttaacgctagaagttactactccatccgtcttataataagttcagttcattttaagctcctttcagttattgtaaaacaaaattattttttaagtaattattacatcggagtttgtgaaagtaaaaaaataattgtatctagagtaaataatgtggggaatatttgcattatttgataaagtagggtattctagttcttaggttttgtattgatatgtacggaatgtatgagaaatgaacttgttttggaactggggaagtacataatagagtacattaatacataattaattgcatcaactgaaggaggaaagcaatctggaataaagacatgtaaagtattttagctcgagtattcacgatcgatgagatccagtcaacaaacgtacgtgcatgcatatatgcatcctgttgttgatagcgatggtgagcagatgagggaggcatgatgatggaacgaatattcttgcgttgcgctcactcacgggagagttgctttacgtcaagttgcaagagtttcatcaatcgtttccgaattcagagtaaaatctatgtgtgtcaatcagccaattgtacttatacgtgagaaccgatatgcatcataccaatagcatatatgtaatggaacacgaatctatagatcgaacggagtgccatgaaaaagtttaaaatgcatgcatcgagtcgtgtatatataatccatgttgcaggttataccggagatggaatttgcaattttacattggtcaagtggtgagagtgtcgagagtcacgggtacaaggcgtcgcgtgcatgcaaattaaaaaccagtccaggccgatcgacttggtagtagcagtaagagcatgtacaataggagactattaatgagatacaagatgagagagaaaagcagtgtgctacatatttataaccagctacagcacggactcaaaggcacaatgtgtgtatgacaggtgggactatatattaatggtatagtagctatagataaattggagctagtattggactatactattaaatttgctcttaaacggcaacagtatttatgtggtcgctgcgctgttggattgcatttctcgatctgcatggttcattggatgggaacacagccggagatatggacaagtaaagggcaattgtttgccaaaaattaaataaagcacacgatcaatcgacgagaccaccaaactctctcgtcccagtggtgtgagacacagcgcgcattacgcactgcgtaggttgatcgggagacactgagccgccacgcatatataacacgcgcttccatctcttttattttttaacaaaccggtatttagagtgtgccgattttattaaatattgtgccgagtaaaaaaatgtcgcacaagttaaaggatgagctgtcgtttcgcttttgttagggcccaagttttgacctcctccttggttctcgccactagggctatcgccaaaagatccttgtgttggaacactctttggtttctatccttctattacggatggctgagttccatagtaactagctggttggcttacatttttagcagcgtgcgaaattagataagccattaccgtatgattaatcgagtattaaatattacaaaattttgaaaaataaatttgtttgaacattttaacactatactatatcggtccacatttgacgagccgaaatgcttatcacaaatggccttacctttggcgagtccatataaaggtcgtaataggtgaggacatcagccgaggctcatcacaggtaggccatcacatgtgacggggcgtcatttgtgtccgacaaaaggtcgccctctaacgggcattgatccgttagagataagtgaagtcatcactaaccactcatctttgaccaagatcaaacacatcaaggatgaacgttgagcccgtcagaagttataaccagacctggcatagtgtaaaatatttctatacaaatttcttttacacgaaacatactatttagtaatttgagaaatatgctcacgggaaaatggtaactagctcactcaattaaacagctagaaagaacggggctctacgtcgggaaactattttgattctcgaggggatattccctcgttatttgcataccactcaaatggttacgaaaaaataagaaaatatattaacatatgatatatcactcccttccacgtcaatcaatgtatttttgctgtctactagccttctcactacgtaggaatagtagtactctcttctttacaaattgatcatcatatataaaactttatgtttatgcaccaagactaaagataatttaaatcacatcaattaagatatcatgcacacattctaccataatacatgtattgattaaaacaatatgccaattgcaccttagtatgcacacatgtattctctcatgctgtattaattgtattacgatgaaaactatgttcatatggttatatgatgattaatttgaaaaattttaaattctattttacgatgattaattaaaaaaaggagggagtagtacagtatttgcagagaaaaacagatgtggcgatgagttggtgtcaggcagagacgtggtgacctgggttatcagagtcaacgctcaactgaacacgaggcagctgataccctctgaatctgatcgaacagagtttacatgcaacagcagctccctcccctgggacattgccattgccacaaaacagacacggtcttccaccgcccatctcttctggatctgcaccatgcatctgcgtacgttggtcgggagacgggagtaatctgatgtgatcgatggtgcattttattttatgactactagtacagtactactactacatgtgcatacagcacgtccagtcgagtcgagtcgagtcgaggatgccattgccaccaaggatgtgtttagttcacattaagagcaagtttaatactagtatatagccaactactagctccaattcatctatagttaacctaatagctcatttatataatagttacatactacactattaatacatggtcccacatgccatacacacgctgcgtcttggagtccgtgctacagctggctacaaatatgtaacccgctgcccttctctctcctcatttatctccttaaaatatgtttgcagctggcttttagcctgctattgtacctgctctaaggtgg

SEQ ID NO: 8834 - DNA, 31077 bp, Oryza sativa
  unsure (1)..(31077): unsure at all n locations
atgccttgcatgatttactcatggtggaagtatgggatcatgatacgtttggaaaggtataatgtatcttttttacttttccacactgtttcattgtactatgtttcaattgctctcctcttgttaacattgtataagtgctccattaatccttaaccattactccctccatctacttttgataatcatatttcatcttggcacacagaccaaagataagtaattctacttattatccatttaaacatgctactaatcattcatcgtaaacaagcgattcattaatatttacatttctcgatgcctatgtaaccaatcttgtgtggaagaatgtagtcacgcattaaatccgagaaagtaattaataggataggttgttggattgaaatatacctatcaaaaataaaattttcagatttggaaatatgcctatcaaaagtagatggagggagtataatattggttggcatttgttgaattcatgtgcattttcatagcgcctcagtcactaaacattgttctagttattgctgcatatctacataaacttcgtggttgtactaatactgtagttctaatgccaatcttctacctagtatctggtcctgtagtcctgttattcttctgatcttgtcacactaactttatttattcaaattgcaggattacatagggagatgcatcttgacacttacgagagtaatactcgaaggcgagtttcaggatgagtttgttttgcaaggtgctaaatccggaaagctgaacttgcacttcaagtggacgccgcagccaatttatcgtgatcgtgatcgggaccagtgaaatctgtgtagatacatcacgtcaagcagctgataaatatttcttcccctacggtgcctgtacattagtttttctgtacagttaattcacttatcttgtagcaacaaggtgtaatggaataaaagaatggtggtttcatgttccgacggaaatgcgatgtgctatgaatggagggttgcagaaagatggatggtaacacggggagatgggttacccaagtatggaaacattaagttcatcatgcaagcagatactttatgcatcttctactggtaaaactaaacgtgtttgtctttaaaatgcaacttgtaatataattccttgtactaacaattactacctccgtcccataataattgcatttctagaaaattggagacagattaacaacaaacacaatttaccacaataatcctatttaataactacactgcatgtatatattccatatgtaaacttgattaaaaggaaggttgaggaacatatttcatatgtaaacttaattaaaaggaaggattgggtacatattccatttgttgcgtcccatcttatcagaaatataatctttctgggacaaaatttgaatggtagaaatataattattatggggtatcagaaatataatctttctgggacaaaatttgaatggtagaaatataattattatggggcggaggtagtagtttttaaactgcggtactgcctccctgattcttgtcttgaacgtatgtttgtcagaaagcactaatataaagccgatgtaacaggatgaatttaactcaacaccagctaacagtgctttgagacctgggcggggtaaacttgcaacaataaaattcgagtgaatttcaaaaatctgtcctattgttttactcgtttcttcgttgttttataatggatcattcatccattttgattttagtctgaatagccccattttgatttggcaatgagccggtgtgagtagcctagaccgctgcaattcagttcgtgatgttatcctatctttctatcttttaagagcaaatatagtaaggcttattcagcatgcgatataaaatccacatcagactcggtggtgatttggacgagagagagaggaggaaaaatggtgcaagcgggcgatagattagtcgccagctccgcactggctccaagacaccacttgtgatactttttttgaaacaggtgatactttgtcagtgttgcagcagaagagagagaaaagagcaccaaagcaccgcagagaaagtcattgatgtggttaaaaaaataataaagcttttggttgtttaacgtgactattatactctccaactattaggttgcttttagatgacatggtacacaattatcgctagcaatcgacgataatattaaacctgccctaatgccgacgtagtctgtcttcacggaacaaaggtcgcagccatgtccccgaggtcagtttttggctcaaatttcggaatcatgataaacatgctgtccttcctgttgttttttttcgcgaactgtccttcctgttgtttccaaggagatgatgataagatactctttttacatgagctgagacataagcgtgctctttgtgttggcgcttagatggttgcagatgatttcaacttatatatacagaagaactttgtgttggccattagataatagcagggtatttcaacttatactagaattgtatcgagcggcgacacgccgcgcaccgcatgcaaatagtgattaaacaaaagatttactccattggcctaaaagagtacccagacgtagcatacctatacaagtgacattcattaaaaattagattacataggtcagtacttcagttgcaaactgtactatatgactaattttaagtttgttattgagtggcgtcaaacttcaaaagaacacatttcgtgtaactaataccatgatctcacaaacattgtacacataattcaaagtttggcaatagagtggctctttagataaattgaacaaacttcaaacaaacaaatctcgtggaagcattcgctaatggaaacttgcaaacatatctggactggtcaatacccaaaacatcactcttaaaactatccttgcatttgttcattacattacattgtaagaaataagcatggtcaagatctcaagatgtgaaaggcaatgaacctctgtagaaaaatggccaaaggaagcaacaaggggaaaactgacataacccaaaaatccacatgaataatcgcccatgagtcaataacttacaacagcctctcatggccacatcatcacagtgctccatttgacataaagaaatttgaagaattcatcccatattttcccaattctacggacaaagaaccatgcgggcatgctcaggcgcgggggacggcgatggcgccaaggggtgtagcggcggcacacggtggggaggaggtgggaggcggcagggtatggtttggaggtgggatatatgtggttgttttccgaaaaaccccgtctttttaggtttacagtgctaccctagaagcagaattttcacttcttctggttgtacttctatggaacacgaggggttttctggataaaatacaacggggtaaccatcggttcgaggacgtgtgtgcaattctgtgcaaatgcgaggagtttttttacaaaataacaaaacacgcataatctttccgaggagccaaaaaatatctgatggaactggaaaatacccgtataaggaaaccgacacacagacagatggcacgcagtgaaaaatcggttttaccggcgcaccgcgtaacaatggttacagcgcgaaatcgagacgctgaaggaagcatgtggatacgggtaaatcagcgagatagccaaaaaaaaaattctaaaacatgagaaaaacgaagcggcatcaagttttattatatgatgatatacactagcactataccttctttcgtggttcagagacttcacaggagaaaagaacttagttcgtcctgtagtcacaagatttgccgcggcctactaaatattgaagtcacttcatgaaaaccaaggtactttaataaactcgttctgctcagaaaaatggtggtgcagcaggtaatagttttagtctttaaccactttgtatttagcattcttgctgtaaactaaagactacttgtttacttctattcatgaagatttccaaaaactgaagagggaagacagtaggacaaatcgtgctagatactaatggattttggcctaatcgtctaacatatgcctttggtcaaagttctgcgcttagttgattcagatgaaaagcctgccatgccatacatttatgagcatatggtccatgcaaagaaagaattaaataaaattttaacaataatgtgaagagaaactacatgcctatattgaaaatcattgatgaaagatgggaatcacagctttctataggcctttacacactgctgcatatcttttgaatccagccttcagtataagcattgagaccatgcctcctaatattaagtttggtttgtattcctgtattgacaagatgacacccgacaaatctgagttagtgaaggttcacctgtagcttgatagatctaagagtgcaaaaggacattttggagactaagtggcagtcttaaccagatcaagaaaactccaggtaactaatatttccatctggaagtgttgggctcccctttaatgcaagtttttcatttggttggccgtataataggtgttggacagccgattgattggcgaagtgaggcctgcagcacctgtggtctaccctctttgtgatcaaaatgaggaatccatccaacacattataatttcttgtgtcagtctcgccaagtgtggacaatattcttcctacggttggggttacccgatgcggcgcctcaaccttccacggatcgttttttgagatggtggagccaagctactaaataccggccgaaggaggtacaataagggattaattctttggtcactttagtggcttgggagatttggaagcatcacaacgactgtgttttcaatggtgtcaatcctagagttgcgtctgtcttgcaagtggtagaaaacgagagtaatctttggtgttctgcaggtgctttggcacttcaaaagctccttagtgggacagctaacctaggcagttagcgctccccggtgtggtcttgggtgtgtgggtctcagtggaagtggaagggctcgggtcctcatactttgtaaatattttgtactttgttttttccccttaataaaatgaaacgcagtactcatgtgtttctaagagaaaaataatatttccatctgtacatattatatacattctctaattcattcataagctaatttatttttatattaactgattggtgggatttgtacggggataacttgttagcgccttttccggccaacacggagtcgccaaccacctcaatctataaagctctaaattaagatgggtttagaaaagaaataaaaccggctagtgaagccaatttagaaatcaaaccaacttctagaccgatttagatccatttaaagataaccacccatctcgtgggcgaatcaaaaggtttatgggacaaacctacaaagagtatcacactctcgcaacaaaggcaggcgatttacaactgcaaatcgacacagatggacgaatctaggttaaagtagaaaaaaatggctgaaaagtaaaggtaaaagagcgattcgattgattgtgtaggagttgaggtcgggggctggaatcgaatcggccatagcccttaaggggttggtctggcctccacggggccttatccacatcctattaggcttagagatcaattaagacacaacaaaccttaggcccaaacaaggaaacacgatatttgccttaattgaattcggacttggcctctgccagtctgaccggccactagccatcggtttgactggccctagaccgtcggttagactggcctcgcatggtaagctaggactcttccaaatctagcccgagttttcctattttccatttaggtgtcaaattttggtgttaaatgtccactgccttttagacaaacttatgtgccgaaaagtctagaacgcatagtcttagggcgataatctgtatcggccttacaggctcccaagttcttagcaaatctttctctttctaatatttcaacaaagcaagagctcctaagaatgatttgcacaactcgattaggcattcccgactaaatgattacccagcgagctctttacaggcttctaacagtaaaatcgtcttttcatgccaagtctttaatcccgagacgattccactccagttctgttgttatgggttttggctataacttcgtattatctctttagcttgttctaaagtcttcaaacatttatcggtcactttatcactattaacgtcttataaccactgactgataaatcatctcactcaaacaaggagaatcaacaggctaaataatttatcccctaagctgattgataaattcgataatgcctcatagcactttatccatagcaattttggattggccagcatctaaacatcttgaaagtactagctctatggtttgcaatgaaattctatattaaacaaaatgtatttagatgctccaatcaaccgtcttgtttagatctttgaaatattaaactagtggaatccttcgattggtaatcttaaattcataacacatcaatagctatgtactacgggctgcaatccttggtcagacgggcattatcctcacggtcataccgttcctgtgctcaatcagacaggacaagaagccacagtcaaactgacattgaatcatcggttagaccggccatgtaattgaggttagaccgacctgatctagaattatcatacacaatttgtaatcaagcactggctttgtagtacaaaatttggctctcctatcttaataaccaaatgcttgttgtgtcaaactattggtcaacatgatttctgaagtagctatttgaaataattatcaaagagaaaatccattctatacccctaagtttactctagttcaatgatttgccatcgactttatctccctctataatatgccaccgactttgtcaatttttctataatatgtcatcgagatggatactttttaaaaaatgtctaaaatgcccttcaagccatataagggttatcgattgattgtctcattataagcttcaaaaaatatgaaagttttggtgtagccttcatatacgacataaaagtttgtgtacatattttaagattttcttcattttttttgaaaaattatttttatgtggtatatgaaagatgaatcgcgtacacaaaacatagctagattaaaaaaataattttgtgtatcatatgaaagatgatttacataaaagaaatcaatgctaaggtattttttttacttaaatgctagggtattctattagcatgtgaaacataaattatatttttttaaaaaaataataaatgaaaattaaaaatcttaatatgtaaagagactatgcaaaaaaaattaatatttttttgatacttctagaaggtaaattaattgtcaaccctctatgtcttgaagggtattttaggcattttttaaaaagtagctactccaagggcatattgttgaaaaaattgacaaagtcggtggcatattatagagagagacaaagttgatggtaaaccgttgaactgtagtaaactcaggggcatataatagattctctccattatagatgatgcatccgaaactcacagccacttgatgcatcatctataatgaatcacccaaaagattgacatgttttgcacccatggattctaataaactacaatgtatgtaactggctcaagcatagatgaacaaaactctaatagggccaatgtagcaaaatagcatctctaggtactattagaaatcaacatactggccatttgtataagacaaattattaagaagtaaaactctcatagtgcaatattaacaaaatcaatatttaatatggtgatccataaaatcatatatagtttggcttttaatagatataaaaaaaatcaagagccaaatcatactcaaacaaagtgtatgccaacttgttaattctatcactaagaactggcctttgcagcatgtatgtacaatatcgatttaacaagcaaagacacatgtgctagatagcaagcaatgttctaacatggtataggcataatataacgatgaacatgatacacatacattgtcttagcattcaacaaattttggctcaaagatgtgatgttgtacccgttgccgttcatctctctcgatttcttcaaaagaacattaatgtcttaccccccgagcaaaatcagcttttcttagtgcttgattttgagggcaagataaacaccatattaatgtcaacaacatcatgtggatcgaggaagcttatgactaatgaccgatggttcttctctcaacgaattggatttatcactactttgggaaatcaccgttctctcatcttttaccgccttgggtctccacactctcttaggagcttgaggctctaaattgttgcacgtttggttcttcacatcttcggcctttgtctcctttcgatccttggccccaagacattgtagcctcctcttttgagagcgcgataagccagaaggtatccactgcggttgtgattgtgttccaggaggcaaatgatgatttttgatactcttgtttgaattggaagctcatgtactactctcagatcgcctagctatctctgatgccccccggttagaccggccttggggctctgttgacggtccttaagtaccaaatccgaccatcaattcctgcataaaagtaaatgaaagaatacaaaatggagtagcaaacttagaggtagtggttattagtaaccattttcataagtcttgtgaatatttgtatgtaggtgaattacgaacggatgcgagtacatggattggagggcccacatatcaatcaaaacaaattacaattgagcccaaccaaggtacaacatgtagatggcccaccagatagcttcccaaccaaaggagtaatcggaaggtgggacaaaggggtcatccgaacccaaggttggccgaacctcctttgtctcccctcgccatcagcttccacgtgtaggttcctgatgactcccaaaaggcggttatgagtgattcccatgagttactaactttataatcgtcataggatggctataaaatgaggagaagctcttactctcaaacaacaaaacaagtggagtacaactcacttacacatttaagctactctctagtagagttagaatataggaggagagagagagggaaagctccggaatgagtgccccaaatatcagagttccggaggagtgccatagatgtcggcattcttccaggggagttccggaggagtgccggagatgttggcactctctccgatcttatacttcgacggatgtttcttttataagtaagcattcatgattcttttggtatttacttttttttatttaagatatataatcatcgttgcggtttcatcgctctgcttaagtagagtgttgacagtcgttaagtaccgatttcggccatcaactatctgttaacgaccaaatttggtaacccaacgatcggatgtgaaggaggaatcgagacggagttcgaggtagagattgttccggaaacagagtgaggatcggctgaagtctgaatcggctgcgactaggatcgccagagttcgagtcggacagggttagccgattgagccgaatccgacaatatgatgcggcatacgttgtcgggttaggttgacgtgcttcatgatggttgccacgcatggatagagtcctgagaaggcaattgtatctattaattaggatattttatgtaatttccttagagatatgtttgggcaaaagtctgccgcaaagacttatgatatcttagagtttgttaaagataagagtcatgtccgatatggacatattttgtaattctcgggtataaatagaccccgagccccatgtaatcaaactaacacacgttcaatacaatctcggcgcatcgccacccttttactttcgttttatttcgacgagttcttactttcgggttgagctgcatcggtttcgatcttcaacaaaaggtaaaacttgttatggcggcttgcgttctcggcattagtgcttccatctctatgatactctaatcttgtttatgtaattcgtcgagttatcatatatcttatataatctccggcaatatcgctatctaacctacaatcggctaacatctgtcagtagaaggtagccgattaggttaaatatcgatgctggcttagattatacaagatatccaccactctatgaaacatccaacggcttgattgtctagatattgttcttcttttcatacttatagctgcatcagttgagtttgatcttatgagtcgtgattagaatctcaatctctagcctgcctttgattgccgattagggtagtatcggggtttcagccgatcttacctgatttaagtactttttatcttatatgcttgattgacatgttaaatccaccctttatgttaagatcttgttgcatttaagtatattaggcttttgtttagtatattctacttgccttaatatcttaatatagagtggtatcggagtattagccgatacatgctagatctatctgatcggctatgctatgaacatatataatcttgctgttagtatatatttcgatctaggtgatttatactgtcttggcatggcgaccgatctatcccaatcacttgagttaagtatatatcgacataaggattacgtattgtgaatatctacagccgatcgagtagatttagttctttcttacttattcatgactgccgatcgattcacatatgacatcggctcaaggataaatgatatgtcatcggcaactaaccgatcggctatcgtttatagatttaaccgcggtttctttgtctttgtttcttgttgattgcaggatcaaatcaactggcatgctcacacacctaaaggcaagcttttggacctgcactggagttaagcagatctcccaggcctcgtgtttttacatcaacactatctcaatgaataaagagagaaataatatttcttacacttatattagtattaaataatgtagttccacttgtcattagagaaatactatagattcagggttatgagacaaattaaggagaaaatgcactgacatgcgaagaaatacacttccggtgaatcatgtgagagcacacggattgatgggccacaagtctagtccaaaccgacttaaagtggggccaaccaaccatgcaccgaccaaggagtccacatgtcagcctcaggacaaggtcggtcaagaatggtggtttccctggttcggccgaaccaggggtggcgccccttggtcctagcttccatgtgtcactctcttagccactctcaatgatagttatgccttattcccggaccaaaaccgacttaagcaactgtcattggaagctatgaaaagaggaggccttcatactctcaaagcacacacttcaaggagcaattctttgattccatattgtattctctctaatagtagtggagttaggtttagagtagtcttcggtcctatagcctttatggagattccaatatgtctttagtactttatcattttgttagactatagttgcaataaagaaagtagcttctttatttaattgtgttcatagtccataaactactttgctagttatgtgttctatgaatagattatacttcatttatatgcttcacttgattaggctagtctatctaaactatggtaacgacccaatgatcttaacgggttgcactagttctaacttgtccatcctctggatggtaatccggggaaattagtggtattatttgttaacataagcatggtgcttagattaaataaataccattagatgcaggaatgccccacagaaagtgaggtaggcggcatgtggtgatagctctatccatcctttgtattcctccatgtccgggtatgacgtaagagttcgtaaaatgccctccttgaccactcgagttccttaaccatgcacacactcaaccatagtgcacatcttcaccttctagttttcttcgcgtacatcagtcattgcacaattgatcttgtgaagtttgttatgaacacctcctgatatgatatcaccatgttttttattgaatagtttcattttcaattttccgatattgttttcaattccggttaccattttcgactgtgtttccggttaaaaaaatacgaatgtcgaaatggtttaggtgtttttccgacagtctcaggctgttttcatccttctctatccaaactctaaagtggttatatcgtggccgtaccgaatcgattagtttagtgattaattttgacaaattgacccttctataaaacttattgccaaaataaaccgtgtcaaaaactaatttcaaaaatagaccgtcaagggccaactaaggtggcgctgagacattttagctcagcgctgtcggggttggtgctgaggccacggtctatttttgaaatttgtttttggcatgatttatttttgaaactagatgatgcccccgcgctttgctgcgggatatatgttagatattggagaaatgataaaatgatttgtattgaaatattatgaaaatgatttgagaatgatgatttagtatgtgtatgtttagttttagaataaaactagttatcgtgcacgtgcaaggcacgttttggtttatatacataaaaaatagaataataaatataacttttttatgtactgcactccatacaaattatacaaattctaaaggtaggtctatagtaggatgacaatttgcagatggaaaacaaaaccaatagttcaataggtccctgtcaaacactttcaatttggcagtaaccaaataaagcactcttactatcacccctgtcagcccataggacaaaaaagtacaggaaacataactgtaaaaatttcaaaataaggttgtgtttagttccacgccaaaattgaaagtttgactaaaattgaaagtttgaagaaaaaagttggaagtttataggaaagttttgatgtgatggaaaatttgggaactaaacaaggcctaagatacgatgctatataattaatttaggaaatctgctgattttttttgcaatgattgatgtatactcaatatcatttctcatgaaacttgctgagttgatcataccttcgttgttccaaatataacccaaaatcaccaacaaaacaaccttgattctctttatattcactacaggagattcaaattgtctttcggcttgataacaggtatttcagataattacctatccgtcaatttggaaccattaggttgtaaataaactattagagaagagatgaactgcacaggaactaaaggaggttaaaatgtttctcctcttcaccttgaccatgcagtccgctctcctgccccaagaactgtagccaagaacatctgttcactgcaaaagttgtacttcctccatttcacaatgtaagtcattctagtatttttccacatttattttgatgttaataaatctagatagatatatatgtagatagatatatatgtctagattcattaacatcaatatgaatgtggaaaatgctagaataacttacattgtgaaacggagggagtaactttgagttgttgaactattgctcttccactcaggtcacaccatcttttacaggattgtgtatagcttgtactacaaagacaacgatggagtattttagcctccctacaacataaatatgcaaataggaagaagaaaaagtaacttttcaatagtgcaacaagatttaaaacataacaggtaattaggactgctagcaactgcgagcagttgtgattccttctattcgagcgttctatacatcaccaagaatgattccttctattcgaatcaaatcaaataacacagttgtgaaactattcgtttgttctgagagcactggatttgatctcggtttggtagatcaaaaagaaatcaagaaccaggtggtgattcaaaaagagaagagaaagataggagcgaaagcaatagagcagtaccttggggcggcggctgcagcgttacccgcgagaaggagtgactgcgggggcagcagtggagtgcggcggcggcagcggtacacgcgaggaggagcgacagtaggggcaatggtggagtgcagtggtggcaacggtgcacgcgaggaggcgaggagacttttcaggggtccggtgtgaaactaaatgtagaggtgtgaaactatacaatgataatatatgaattattgtcataaacatttaaattgcatttagaaataatatttatataaaaaaattgtatatgctacctcaaaatttttttccgagaacacactaatgtagctagggccttcgttggttcatccaattctgagaacaactgaattaactagtatgtaccccgcgtgttgccgcgggacataatgaaaattggttattataagcatggagtgaagcacggaaacaaaaggtattcatgtagattttgaaatataaatccaacgtcaaagctgatatgattagaaactgcagtgtcgttaatataaatgtgaatacatatatttttaatatttcacatgacaacaaaaatattactggaagtttacttactaaagcatataatatatgtaagatatgttatttcatcggacaaaagaactgatgacggtagtcagttggcaattaaaatagttatattatttacatggcaggcatacaggtgagtgagacaaataatttatctcgtagaacactcttgcaagccaaaaggtacatactagggcatagaggtgcattgatatgttttctagcagaacacctgctgatggaaaaatgaaatttatgatgatcattgagatggctggatgcttggttcttcgtatgatggcagcctgcattatagtaagattatgagcatcagccataatcaagactggtagcatagtgaataacagattaatttttaagtaaaataggtatgtgtgtgaaacatccatatacagttgttaaagtagctgatcacattgaaacagggaaaataatatcatgtgacagttgatgagatgacaaatgaagtggtaagacatgttatgaaacatatatatggatggaaaacttaatgaattatagcatactatgaacttgtatcaagactaaattaataggagtaggtgtgtgaccaaatatgatagactacttaaaagcattagctgtgagagaatctagatttggtgtggaagatttttttttttggcaatgcaggaatgcaaggatcttcaaatttatataggtaacctgtaaaatgctgtaaacttcttttcacattgaacttgtttagtggtcagaatgcaaaatataaaaagaggaaaacaaacttacgaagaaaccatggataccagaaggcatatattagaggaaagttgagtgtgaagatcacataaaatagacaggaaagaactgaactattgtaacaataccaactgcgtgctgctttgacaaggcagaggtttcggataaagaatcctacaaacaatgaacataggtaaatttgacattaagtatcaaaacacaaagaatataatcaggtcaagttagtaggtctgagaaaaaagaacctaggactcacattgggggcaaggcaacaaaacacagcaaattaccaataggtagaacacgtatgcttgacttacctgtaatcatgtatgcattccttgttgatccagatcgttaaatatttctttgtaaacaacattgtgagtgctggtcacatgctcagttggactattctcaattagaatacgaagaccatcaggcgatgttagacgtgagaatgcgacataaagttgtccatgtgagaagacatggctaggtaagtagacaccaactctactaagtgtttgcccttgacttttatttatagtcattgcatatgacacacgtacaggaaattgtcggcgctttaatttaaaaggccacttcttatcaattgaagtggttactatccttggtatatatgccttggatccttggtatatatgccttggatcctttagccttccctgtaattatctccccttctatcacacgacgagtcaattgagtcactataagtctggttccattgcagagacctttagatgggttcagattgcgcagcagcataattggcactcctatttttagttgaaggtgatggtctggcaaaccgctgatttttatagtgttcaggaactcagttgggtaaagagcatcaagagtggcacgattacttgtagtatcttcaattgtatctgaactgtagtatgacatttcttgagtagtcagctgagcaatcatttgggaatttatacttgcagcgatttcatttgttggggctagaattgctcgctcacagagataattggctgtgtgagaattgattgaggcatcatatacaaaagagataaggcctgaaaggtttcttgtgtcatctggcaaaagcaaacactctggtatttttacccaagaaacatcctctccatcagtaggtgaagaatctgctactgctccctcccctattgctaacaaccattctgcaaattcttgaaggtgttggcgatgagtattagacaatgttggggattgaagtctcatattttccgtaagatgcatgagaatgcagtgttgccataaatgagaacgtgtgatggatgaagataagatttcctgttttttttttttgcatagggtagaaccgggagagtttgcctaaaatctcctccaagaacaactgtaatgcgtccaaactgtttgttagcaagtgatggatcattggatgcaagaatatctctcaatgttcggtcaagagcttcaaagcaatgtttgtgattaacaggtgcctcatcccatatgactaaggaggtttgttgaattaattgagccaagtgagtgttcttcttaatagaacaaactgaatgctcttgtatgtccaatggtattctaaagcaagaatgaggcgtgcggccaccaggaagtagaagtgatgctataccagaagaagcaactgccaaagcaattttcctttcagcccttacactatttagtaaggtattccaaaggaatgttttccctgtccctccatagccatagataaagaaggtatgcccaatgtcactatttaaagaattgagaatagcatcatatatatgtctctggttcagatttaacttgcctaactgatcagccgcttcaatcgatatcttctctagatcatatgcttgttcatctattagcagcctattgccaaggatggatgtgctttgaatagtaggctcaggtaaatggaaatatgccaaagtacgaccaacatttctaagtatgctatcgatctcggaaagaacataggacttgacatattgtatgactgaaggtgcagaagaatttatacctagtgtggcatggttaaggtggtaggctgcatcttgacccattgaagacagatgctcttcaaataaactcagtgggtgtgtaacatcacagaaaagaagcaatgttacaaataactcacggagttggtagggaagtgcccaatgagtcgcatcagtcattgcgaaggaccattcacggtcatcaccaagaaggcctagggcttgacatgcagcttggaatgtaggatatacatgtccttcaatggtccggagatcagaataggattttgctcctttgacaatgtgcagcaacattctaaggtagtagacatctccttgggcaggacaaacatgtgctatccttccaattttcttgcggcaatttttctgtggagcccaatatttgccattaccatgccaggtaaagtattctgggaactctgcatatgtatatgcagcagcctgagagtattctctatttgcagcaaaccatgctgtaagtttcgtaacacgattgcgtgggttatccaagatctgttccagattatcatcctctgtgaatgtaacattattctctaatggcatatgtacatggagacgctcaatagcaggatcagtataatgaatctcaaactgaagtaaacgccatgccgcctcattcggcgctatacatctacatttaaacgccatgccgcctcattcggcgctatacatctacattctaaatagtcatgaatctcattagttccagcacatgcccgcttgcgcttgagactaaccctcgaacaatcaaaacccttagcaacatatttgaatagatacttttccattccatcacgattaactctttccacgttgatatgcgcctcatatttgactaataaatcgatgttgtgggggacaacatgccgattatcaagagaaattctatttttggcaacaattatatcattttttggccgagcataccttacatggccatttggcaggattgttgttttctcagaatattccttcgggtaattctttgagcatttaccgtcaaccatgcatgaacaatgcggatttgcatcaccacaaggtccatgcatcatgaatgccgcaacagcatcataaccaactcgatcaatggatggatctggaagctgtgccgatattagtctgtcaatatcagcaggtgtcaacggaccactcttatctaaccacaatatgatgtgaacatgtggaagtccacgcttctgaaattcaattgtgtacacaactacataaaaggaaaaattatgtgagaatgacacatgcaaaatatttgaatatatgaagtgtgcagtatgttgtgtcatgcatgattcatgaacaattaaattactacctgcagtgacagggccaaaaaatttcttctttacgatgtcgtccatgaagaggtgtagcttaacatggaatacacgattaataatatcaggcctatctgctgagtgttgcccagggatgatagccaaagcttgtgttacctctgaccataaggaatttgatgtgaaagtgataaacaaatcagggcaaccatattttctacatagagcaactgaatctaagtaattttgatataaatatcttggccccccaatataagaagaaggcaatataactcgctgcccggcatctgatgcttctgtgatgcctgaatggaccatagtggatacctcactgaatgaagctgttctatacttaagctgaaatgtcttggatctgtagtgactcaggcgagattcttccatacaacaataggcatctatgacataggcctaggttcctctcttgcagcgcataggagtattgaagtcatcagctctgtcatgaagcctatatgcaaagtattcaaccatagtagccttctttcttttgatagcttgtgatcgagcacaacgtcggtatgtgatattttcatgatagccatcctccccatatggaaatagaattggatattgcattgacataaatttacaatgcttttcttcaactttttgtaaatgacccgcttggtcctgcacaataaggtcatggccaacatcacttatacctacatcaccaacaactaacccaacaacctctgatgcaactggagcactaaatatatcaccatgcttgtcgggatcaccaaataatcttatgatgtatcgatcatcaccattttcagccaatctatcacgagctgtcctaaataggtggacaataggattgtgggtgttgaacatgtctataagtccagccacaatatcctcattaggacaaaaactcctatttgcataggttccaacattcatcctattcctaatctcattttctgtgtcaaagatatataactgagcatactctggtcgtcttccttcttttggtatgagtgacccaatgcagtggcagagctggccactaatcttgaaaacatatgggcctcgtccatcattgatagaatcaatgacatttacacccatcgatgtgaaggcaaacatcgaattgtagaacctaatgttctcaaaaaaatgggctgacaatgatctgttaactcctgtgagtagactatgcaaaggttctgggggtggcctatatggaggtaagatgacactcccacctttacagcatgtattgtatattggtgatgagctgtgctgttctcggcggacacgctcctcaaaccaaaagaaagccccacaatatggacaagtgtgacatgggggcccaagccttgatggagagaaaatagtgcctagtaattaaaagaaaaggacataagtgtgtgtaataggtgggaattttttttcgtgctattgattgacatacatcaggtcgagcatcagaattacattagtgagtcgaacagcaggtcgagcatcatactgtatgagtgatctgatttgacatgtcgagcatcaggttcacatcagcaaaaccacgataattgatgagcaaatggtctgtacattattagcattgtagttgtcatgatttgtaaagggtgaaatgaaatgatagttgtagagaactaatatatgactaaacttatgttggtgtgtgggagatggagacaataaggcaagaggtcgacgatgaacatgctgtcattggttacatttgttgaagaattaggagagaaacacagtaaaataagtggaaataggaataggacagacctccatcgacagttgcaaaaggttgtgtatggccacaattgataggaaccaaggtggatgactgagatagactggttcgttgtcgaacattccgttgtagcacatggatatgcgtccgatgctctatcatttcagtggtactattaatttctagagaaaacaacacgtgttagggaaaaaaaaattttgtataaggcatgaaagtgcacatgtagataaacatgtgagtggataaagaatataatcaaacctctagatgatttggcagccatagagagcttacgctttcgacatgattgagcagctgttataggatccgggtggggaaatcctgatttagaatatgagcaacaattttcggtcaaaaaagaattaggttaataacatgggaaattgatatgtaaatgtggactgcggtaggttgaactggtagtgatgattatgcataataaatggaaagaaatgccatacatttggaaaacaacagggtagacaattagaacgaaaaaaaaataatcaaaacaacaaatattataccagcagactgagcaagtagtcttcgacgtatagagcgccttgatggcaaatgaaaacttgtagggaaatcaccaacatgggagagggcgtcatcagccagcagaacaacgccatcgctaggaatattccccaggaaatagatatggcacaacagaatcatttgttgacaaataggagagctcaataggaaaatggtttcaaatgtagaaataaaaatttatatggcttggagctaacctgaaggtataaaagctctctcgggttgcctgcgcttgcgagctggtttaggtgttgatggcccagaagaggctgacatcattcaaactgatttatgaaagtaattagtggtttactggaactataataatgaaagtgatatatttattatagcagccaaaacatcattatatgtgtagcaatcaagtagtatacatataaagagaaatttatgcatccataaagtggcacattaggtactggccagtttgctatatcttttttttttttgcgataggaagctcatttcattcgtcagggaacagcaggattacaatcttcagtcacaaggtgctcgatacaagctggggctgactgccactcacccagcctgtcatcagccgtgacttgcttcgctaatacatgagctacatgattgcaagatcggggggtgtacagtaaagtaaaaccatgaaaactggagctaagctctatagcatcactgataatcgacgcaacatgcgatctttgagagccaccctgcttccacagtttggttagctcttggcagtccgtctccacctggattcttaagactcctttctcccgggcaagttgtatcccatcccggcaggcaagggcctccatcatcaaagcatccaggccatgaggatgccatctagcccggccgcctttgaacctcccatcaacatctcgtaggactgcccctgttgctccctggctatcgttcctagagaaagctccctggccagtttgctatatcaggtaatactaattaaactatatgggaagagccataaaaggaagcagataaaatgcactacacatctagtcataattaatctttttgaccaattgatatggagttctttaaatgtgagtgtacttgcaaattgtaatgaagaggctataatgcattttgtttatgaaagaaagcaccaaactggaaagaaggttaaaaaaaagatatgcacatagggaaattgataggcagtaacagagaaagttcaaaatcaaaccaccaagaccaaatgccatgctgaagcgtacatatattctaaatcgacccaatatggcaagccaaaataaatagcaaaattagcactgcaataatccaaatgccaagctgcaagttgacggcctacaaatatttaataagctgacaggcaaaatgagaacatatcaaggaaaagcgcatatctatctttcgttcattagcatattgtcatatagtgtttaatctgaaaaaatcgcaaccttggtagtattcactcagcctaactatcgcaaggaagcatagggaaatagattcatgttttggttgttaacaacagcaaagattgatcagcctgggcattgtctcggtgactcaaaactgaaagaaagcaagattggtatccaacagcaacaaagagcagtatagagaaaaatgacttactgaagaaaaccgaggatggaggcagccgtccagagcagacgggctggcagatggcagccgctcgaccagggcaacaatcgggagccttgttgggtacggccagcgcgctgacagcctgaccgatggagatagctggacgacgactataatcagcggcaaccaccacggggcaaccctacaatcacaggtggtgggtggggaagaacgcaggtcggggaagaggaaggcagccgccggcgaactggtgatcgatggggcagaggggatgacgtcgatttctccgatggattagagaattctcttcatgaattggggattgatgggtgtgtggtggagagggcaagcagatggattagggatttattttcatgaattggggattgatgggtgtgtgctgtgtggagggcaagcatatcgggttggcaagcggacggacagatcacagccacgacagagcatcgcacggcaacgcagccggaaggaagctgttgcactgtagcaaaatactggcctctggtggagcaagttactgttggtagtggcttaggaaaaggacgcgactacacagctagtgctagctaatttgtctaaacaagctactactccatctatgaaagacactatccacctatacttcaaatacaattttctcttaaactacttatctgatctacgctccgattgcaccgttgtgtttgtaacaattaaatctttataacaagatctcacacgattatactttgatgaaaaatcacaaattacttttataatatatctaaattacttttagatttcactaagttacttcttagacatatgaaagtaaattcaataaaacctaaaagtaatttacatatattatagaagtaacttagatcaaaacgaaggtaactttaattaatgccttttttcattgaacaaattatcatatatataagttacttttagattttattaaaaatacttcctatacattcataatgctctgagttgattacttttattattgtttttagttaattctataatttgtgctgattaatttaatttctagatagagtcatatttttatctttacaacgaacttacttcaaatgacatgccaaagttacattcgttttgttttaagttacttctataatatatgtaaattacttttagactttacttaatttacttttatatgtttaagaagtaacttagtgaaatctaaaagtaatttagacatttcataaaaataatttgtgatttttcatcaaaatataatcatgtgagatcttgttgtaaagatttaattgttacgaacataacagtgtaatcggattgtaaatcggatgagtaatttaagagaaaattttatttgaagcatgaatgataggaatattttccctacttacttaatggattaatactataaaaggcacgcatgttgacataataggttggtacaaatcctttcaccctagcattaaactctagcttagatttctctcatacttggcaactggaccgtcgctgctttgtactaaaccgagagtgctcttggtttagattttacgttaggaaaactaaagatttaatatgattaacctagcattactcgtatgtgaacaacaagcaagttagaaacagcaactatgggaacaacaactactgaatcaatttttcacatgggcttgacgcgatggcaaattggcaattgcgaaattgactcacctgatcagaaaacctacgatcgttgtcctcgttcaaaggtccagtcggtgcgcaagcaaaaagcagcggacagccgggcttgcgtcggcgcggcggcaggggtgctcggcgcgccgctcccttgaggattgcgcaatctaccgatctcgtcgcatgaggagtgaggatgagggtggcgccgcggcggtaatctcgctcgctcgtgaggagtgaggtctctctcgcgtctctcgcaattgtcaccgcgcctgttgggttccgttttctcgcatgcgcctgttcggttcctggatcagggcgatgtggatgcagatagatggacggtatggattcacctgttgatttggctggtagggttggaggggtgcaactcctcatttttatattagtatagatatagataaattgtagatataattactatatgattgcatgttgaactttttgtgcttaatgggttgatgtgacatgcttgcatgtgatatttaattaacattagctttatagaaagaagggataagttatactccctccatactcataaaggaagtcatttatgacaatgtttaagtcaaaccttgggaatataaatcatgaataactctcaagttattgagattgaaaatgtaaaaattatacgtatagatttgtcttgaaaaatattttcataaaagtatacatatatcacttttcaataaatatttttatagaaataagaagtcaaagttgtgttttaaagaccgtgccgctgtcctaaacgactttctttacgagtatggagggagtatagaagtgtcaatttgtcaaaataacggtagtgttgagaaatttaacaatatgccactccataaaaatggttttaacagaatgccaccctctaggatgttcttataaaagttccactcaatagagggtactccttaatagaatgccactttcggctgttttgaagcttttaacgtgagaaatgacaaaaatatccctgatttgtatgagcggcggtggtgcagtgggggcggcttggtgggggaggagggtggggttggtggctgtcgcggcgagcgcggcaacgccgttgtcagtgacgaggtggagggagtggagcttgagtcagtggaggcctgggccaaggcggtcagtgactcgcgcgaacgtggggttgacgcgacgtggagccgcgcccgcgcgtagaggatgaggcggcgcacgaggcggcgttgacggagagccagcggcgcagacgaggaagcaacgcttgcggtcgccagagccgaggaggccaaagacaacggccaggagctcggcaaggaggtcggcggtgtgatcctcctccgcgggggcgtcgtcctcaaggtaggctgtgccgccacatgcttggcgggggtggagagggaggaggccgaggtggcttgcaggggtacctagcgatgatggtggtggtagtggtagtggagtgagtgtaggggcctcatggcctagggccaacgacggcagcggcgagaaagaaggaaatacatctggtggtgcaggggtattttagtcatttcacgagtgaagtctgataaaaatatccaaagtggcattcttttaaagagtacctcctattaggtggtatttttataaggacattttagatagtgacattttgctaaagtcaccgctacgaagtggcgccccgtgcgtcagttccccactcaaaccctcgcttccgccgaccacacggccgcaccatggcgccgccgccggagctcatagacaacgtcaccgcctccctcccgccggatctcatctccgagattctcctccgcctcccgccggatgagcccgagcacctcttccgcgccgccctcgtctgcaagtcatggctccgcgccatctgcgagcacggcttcctccgccggtaccgcgccttctcggccttcttcacaggctcaaagtcatgcagggagaccccgccgcccgcctcgcccgcaccacagcggtgcccctctcccccgatcccacctttcgccgggccctcgattgccgccatggccgcgccctcctccacgcttcggacgatgattggtatctcattgtctgggatcccgtcacgggcgaacggcaccgcgtgccagagcctggcatcccgtggctgatctactccgcagcagtgttctgtgccgcgagtggctgtgaccacctcgattgccacggcggtcccttcagagtggtttttatagccacggacgatgacgacgaactcgttaaggcgagcgtctactcgtcggagacgtgtgcgtggaacaagacagtgattcttgctgatggttatcaaacctggcaagagcgtttgcaagccatcactagaggtgaatcataccgtacaccttatgtccagcccaggcgaggtgcccttgttggagatgaaatctacttcacgcttcggaatgagaatgcaatcatcaagtacaactgggccgcgaactgcttatctaagattgacccgccgatacgagatgtgtatgacatttccctcatggagatggagaacggttcactgggttatgcctgcattcagggttccagcctttatgtgtggtcgaggaatgccagttcagaaggggctgcagaatgggtacagtgctgggtgattgagctggagcaaatggtacctgttgccaatcgcggtgatgaagcatttgttgttggctctgcagagggtgtgggtgtcatattcatgagcacaggtgttggattattcacgatcgagctcaagtcaaggcgggtgaagaaggttgaagagcctggggtctactctagcgtcttaccctacatgagcttctacactcctggtattgtactaaaaattgcttatctcctgtccttcatttcctttacagcttctatatatttgctttgtcataatgtaactgcaatattgtaatttcaattgacaaaaacagttttgtgtatgctagagaatactgaatagaggcattgcaaatcagagccttaatttttgtgatgagagtttgcttgctaagaaccatgaccttgcattggtctaatatattcgggatacaaacttgttgatctggtatatttgttactctgttactttcaagcatatctgttactcaggcccagttgattcatggaatagttcatgcagcagtaagtagctaataggctaaactggctattgctaaagatttatagaagccttcttgttatgatatttatagaaacattagattttccttaaatggtattggtaccttctggcatagatgaagctcatatctcagacccaaccttgtaacctttggaactggttctctgtacatagttcgtcaaactgtaaagtttgagctggacagttggttatgagttgtgtgcttgactgtttggtgtgtttctttttttcagatcgtggcacattgttatcgctagcgaggactcactgatactcaaaacatgttgcaattgacttcttccagaactaccactatgaaatcatttattttctgttcggcagtataagtatgaacaatgcaagtaatcatgtttcgaatgtggttctagtgtcgaattcatcctaccaaccatgaactgtatttaatttatcatgtctggcatatttcagttgagcctcaggtacaggaaactaaaatctaaaattatgttgacttttgttgcttccattcagagatctgcaagtcatgcgaagctgaatagctggatcatgtttacttcgattacaaccttacagggccggggtagtgaggtgggtttgatcagtcttgcaattttttggtggtcagttcaacccgaatatgagtggaatattcttttttttaccaactaaacccacctaatcctcaaaccaaacagctgcaaaaaaaaaaaaaaaaaaaaaaaaaaaggatggccccgacccgacgttcaacttgcagctacatactggtattcaagtagtagctcctgccccatcttaactgccatcttagtgaaccttttgcatcatgtcttattggcaggaaaatgttttggacaaggacgggaaatatggattatagcatcatcgatcctcttgcaccaaacaatgctgccgtttttgtttccgtttcatgaataaatgaatgtcaagtggtacagctcgatcgaaacttgtgctctcaacattttatctgcttgtttccgttcctacaatacttgtggactacgattactttttcagttgtagactactgagtaccgactacggagtactaggcttttgtctgatcactactgtgctcaacttattcaggagttctttatattgtttgggacagggagtcgtatgtttataaagttttcccaggttttactagttttatatatcccacgaaaattctattggctgttctgttttcaaatagccctattggtttgcaaacatgtaattatatatttgttagccatttatttattttaaagcttcataatatcttaaacttctatggtggcttcatatatgcattaatagttacatctctatttcaggtgaactatttgttcaagtttaggttcaaaattacagctaatatctccaatgaggaacaaaacataatatccacactaatttctttaatcaaggattaaatttctgggatgttaaagtcccttaaaaacttgatgtgcataaaaggcaacatcaagttgtggataatgaaatggaaaaagttacccccctacactattctggaagtacgaattacccgctcaattaaaaaaccaaatattcttcaccctcaatttttcatacgggacagatttaccctgatagattttggagcggttttgtttctatgtgacagtccagttagtataaaaaattataaaaaatataggacccacatatggtaaccaagagaagaggccgaacgaataagtgggcctattatttttaacttttttatgttcactggtcacgtgtgcaccatgtaggaccaaaaccgctccggaatcgtcagggggtaattcgaccgatatgaaaagttgagggcgaaaaatgtctaattttttaattgatgggggtaattcctaccgccacaatagtttgagggataatttggatttgtttcctaacgaaatatggataacgaatgggcggacaattaatcggaatttgttggaaatttaacatttttcaaatatacgttagttgataataatttgacctcttttagagagaaatatatttaaatgtattcctaccatccttgtctcatggtcgtcatcagaagcaaagaagaggaagtcagttccttcattccttgttactttcatagtgttgcgctgtgagaattttgggaaggcaaacgtctaggtctagccagccaatagcagtaaagaacacactaatgggttggaatgctagattattgtgggatgggcctatgtcatcgcacaattatattgttactagcaaaagtgtccgtgcgttgcaccgagtgattacggagtgtgtacagtgatcaaaaaagtgttgcttagggacctaaatcagactttttcccgccctagccggtcggcccatggcctcttatgcgcacatgcaggcgctccccacctcctcgggccgcaacctgggcctaggccgggaagcctccccacgcgcgcctccacttgggttgaattcggtctagccagtgccggccgtccgatcttagggtttcgatcagacggttgggcgccgacgtcggagggacaaaaccccttccctcccggcgccggcgaaaaccctagcctcctcggcccttcaccggtgtgcgcactcgtcgcagggtgagtgcgccgccgtcgagcggccttgccccaacggccctccccatcgtctttcaagcggcgcccctccccatcgtcttctgcggggcaccctcccctccactagatccagtgggaggggaggcggcggtggcccggcggcctagatccgatgtctcggatctaacactagtagagaaaccatctttggtcggtcgacccaaatccataatagtcccggttctattaaaaaccgggactaaaaatgatttttagtcccggtttataagagaaagatctttaggaccggttgttgttaccaaccgggactaaaaatcatctttagtcccggttggtaactccaaccgggatctttagtcccggttgattccatgtcagaccgtatcagggtactaggatctttagtcccggttagtaacaccaaccgggactaaaaacctatttttagtccctaaaaataaaaataaaaaacacactatataatccctattaccgatcctcttttcctgtccacacaacaaactcctccctctatctctttctccctctccaacttctttatctcttccttatctctaactcctaccttctctttcttttttttccttccattagtcacagcgaagcagacggcggccggaaaaagggaacagggggccggtgcgtcgtcggccggcgcggaggcgcggggagcctgcgtcggcaaccaagagaacgcgggngttgaaagtcgcaatcgaagttcacacgt

SEQ ID NO: 8835 - DNA, 54752 bp, Oryza sativa
caaaggggagcacggtaggcggcagtggccggccggccggcttttctttttttttcttttttacgatttatcctgtgatgtatttgatttgtgtgtggtggggatctgtgatgtatttttcagaacttgtgatgtaattttttaaaagtttgtgatgtatttggagatgatctatttgaggatttagagatgttctgtgatatgtgagaatttggatttgggatttcttgacatgattaggggatggtgtgaaatcaatattcaatactaaaacaatgaaaaagagaaaagaaagaaaaaatatctttagtcccggttgttgttaccaaccgggactaaagatcgatttttaatcccggttatttgaaccgggactaaagatagcgatctttagtcccggattcgtagtcccggttgaaaaaccggaactataggggggttacgaaccgggactaaaaagcatttctccaccagtgtaacgggagggaaggggaggtgatggcggcccggcctcccctccgtcggatccagcgggaggggagccagcggcggaccgttgtcccctcgacggcggtggcagttcggtagcgacggtggcaccctctccttccggtatcctttttcttcttgtgttcttgtatccaattcatatgcttcagttttatttgtgcgatggaattccgactgggacttggattgggggatgtgcgatggaattccgactggcgattttttttggggggggggggggcggacgaaagaccactgcacggatgaggtgataaaaggaaaaacacgaatcttttaattagttttaattagttaagagatggagacggatgattatcggtaatgacagatttattcgttcattacacacttaatgatgaccgtatcggcatgacggttagggaataaccgaaaattttggttttgttatttggtctttagtcttaagaccaattggacttcgacaaacctcaagaccaagcactttggccttaggtctgtttggttcggtctcggtcatagaccgaactaattgtaccagaagtttgatttgcaaaaaaaaagccaagtaatcagtacaagatcgatgagtcaaagcaattagacatatctgcagtttgatgccactagcaaatcgagcacaattcagaacaaaagaggcaaatcgagcacgattcaggaaaaaaaaaaaaagaagccaatcgatacttgcatgacttggatcccatcaatctccaccaaaccactagaagctccagggaccagatctcattcatcccaccgtctcctgtcattgttgttcctgttgctcctttcactttgctcatggccaacctcctcggcacagcctcttccgcatccacagtgctcatagccagcctcctcggccacgtaggcctccagagcacagcctcttccgcctccacggtgcagccaaccagcaaacaccagagggcgtcgagttgggacagtggtgttggttttggtgagaggtgagatgcggcggtggaaagggacagcacaacgcaggtcgtcgatgacagtgccacaccatgggaagttgtgatctccattttttctccaaaaactgggagatggggattggcgaggataagatcatgcctagtgatggtgcggtaaggtgttagagcatcaccaattctcctatttcattcccaaaactaatttttcagggattttaaggggtctggctagccatcacacgacaaatttctgacccacaaatcacacagatttctcagccattggattagcatccaacgagcaacagaatcaaatacaaatagacttttttttcttttcacagacataatgggccagatctgtagagaaaaaaaaaattaaaaaacccatccaaacaacaatagatccaaacataagcccaaataaaaaaatagatcaaatagataatttctcagcccaaacaatgatcacgtggtccccatgaacaaagatcaacttacaccacaaggaaacaaactcagaaaccacgtgactctaccaaaccacatcgatcgaacagaaaaaatcgcaaagatggagaacgagaagggggaagctaagaagaaaaagaagatctgctccaaatctgaaagtcaactccaaagaaaatttaaagaaggtgagtaaactgcatacctcaatttctaacagcatcttcaaacacaaaattgattgaagttcaccttctttgaatcttgaaaagaaatctggtcaattcccttcaaatcttggtagaaattctgagaataactacatcttgagatgaaaaacacaaatcagtttaaacagtagaccaaatcagtttagattgagatgcaggaacttgcaaaaataaacaactaacaacaaatctgacataaggacatgtcaactcagaactaaaatacagttgacaagatgaaacacagtacatgacctgaacttgtatattcctatacaacattctccttcaaacaaaattttcttccacttcttaacaaaacagatcatacaaattcaagattctccctgaataacaaaatttattaaaaaaaacaatgcataacaaaaacctaagtactatgcagagttttgtttctcacaaagagaactctactgcccgcgccgcgacgacagaaaccaatgcccattgcaaaacacctgacagcaacatagttaaatagccctaatctcccaggtaataggagctaggaatcgtgggcgaggtcctaatggtcctaccaatacaaaaatatgcaacactatagccaatatataatccacatcagtataaaaactaaagtatagcaaattacatacacagatttctaaagttacagttataacaatagcacaattgccatgtaagttttcaaaaattacactatgcagagttttgtttctcactgaactagtgctctatatggactacaaaaaaaaaagggaaaagaaccaaataattaacaagtcataaaaattacatgatgaaagatctaaagttacagttgtaactttagtacaaaggtcatgtaagttttcagatttagatttaggcatttaggcatgaaacattaaaatcaaatataatatagcagattacatacaacaaatatacaaagatcatgtaagttttaaatccagctaactaattattttattttatttcataattaaattacatacacagatttctgaagtaacagtagtaactatagtacaatgatcatgtaagtttacatctgattcctatacacttgttaaattttgcaggaaaaaatgtatttggagagtctactcaactgagcaacatgctgggcacaggagcagaacaagtcatcaaagaaaaagaactaataggtatttatttgtgtgatatatgattaaaatcaatcttcccaaaatgcataaactcaaaattacataggcacacatctaatattacatatgtaatttcagtggaattggactgtaactacctatattttcagattttcttttctaaaagactatataatcctatacacttgttaaattttgcaggaaaaaatgtatttggagagtctactcaactgagcgacatgtaggacaaaaaagctaaacaagtcatcaaagaaaaagaactaataggtatttatttgtgtgatatatgattaaaatcagtcttcccaaaatgcataaactcaaaattacataggcacacaactaatattacatatgtaatttcagtggaataggactgtaactacctatattttcagattttcttttctaaaagacaatatattcctatacacttgttaaattttgcaggaaaaaatgtatttggagagtctactcaactgagcaacatgcaggacaaaaaagctgaacaaatcatcaaagaaaaagaactaataggtatttatttgtgtgctatatgattaaaatcagttttcccaaaatgcataaactcaaaattacataggcacacaactaatattacatatgtaatttcagtggaataggactgtaactacctatattttcagattttcttttctaaaagactatatattcctgtacacttgttaaattttgcaggaacaaaaaagtttggagagtgttcagtgttctcaactgagcaacatgcaggacagagcagctgaacaagttatcaaagaaaaagaactaataggtatttatttgtgtaatatatgattaaaatcagtcttcccaaaatgcataaactcaaaattacataggcacagatctaatattacatatgtaatttcagtggaattggactgtaactaactatattttcagatttgttaaataaaaaacttgcataaactgaaaattttatgaatattttcaggtttgtttacaccaagagttacctacagcccacaagcactacatgatgagttaacaatgctcaactcacaaacgacacaggttggtttttataaaagcattacaaaaatctatgcaattcatattaatttctattatactaacattgaaaaaattgcagccgggaaacatgtcctatactgaatctaatgcaacatgtcattaatagtccacgcgttacactacaaccttcccaggtaagaatatttctagttatattaaagtacatataatatggatcagtaataacaaatattgcaggaagggcaacaaaacttcacaaggttgtttcagacaccaacagcatatcatgtaagcaaaaaaaaaaggagcattgcctatattttgatgacatagaaagaaaaaaaaattatacaatcatgcacctataaaaaagtatacatgtactaattttgtttattactaacaatgattaattattttaatcatgcagaactcaatgatctttaacaacaagcagattttccccaaacttgggaacaaatcatgcactgccaagcattgaatggaactaccaggaatttgatgaaatttacaacaacagcagtcacaatacttatgaggtaatattaacaacaaatttttccaaacttattaataaaaaactcattgctgtgaactaacatttgtttgaaaaaaatgcagatctcagaatggacaacaattgaagatttgtatgaattgaagaacacacatttcaaatcacaggtatatatatatatggttcaaaaataaacagttatattgacaagcatagaaaaaaaatagttaaaattaattttgctactaataaacatgcagggaaaatcaagcagtttcacaaatggagatgaacaaccagcaatatacacaaacaatgaacaggtgaaattgaaaacttgacagtgtaattagtagatatcatgcattattcataatagagcttacataatagtactatttaacttttgacaggaaattagtctatgcatacaagatcaacatatggacaaggagaatggaactgctcaagaaacagttgaagaaattcaaatacagcaaacagagcaacatgagacaatgccagaaagcaatgaaacatcaaattcagaacctaacagcagagaagaactaaatgaagaggatattgataatttcttgagaaatgatgaggatggcaatacacaaattgacaaaaagcacatacctgagcttggaatgaaattcaaaacagacaaagaagctcatggcttcttcaacttttacgcttatttagctggtttttctactgtgataactcatcactacaagtcaacaagtaaaaagagaaatggtgagattacaaagtatacatatagatgcaacttgcaaggaaaaaatgaaccagaggacaaaaatgcagaacaagaagaagaagaacaagaagaagaagaagaagaagaagaagaagtggaagaagaagaacaaatagaagaagcaacagaacaagaaaggcaaactaatgttcttaaaaagactggctgcaaatgtatgatgatggtggaaaaaatgtttgccctaggagatgtatggcaaatagcaacactagatttgaagcataaccatgcactttgcccaaggagagaggcaaaatttctgaaatcgcacaagaatatgacaataaaggagaaaaggctaataaggacattgaaggagtgcaacatacccactaggagcatgattgttatcctctcatttctgcgtggtggcttgccagcactaccctacaccaagaaggatgttagtaatgttggaacagcaataaattcagaaacaagaaacaacgacatgaagcaagtgctggcttatctcagaaaaaaagaaatagaagacccaggaatatcctacaaattcaaactagatgaaaacaacaaagtgactagcatgttttggactgacgggagatcaactcagctatatgaggaatatggtgactgcataagttttgacacaacttacagaacaaacagatataacatgccatttgcaccatttgtaggagttataggccatgggacaacctgtttatttggatgtgcattcctaggtgatgaaacagcagaaactttcaaatgggtttttgaaacatttgcaacagctatgggagggaaacatccaaagactataatcactgatcaagacaatgcaatgagatcagccatagctcaagtgtttcaaaacacaaagcacagaaattgtctatttcacattaagaaaaactgtagagaaaagacagggagcatgttttctcagaaatcaaacaaaaacctatacgatgaatatgatgacattttgagcaactgcctgacagaagctgagtttgaatcactctggcctcaaatgattgagaagttcaatttgcagaatgtgaattatttgaagataatgtggaaaaatagagctcagtttgtaccagtctatttcaagtatgatttctgcccttttatacagagcacaacactaagtgaggggacaaacagcagatttaaaagaggagttggcccacaacatagtgtaatgagtttcatgaaggaatatgagaatataaatgatactatctttgacactttgtacagcaaagatttccaatcaagaccaaagaagccaaagaccttgtggttcaactatctcattgaagagcaagcatcagaactatacaaccttgaaatattcaagaaattccaactagaactaaaggaaacattgagtttgcaagtatcagtgctacaacaaggtaaagtttatgaagtgtttgtgtcaccaaccagcatacagaaagaatatagaccaaggaagcatatagtcattgttgacttaccaaatgaaaactatagttgcatctgtggaaagttctcaaaggatggaatgttatgctcacatgtcctgaaagtaatgttggacctgaatgtcagaaaaattccagaaaaatacataattgaaagatggagaaagaaggaaaggaaagaaacaaaaaagcacatcatgcagaaagaaaatggagataattcagtcctaatgtttaatgtgctgtctaggaaaggagctgacatagcttcaaaagcatcaaaaagaaaaagaacatatgattaccttgtagatgaacttgacaagttggagaagaacattgacttaatgattcaacaggaagatcaaactcaattctcacaacatcaagacagtggtatagaaattgcaaatgcagagcaacaagagcaagaaaaagatgttcaagaagagcacatagaagatcctgatacagcaaatacaaaggggagaaaaccaaaaaggtatagaagaatagtggagaagataatagaaagttcaaagaagaaaattgaagaacaagaagatgcagaagaaaatcagaataaagcaaggccaaaaaggaataccaatgaagaaaaacaaacagcgaattcagcaaccaaaggtaatgctgaaaactaaagaaatgtcatgtacaatgaaaaaaagataaaataatactaaatatttaattgcaggaaaaagaaaggcaacagaagacaagggaacaaacaagaagcagaaatcaaaacaaggctgaggaagcaaaagcattgaagacagaaaaaaaagaatacatatatgacttttatagttcatgtaataggactgaatgagttttatatgtgctacataagtttctgtatgcatatcatatactatgtcaaatagaaaactataactttatgatgaaatatattctatatacacatttgactagacataaagctaaaaatgctgatgtgtgacactattcaagcatcaatagcacggtgattgcttggaaaccttgcctgcaaagaaaattaataatataaaacatatcaaaatttgataaataaaacaagtgtataaagcattatttgcaaaaaaaaatttgtggtgaaaaaaagaaacttactgaatcaaaccaattgacaccaacattttcaacttcggtttgcaacatcttgttgtttggatgaaaaaacatctgattcgcatactgtacgcggatattgttgatattttgtccagtgaattgattagaaagaataattcttggagaccaaatttccatgaacttcattgagaatatgcctgaatcaaaactacaaaacataacaaaacaataactaaacttattttgaattttttattacatctgagcaacaaaaactgaatatcatttgagcaaacaaaaaactgaatatcatctgagcaacaaagaatctactggcataattataaaattatgtcactaaactaaatgcagattttggtggtcaaaaaccaatcaaaatatcatcttccaaaaacaatacaacctacaaaaatgccaaaaaaaatttgatttctcaaaaatcagtttgaatttttttttgaaatgacataaacatgcagcatctaatatatttcaattcaattaccaagggataatttatcatacaaatatcaataaaatattgacagatttaaaaactaacctgtattcttggcgtggaacaggtgggaacttaattttaaaagtgctgaagttcattggagtgcgttcatatttatcccacacaatctgcaaattttttaactgcaattcatacataacaataaaaataattaccagcaaattcattcatatcaatatagttgttaaaaagggaaaaaagaacatggaaataaaagtacaggaaaaacacattaccagcaaaggcagaattggttcaaaaaactcatcatctggttgatgcaatgaatctaaaaacaccagcatcctatcttttatatcaacaacgagaacaaaccagtgctgaccatgtagtatagggaaaaaaagctgcaaaaaaacaaaaacagaaacaacccatacagtaaaaataatgaattacaacaaaacaaaataaacataattagaatagtaaaaatcaataccatgtcacaaaggtgtagtggccgagcactagcagctccaaggaaagattttttcactttttcttgatcaacaaaatcagggtcaagaataagttgtgcctagaaaagatatattgtacaatcagtttggggaaacaaaagacataattttaaatttttttacaaaaagatgtaatgtacaaatcagttagctcacttacaccaatggatgggaagaaataatgcttcttagattttgatggatgattgttttgaaacaaaaagcggcagaaaactgacatgacaaatggcaaaacaacaccagtctttttgagagaatggccaaagctagaaaacttggctctgacattgtcgatatcaacagcatcataactacataataaaaaaatgaataaatagtaaattaataatagatataaatgaacaacacatttttaagaaaaaaatcaaaaaaaaaatacagatggcaaattaatctaaaaaaatggctgtggcaatgtttctgatgcttctgctacttaacttgtaaacaaagggttcagctgtaaaaatgctattaactgagttcagtggatgaaatctagaatcagacaaaaaacatcgcaaatactctaataatgaattatgcttagcaaaggacaaatcagaacatatcatgacagagacatagaagcaaactgattgataaataacagaatagaaagtgcaaacagattaacaaaaaatggaacatcctgaaaatttaaaacttgtattgtctaataacaaaattgatgaaatgctaaaaatctataccaaaataacaacaaaaaggaaatattacctcaaaacatcaagataatattacctctgccacttggaactatctgctaagcgacagagagcaatgtaatatctgttctcttgatcggacactagaaaacgacgtttcattgcaggaacaaatggatcagaagcatgcctgctaggaacaattattcttctaggaccatgagcaggtaattttccgcctgaagagctcatcccatgtgtataccgtgatagattattggttgcattgtatatctcttcggttttaacacaagattctttaacagtttgtggaaatttattttcacccaagaaaacaacatctggagagttctacagaaaacaacaaaataaaaacacaactaaatttaatttgaaaaataaaatggcaaaataaattaaaaaaacacatttctatacttacagtcacatcttgaaataccctgttggaaaaaattgaagaaatttgattaatcccagctgagttctcattacttcttatattgttgtgatcaatgacatcaatagaatcagggacagatcgaaaagatttgcacagctacaacagaaaaatgaatataaatatatagaaacatcttctaaaagaactataaaatacagtattaaaaaacaaaactagtaccaatgatgaaggaggagtaatatctccatgagcttgattatcctcttcatttaactgattattggcatcatcattagaactactaacatcatcttcagaatcaagcaatttgaatgaaggccttgaaaaatcaataatattgtctctggcattttgatttagtaattctggaaatcttgtcttaaacttctttgcaacattatgaatagaagcagcaatggttgcactagcagaacctacagaaacatagtataaccaaaaaattataaaaatttacactatttagcaaacttataaaagaaatgaaataaaatatcaatgaaaaaaacataccagccaaattatgatcagcacaatatttgaacttcttcacaaaagcactcttaggagtcaacaactcataatctaaaaaaaagcactaagtgaagagaaaagaaaacataactaaaataacatcttctgaattgaaaaatgtattaacaaataccaaaatctctgttacttgatgagataagtgcagcagcatgaccagatgcaataacatcatcaccattagcctaacaaagaacaaatgaaaacaaatcaaacttaaaacttaaaaatgggaaaaataaatataaatgatatagaacaaaaaaatacttacaacaaaagagttgacacatggatcattttcaatgggtgtacagacaacaacatcatctggtattgaagcatcaacatctacatataaaaaaataaatttaaaaaacatgcatatagaaaataaaaacagaaactaaatttctaatcagaaaatactaacttgtattcattggggtagaaataccagcattatcatcaaatctagaaggaacagcattacaaccttcagtattagtatcatcaacatcattttgaactttatctgagggtgtaacactatcttcagcaaccagaactagagcatcaataagaacatcttcacaagtatgactcccagcagcatgaacttcagaacaatgatgttccatcagagaacataatttctctttcatactaagaggcaacacagaacctagagcagaatcaagtttctctttaaatgaaattcttctctcagcagtaggatgaggctaaaaaaaatgaaatctataagaagactaataccaaagttacctagtaataaatcaaaaaaggggaccaaaaatatacctgataataacacacagatttaaaatctctaagaggcctaagaccaaaattatcatcatcaactttgtcaagatcagagtaagtttgtatcatgttcttagtccaaacagcaatgcgaggagtgctatttccaggattcttcttgccaaaatcaacatggtcaagataaagcgcctaacaaatttacatttaagtcatatattactaaatagaaaaataacaatatcataataagaaataaaggaaaaaaatacttacagcccaatagaataagcaccctccaaggttgttagacttgaagaactttttcagaaaagtcatagtccaatcataaatgaactttgaccaatcataatttctcagattttcaatatcctcaaaaactgtcagatacttggtgctaggcgtcaaagatgaatttgggcaaagaaagcaagctagcgcaacaatcagaaatgatgtgatcactttatcatcagaaatctattcctttttaataaactaatcaccaaagaaccgaaacgaaggtagatcactgagaccatactttgatagaatgaacttctttccactttcaaaatccctactgaattgcaaaccaccttgaggcaaaccaaaaatagtactgacagaatcttttgaaacagaaatcactttgttgctcaaaataatttcagaagacttgtaatcaacatgctttgcaatccaagtggcaaattttattagaacataactgctatcaaacaacagtagagatccaaaatcatagcttcgaatgacattcttttgatgctcagacagtgcagctataacatcagagaaatatttgcaagaaaacctcgagaaagatacttcattcttcttataaatccttgctctcttataattcataaaatgaaaattaaattaataaatcatacataactcaaacatcaatgcaatgtaaaaattataaatacaagtaggaaacttaggcttaatgatcagggtacactaatatttcacacataacaaaacatttaattatcaattatacaaaaaagtgatgaacaatgaaagacatgaaacttgcattggctgaaaacaaaaaataataataataattcatcatcaagcacattgtcaaattacatgaaaggtcaaaattggattaaaatgattaagataaagtagatacataaattcaacaaacaaaaccaaaaaattaccaagttcaatactaaatatttataaactgcagaacatgccatacaacacttaaatacaactataatttacacttgaaaaacatgacaaatgtactaaatcaagaaggatacacataatgcatatataaaagatttaaatgcaagcatataaaaaaatgagacaaaatatcagaaaataaaacacataattgcaatatcagacaaaaataccttggatgtatggaaatcataagattttttcaaatgccttttaatctcatgaacaacctagaaaacaagaaacttatcataagaatgaaaggaacaaataatacaaaaataaatttataacatacctctttcctgtgcattcttaagattaaatcatccaattcagaatcactactggattcactatcaacattacagtcttctaaagcatcaacttcaattcgatccatctaaataacaaaatagacaatgcaacaaaacaacatgagtaaaaaaaaagtggagtttcatcagctaataaacaaagtatatatagagaatacttttataaactattagtataacattttaacagagataaactagtactataacatgcatcaaaagaatgaatatcaaatcaaaaataaaacattactactaaaaaacctagtcaacagatctagttaaaaactagatgtcaaacataaaagctcctaaacagatcatacataaaactaactaagttcatatttaaataggaataaacagatcagattcaagtatacatatacatgagtacttcaaattgaaatgtctgccatatatacctcaagtatacatatacatgagtacttcaaactagaaaactaagtcagaaacatataattaaaatgttcataaattgaaatgtacctacattcatacactgatagtaaaaattacattgctttcaacctaaaattacatttgtaaaaacagtagatttggcatgtaagtacattgtaattttagtataaatgcactgtaaattttggtaacttaaatatgttaactcatcaaaatttcataaagtctccatcaacagtaaagcataaacagaaattatataaaacaagacagggcacagataaagcacaaatcaatcagtcaagctatgaggctatatatcaagcacagattaaaaattttgaaacaactataaaaattgcataaatcatgaatttaaatactgaatcatcttaaaaataaccagagctaaaaataaatcatgcatttagatacaccaatagctaaaacctactcagatccaaaaccaataaccaaaaaaaaacatgcaacaaattacactacaaaaccaatcatcacgagtactgtcttagtgattcttaaactagttcaagcaaatcatgtagagctttagttataaatatttcagaaatgttggcatcatcaaatgtaattttacagatctggagtatactaatcactaatacaacaataacataagccatcttatgattttgaaataaaaatcaacagatcaatcacactgcatcccgagcataaaaggacacaaaaaaaccagagaaactgaaacaaccataactaaacctccagtttgaaccctagccagattcaaatcgaacctagcctgattcaaatcgaacaaaacaactaaacctactcagatccagaaactaccactacaaagataactaaaaaaaacttgcaagtttgaacacaaacacaaatcacggcgaaatcaaatccaaactcctatgggattccaaaaactacaacgatttaaaacaaaaacaaccataaatcacaaaaaaaacaaaccccctttcaaaaacatcaaactcgaatcctagcatgattgaaatagaaaaaaccacaaaaaaaaactgggagcaagcagcgcagcacacaccaaactgtcgaatcaacaaattttgcccccacgccgaccacgcaatcagactaccaaacgaactagaactcaaatcaacaaacctaccaaaccaactacatggaaaactaccagatctaccatacgaactacacaaaaaacaacaataaacaactcctcgtggacatcatcaacctcaacctcaaatcatccatttcatacatccggaaaaatgccgagcacacacacactctctctctctctctctctctcaaaaagcaaaacactccacacataaaggctggaaccctgaatgcaggcataacccagtgagccgttctccatctccatgagggcaatgtcatacacttctcgtatcggcgggtcaatcttagaaaagcagttcatgccccagttgtacttgatgattgcattctcgttccgaagtgtgaagtagatttcatctccgacaagggctcctcgcctgggctggacataaggtgtacggtatgattcacctctagtgatggcttgcaaacgctcttgccaggtttgataaccataatcaagaattgctggcttgctccatgcacccgtctccgacgagtacacgctcgccttaacgagttcgtcctcatcgtccgtggccacaaagaccactctgaagggacagccactcacggcacagaacactgcggcagtgtacatcagccacgggatgccaggctctggcacgcggtgctgttcgcctgtgacggggtcccagacaatgagataccaaccgtcgtccgacgcgtggaggagggcgcggccatggtggcaatcgagggcccggcgaaaggtgggatcggggaagaggggcactgcggtggtgcgggcgaggtggcggacgggatcaccctgtaggacttggcgcctgtgaaggaggccgagcaggggaggggatccgtggaaggcgcggtagcggcggagaaagccggggtcgcagatggcgcggagccactccttgcagacgagggcggcgcgaaagaggtgccctggctcgtccggagggaggcggaggaggatctcggagaggagctccggcgcgagcgaagcggtgatgtcgtccatgaactccgggcggtggcagcggcgccatggtggtcggcggaagcgagggtttgggtggggaattataaggattggagaatagaggcacggggcacactgccttctttgtactacaaatttgctaacccgttagaccaactttgacacctgcgttggatggtgtccatgatggacagtccatctgtgcatcatgtgcttcctccgttttatattataaaactttttagcattgttcgcattcacatagatatgtctaaatccattaacatctatatgaatatgtatgaatatagtcaatgttaaaagtcttataatataaaacggatgaagtatttattatggacacacacctattatcgtcagtactcggtagctgctatcaaaatttgaatttaaaacttaaaattcttgattatagtcagttttctagtttttcatcctaatcattttaatataatcttttacatgcgtttgtaatacatgaaaattttcttcatctttggtcagtcatgaccataccttggagtggtaatgggccaaggtttatacgcatttcgtatcccatctcaatctttaaatattctttaatcttaaaaatctactaaatttcagtctaaccctttttatccggtccttatattttgtaggtcaaaaaattgggctcgttaccacttctatccatactacgctaggacccatgtatccttaattgatttttttatacgtgcacccaaacacaccacactcgctgattcgcacctccacaaatgcatcctctaacacatgctcaaagaaatgaaaatctaaacggcacatccctggtctaactaaatcatattgaaagtccaactgcatatgcgagtaatattgaatcccgtagaaagatcatcaacatgtgcataatattcatgaacataagatttaaaccctcaaggtatcatgcatccacgatttcaccgcccatgattccaccaccacaccactagtacttacccatccattattgatttctatttgcacacatatacaaatggttaaaaccacaaaggatatctctactaccttaaaagtggagttgttattctttggtcacctcctcccattttgcaccgcccacgcatgcttagtgtactacgtaggtaaccaccggatcaatgttttatcactaatattcttacaacatatggacatgttaatagtctacaaataataggcagtcatacgatcttggatcgacagactagattaaactctagtacggggtaaatgtttgcaaccaattggggtagagctaacttgacatacgatattttacacaattttcattgtctaactaagatagcgtttaattataacagcatcatcatatttttacaactactggcgttgtaatctatacttaattaaaaaatacatgaggctttcgtaacctttgtcgtctttcatcgtctctcagttggccccgctccgtttctcccccctcccccaagcctccatctctctccctcttggatcttattccgtatttttttacaaggattccgttttcttagaagtccaatccattgcacgcatgctgtgcacacctccagctgccgcccgggccaaaccctacaccgctgacacatcaatctgcctccccgtgagtttcctccaattgattgcggattcgcatcgattatgggtgaaacaaaaagaggagatcgagtggatcaaaaacccttaactggttttgggagatcgagaaagattcgtccgaatttgatggggaggatcgactttggcattgtacgggcacaaggctgtcgtccggaggttaaagacgctactaaagatagttgatgtatcactggaagaaaaaaacacctttacccattgcaatgcacgaacattttttctagtaggaagagaagatagaggaagttaccgaaagaaagtatgatcagaggacagttcagatgttagtgtacaaggagagagtgttgttcgacggccgcgggaggcggtggtatcacaagttctagtagagagaggagaagaggattgtgataggaagatattagtttaagacccaaaattaataatttcatcgtaatttagctacgtacaacaaactacgtgcctgtaacacctcacacttttaccactatagataaaagcgcaaggttgtggaatattatttaacaaagtattgttttttctaaataatacctcacaatcagagaccacaatagacaaaataattataaccacctttactttgttccagagttttgaggccatctctaatccatcttatacttgcaaagaatgggacctattgttgacaacttttttttggacgagtcacaaaagacaatcgacacacctaaatgtcttgcggtaatatgggatttccaaccaccgcgatctagaaaagccaaataaagatgggttaccggctagcagagcggatttaaagaccaaaattagcctcaaggccagtttagatcaatatgagggtaaacacccatctcatgggtgaattggaaggtttacgggacaaacttacaaaggaatttcgaactcttgcaacgatggcgaacgatttatggtgcaaatcaacaaagatggacgaaccaggcttgaactaggaaaaaaaagtagacgcgatattgaaaaaagattcaattggctaattacgttgaaaatagattatgttggttgtttttccaattgaactggccttggcccttataaaggggttcgtcttgcctcctataggtcttcctccacctcaatttcagggtagaaatcaattagaactcgaaaaatacctccccatgcaaggaaactcaagactcggtgaaatttgacccggacttggactctgccaatctgatcggccacacgccgccagtcagactagctccacacaccggtcagaccggcctataagcggtggtcagaccggccccgtgaaggaaaccgggcgccttccaaaatttggtaatgttttcctatttcgaatctaggtgccaaatttgggggttaacatatgccccctgcctttttgtctatatttgagagccaaaaagcgtagaacacgtggttttagggcgataacctaattacctgccatatcacctcctaagcatcttgccagacgcttgggaagtatttcttcaaatatttcccattgattgctctttaaaatcattctccttgcaaagtttcaagaaaatacgcattccctcgaacgattccacatatccgataaggaccttcccatctaggcaaccacttaccgaagtccttacatctagaacccaaaggaaaaatcgtcttccaaaccaagtttcctacttgaaatgatttttctctcactctttttatataggctttggctactctctttttttccttttctatctcctctaaagcctttagacgtttatcggtcacatcatcaagattgtctcccatcaacgtcctatattcttcggccgataaatcatcttgcttgatatatctaacagagccaagatttacctctactagtaaaacggcttcttgcaaatagattaactcaaaaggagtaactttagtaccaccatgcttagatattctatgagctcataacgcttcaaagagtacctcatgccatctctttggatgtccctcattatttttcttgactaatttcaacaaaatcttattacttgactcaacttgtccattagcctgagcatagtaaggagaagaacttaacaatttaatatcataagattctgcaaagcttttcagttccttagacataaaagaatctctttgatccgtagttaaagtttgaggaatgccaaacctatgaataatatgcttattattcttcaaaataaagtcaattacctccgtgtgagtcatattcttgagttgcacggctttggcccacttggtgaagtaatctgttggaactagcacgaaccgatgcccatttggtgatgaatgatgaatttgacctatgaaatccaaagaccaatctcggaacagccatggcttgatgataggattcaacactacagcgggtgctaattggacattgccgaattgttgacaagcttcacatcctctattgtacttaaaacaatcatcaaccatctttggccaatagaatcccgctctattaagtaaccatttcatcttgttgtaggatcaaggaagttaactagaggggggatgaatagcggttttaaaattttttgtctgaaaccgagttttgtatgcggaagcataaatcaaaacggttttgcacaattcaaaacctaaacaactagtctaaactaagtgcacaaagaagcctatgttgaggtttgcaagcctaggatgattttagcacaaataaactctagtatgtaaacttgctcaaagtaaattggcacaaatataaattgcacaaaataaagaagacaagagacaaagtatttttccacctgatgtttggaagtttgccaaagccaacttcaccactcaaatcaccaaacatccaaacctctcgtcaacagatgagcaaggtgggagccggtctcgaaatggtctcccaagtctctatcactatggttgttcttcctccactctggagatggcaaacaccgagccactcacaaccaattccaggccttctccacaaccttctcggaaaggtcactgggcaactcatttgttgggtaaaacctatcgatgacgggttttatttttggcccaattgagataactgttatccgtgatggctaaatgcttgatacaaatgacttctcacatctatgacctttggttcgtgatgggagcccttcctgatacaaatgagggtttccgcccgattgagatgacctatcccgtgctagtggttcgtcaccaagattttttagaaaaaaaatactgaattttagaaaatgcatgtactagctaattgtaggagttagggatgaaaacggagcggatagtttccgtccgctccggacaaaaacggatatggatacctttcggatcagataattctcggatagttcggatacggatacgaatacggatattttctcccgaatacgaatacgaatatggtaccagggtttccatcggatacggataataattcggatatccggtgaacagtgctattcggatatccgcaggaaccatgagacataccccatttctttctaactctataaccttcaatatacctttatagattttaataatagtttatctcttaacactagtccatactattaatattatttaaattttaaaaaatatttataaattatacctcattttatataaaatgagctaattatatatgttgatatttgtttctattagaagttgagttggttttcgtgttccgagaaaaatttgtttccgtattcgtgtccgatcatattcgattcttattcgtattcgagataatccgtatttgtttccgtattcgagctatccgtatttgttttcgtatccggtaaaaaatatgaaaacaaatatggtatgagcattatccgtccgtatccgctccattttcatccctagtaggagtgatatgtagtagcatggttgctacatactctaatccctagcatggttgttatttagaactcgacagccgcaattttgattcatcacatagcaacaacggagtgagtgacgatgaccgcgaagggaggggtggagacagtggaatataatgaagggattgctacatatcttggcctttttggcttagttcgtttcccctttttccaaactcatcactctctttttccgcgcgcacgtttttcaaactgctaaacggtgcgttttttataaaaagtttctatacgaaagttgcttaaaaaaatcatattgattcatttttgaaaaaaatagctaatacttaattaaccatacactaatggactgctccgtttttcgtgcagagaagtttgttcccaaccatccaaaactaacacagccttagtctgtttggttatcagctcttaaagccaagtaaaacactgaacgctaaatcccagagtagggggaaaataaaaccaaaggctgaaaataaaaacggcctttgtgtctttctgatttggtgcaacatttggattgcacttaatttgtgcccacccctacccataaggttgtgaataaatataggagttaacttatcaatacacgatgctcttttccgatgcaaatgaatatcactgtgaatatgcatgtcactcaactatgaccctgtttggagaactagccagagttattttgaaagcttatttttagcacaaggaaatagtcctccaataaaatagccctaagttgtttggatccaagagttattttgagagctatttggtctttaaggtaccttcccatggagagagatagagagaagacatgttttcagtgggccccatccaaaatagccccaattagcaccccttgagtgggatattttttttggatgggttatttccaaatagctctcaaatagctcactcttttagatttttttggactatttgagctatttaagggagggttaaaaatatcccttcaatcaaaacagagtccatgtggcaaacaagtaatttccctaatatttttatcagatggaggttgtaccgaaatgagtatgaaggcctggaactaaaaaataagagcagcaattttggaaaggtgggaattcaacgacggaaacatggctatggcacataggaggcaggcccagatctcactaacaatattacacctactagaaatatctcatttgttgcaaatctctgatgttaacaaaaacatatagcaaaagcatattctctccgtccaaaaaaaaaaaaacccacttctgggtttaaatctggacataaccagaagtggatttttttggaacggaaggagtagcaaatatctcattaattggaaatatgatcaaagcagttatctgcataaaagttccagttatatttatctggatggcatgtttaaaaaatatgcaaaagcatagcaacttgttgatctaatgaataaaggctgaacacatggtaacatgtcctagttatatttatctggatggcatgttgcccttgatacaaatggacggtgcattagaaacaggagactagttttgggtaatagaggcggtacattatagaagaatagtgccttcacattccatcagtaaagtagttgacatggaactcttcaagcagttcagaagtagagttatgctcaaagagacggtgcgatactctgcccatcaagcatgaactgcaaggttgatgccacgctcatctgagtctggggctcagctgtttgcttggcattcttaaccacatcatttgaatcgacaatgtcatctattacattgaggttactgtcgaatgcctccaactcatgcagccccaatgcatttacatcactagctagcctcacatcctgaccacgctggtttttcttcttctccacttcattctcttgttgcaacttctggtacttcagattgagctcatgcactatgtcagtctcatcaccattgcccccatcacccatggtagggttactaggacccacaccaagtaagcgacgagtgacagcttgaacagtagggcagccaaagaaaaagggcttaccagcaggtgagagcacagcaacagcaacattgacaccacataatatgctgagttcgttagccttcttgattacaacctggcggcgcttggagaagcatacatcacgagcctttctatttgcaatgggcttgatcttaacttttccccttctcatggctgcttacccttcactatcacctaaacaaaaatgtgttctctgtattttgtcaagggatggtacaagaacctttatatagacctctatggagatgaaaaaggaagtgataagtctatattttgtaagaaatttattttgttagtcataagtatatacaaattaatagttgccaatgaatctagccaattttaacaattcgacttccaaaattgacgtttgtactgataaaaggataggctagaattgtgctaactctaattttagtcgaacgactatattgatcatattggtagggagtaatggacgtcatgacatattgctggctagtaacgcccctgattttacgaggcgttaaaactcttgtttagtaaaagattaattactttttttttgcttttccactgtcatctcataagctgtgtcaaataatctcatgttatgcagttcatccctccaaaaaagcaaactccataaactcgagtccaatccatgtttcaaaaacccaaatattcaaatcccttctaaattaatttaaatattacctccctctaatccaagttacaaaatacaaaaataaacccaaatcccaaaatcaagttccagaccaaacaccataataaaaagtacagttcacattttatgttgaaagttcatttaaattttccatggaattccctcattgtatccgtcttaattcaatatctcgtatccctttccatgacttctaatctcaatatttgaattaaagtgcaggtataaatgccgcaccacaaagttactctaaaatttcaccctttaatttcattccttaaaattggaagaatcatcaagagcctactacaatttaaaaaatcaccaagtagtaactcctaccccatcttaactgccatcttagcaaaccttttgcatcatgtcctattggcaggaaaatgtttttgataaggacggaatatatggattattggagcatcatcgatctcttgcaccaaaaaatgctcaaggcttgctgttttcgtttccatttcatgaataaatgaaagtcatgcagtccttcaaacctacttgttctgtcgaatttttttctgcttgtttccatttctaaaatacttgtggactatgatacctgtttcggttgtagactagtactgagtactgactacggagtactaaggcttttgtctgatcactaccatgctctattatatcccacaaaaattctatgtgctgatctgttttcaaatagccctattggtttgcaaaaatatggttatataattgttagctatttattttaaagcttcatactttcataaacttttattgtagcttcatatctacatttatagttagatctttatttcaggttaactatttgtttaagtttagattcaaaattacagctaatgtctccaatggcgaaaaaacataatatccacactattttcttgtaactattaatcaaggattaaatttctgggatgttaaaatcccttaaaaacttgatgtacataaaaggcactgacaaggtagtcaccttctgacaggttgaaactacggagtttaagaatcaagattttgtttgtcgaaacttgtgcaatgaagaaaggttatatcttccatcaaataaaaaaagaagggttatatctctctggactatacatgccatttattgatccaattcagaatttgggaggaatatataaatccatcctaaaagaaggccacacagcaggaaaaactgaagccgtcccatactcagagttggattcaaaaactgataacttgtaatacatccatgctgttcagaaatttccatagacatcacttacgttattatccaactatgttaactgattaagcaaaagcatacacaactctgtccagaaagaagcagcccagtagcagcacgggccgaacgaaacactcagccagccaaaacgaagaaaccacgtcagaggtaaatagcatatacaagggcaagaccactaagttcagagaacactaataaagttaggagaaattgataaaatagaattcagagaaagaaattctgatacctgagccttcatggcctcatcagcgtgttgatgcttattccgatagttggcccattcctgtaaggctggaatcaaagcaaacatcaccggagccatcatgggcgtcttgatgctcaatataatcacagaaaccatattacccaaagcgcaaaccatgctctcaaaacgaacaataaagaatagggagccagctattcagcttagcacgacttgctgatctctgaatggaagcaacataagtcaacataattttagtttcatgtacctgagctcaacataaaacaaacagtaactgaaatgtgccagacatgttagactgcttacagttcatggtcggtaggatgaatttgacacaacaaccacatttgaacatcagacttggcattgttcgtacttgtactgcccaacaaaaaataaacagcttagtagtagtagtagttctggaagaagtcagtggcagcagattcaagagtcaagacaatggatttgtccattttgcaacaagttactcttgagcatgacatcaaagatcagtgagtccttgctagcgataacaatgtgccacgatctgaaaagacaccaaacaggcaagtgaacaactcataaccaactgtttccagctcaaagtatacaatttaacgagctatgcacttagaactaactagtttcaaaggttgtaaaattgggtttgagttgtgagcttcagctatgctagagagcaacataatactttgtaaagaaaacccgaaacaatacgataggataatattatatcaagaaggttctttaaatatttagcaatatccattttagcgtagtagccacttcatgttttatcaattacatcaactattccatgaatcaactgagcctgagaagttagcttcagctatgccagataattaacagaaacctttgtagcagctaacagataccagatgcatggtcatggttatttcacaagtcgaatctcaataataaaatttaggttcttatttccaatgccatatattcagtattctctagcatacacaaaacagcctttgtcaatccatataacaaatgttgcagttatattatgactaataagatatatagaagctgtaaagaaaatgcatacagcagataagcaaagtcttagtacaataccaggagtgtagaagctcatgtagggtaagatgctaaagtagacctcaggctctgcaaccttcttcaccctccttgacttgagctcgatcgtgaacaagccaacacctgtgctcacgaatatggcacccataccctccccagagccaaccacaaatgcttcatcactgagattggcaacaggtatcattttgtccagcttgatcaccctgcattgtacccattctgctgccccttctgaattcaccttccgtgaccacacataaaggctggaatcctcaatgcaggcaaaacccagtgaaccgttctccatctccatgagggcaatgccatacacgtctggcgacggcgagtcaatttcagataagcagtgcatgccccagttgtacttgatgatggcattatcctcccgaagtgtgaagtagatttcatctccgacaagggcaactcgcctaggcatgacataaggtacgcggtagaattcacctctactctgtgcatctcgccatcgctgttcccaggaatcaagaccatcatcaagaactaccggggtgctccacgccccggtctccgatgagtacatgctcgccttaacgagatctttgtactcatcacgggtggatcagaaacaaaaaattagggaggctcaattacacagttttttcaacctccagccatttagggacttttagttcattcatagtgaaaaaatcgaagggggtgctccggggtatccatgagttttgtgggtgtaggtgttggatccgccccgtcatcggtggccacaaagaccactcggaagggaccgccgtggcagtcgaggtggtcacagccgctcacggcacagaacacagcgctggagtagatcagccacgggatgccgggctctggcacgcggtgctgttcgccggtgacggggtcccagacaatgagataccaatcatcgtccgaagcgtggaggagggcacggccatggcggcaatcgagggcccggcgaaaggtgggatcgggcgagaggggcactgcggtggtgcgggcgaggtggggggcgggggctccctgtagaacttggcggcgtaaaggaggccgagcaggggaggggatcggtggaaggcgcggtagcggcggaggaagccggggtcgcagatggcgcggagccattccttgcagactagggcagcgcggaagagttgctcgggctcgtccggcgggaggcggaggaggatctcggagaggagctccggcgcgagcgaggcggtgaggtcgtccatgacctccggcgtcggtggcggcagcgccatggtgcgcccgtggtcggcggagcgggggcaggcgagccgcgcgacacgagagggtttgggtggggattgggaaagagagagtgagagaccaagaatgggcaaggggggaccgaccgcacgcccgcacccgcgctgccttctacccggtccggttcgaccctatcctatactacaaatttgggtttgcgaaccttcgattttgagtaaacaaggcaatattcgtttctgttgaattttgatctgctttaagatctgcattggatggtgggcctgcatcatggactgtaacgtgatactcccttcatccacaaaagttacacatattatttttgacaccaagacgtaatctttcacattccgccaaagaagaaattagaaaaaaactataggctgacgccaaagattccatccaaaaaaaaccatattttgactgtgcttcaactatatcaactgtacttgaactgttggataatcatagtcgacgataacatcacagttcccaccgctattccaaaaccgtacatgaaaccttagtttcatacggctcctctatgatcagaaaaaaggaaagtactttttcatttcattattatcttcttgggcgtagttagaattatctaagataaaatcgatttcaacgtcctaaattagaccaaaggaattctgtctgctagaataataaaaaacgcttcggaattcatctcatcctttataatataatggtatttttttctttgttcagcaataacttaatcttgaaatgaaacactcgttataacaattaataaacgaagaaattaaatcatcttagatgttacaaaatcaagtagtaaatgtaaacatgcaaccaatgagtatttcgaggactccttaggatctaataaaaacatttaatttatctcttcatttaagtcctgaatgtataaagactacaaataggaacaacttatttggaaaaactcaaatatgaaataggtgtaactgttgtggatggagggagtagttttattctcaaaataagtagtctgcaaaacaatgtgaagatgatatttatcatggaatttgacgatgtgtttggcacgacaagaaacattttagcatagcaacccatgagatggcccactacctagtaccacagtgagaaaggtgtaagactgtctccaacagagaaggcaaaacgcaaaatagctcgtgcacagttttttttgcatgtcagaaacagcctccaacagacgacgcaaacagaggaggcattttgcgtatgaggagagagagaacgcaaaattgcgtcgtctctctccaagacgcaatcgtctgcacggcgtggtggtgggcctgaagattcgcgtaggggcgcggtggccagcggacgatgacatcgaggcgagcccgcggccggcgtttccaggcatgtccgcgacggggcgaggagggccgatgacggatcctcgtcggggggcggcggcgcggcgcggtgagcctgcgggcggtgcttgcacggcggatccatgtcggcgaggcgtccacgtcgacgaggcgaggaggatccgcgtcggtgcgaggcgcggcggcgaggcgaggcggatctacgtcggtgcgaggcgcggcggatgcgcgtcgacgtgcgtcagggcgaggcggcttgtcgggcacggcgggtgcgaggaggaagacggaggatttgcgttcgtttgttggagttggctttgttttgggtgcccaccttttcctttcaacgcgaggcataccaggtataggtctcctattttgcatcgtattgttggagacagtctaatagtcggtgaggcaccttgctactagttccattgagaaagaagacgtgataggcgctagccgatgaggcaacaaaatgttttgtacggtgtcaacgatatcaagtggattgtgttaagacgaccacttaatctaaagcggggtgtggcaatatagccatagcttctcgcagtgttagtggtagggattctttttttttttttacttgatgtagggtgactaggagcacctaatttgtgggcatcgtttttattttgttgcacgtacaaatcaaaatgatgttttataatgattgattaaaaattgagtggatataagttgataggcaaaaaaaaaatatgttagggtttagctagttccgtgatcagtgtcggatggttaactggttatatcgtttgtaaatattacggttccttaaaactcctctctattttctgttgttcctttgttacaatgttttggtatatgttcgcaaattctacacatgcatcattatgttaattgtcatcaatgaattatatagtaagttgctcattaatattgcagcaaaacaaaggacaattatacacttattagaccctcttttatattaatatattagcatataggctaggccatctaacaaacctccaataagaggttactcaactgtctatttttttcagccaacaggtaaatactattatccggttatttggaaaaaaataaaagataagtaataaggtctttaaaaaacagaaataagttacgaaaagaaaagactgggaacaccagctcaatataaatgttctccaattccatcagaggttgtaaacgatgagacgctcatcctttaaccctaccacgattcaaagaaacaaacatagacaaattggagcagcaaaactagtcacatcctcatatcctctggcagtacataaccgctccaacttcttcaccagcttctcgtggacaatgtctagacaggcgcggtctttttgttttataagcactttccaactcatatgaaaaactatcaagacaatttctgtctatttagaactatatatataaatttcaaatttcaatactctcatgaaacaacattatacaatcgctaagttataagatagaatatggtgccaaacaatctagtatcaatacgattgacaaggagtgaaaaagaaaaactatgcagatggtccagttagccacgtaactatactgtagttgtacaaaagatgaagatgttctatcaggacatatttagctatgggaggggatgatttgtcactcgtagtcagtcactctcaccacaacttcatcttcatatcagcagcaggccagttagacaacatcttcagttcatctgttcttattgcatttacacatttggacaaacgaacaaatccaattcagtatgtacaagttcttcagcaagcggaccaaccttccgaggcaaagcatgtttgcagagcatagcatagtacatcctgtaaccttgatggtttttcatatgctgtatgagaacgatgaggtcagggagtaagggatccgcgtcaccgtggcaggctgctgctggagcttgtggatgtccttcacgatgtcgaacacggcttctggctgcgctagcttcagcgcgttgagggagtatctccggagctcgtttgtgtgtgtggtgaaccatctggcaacctgtctcgcggcttccctcgggtccttggagaacacaccggcaccattgtccacgacgtaaggcacattcccgacttcctgtgcgacgacaagagggacgatatttgtttagcctcaatatcttggccatcccttctttcaaaaaatattttggcccactcacgtgtatatataaccatggcccatatacatgcattccggtccatctaaacaagggctccatttgattttttttttctgagagcgatgtaattgccagactccacttaactaaaacagggactggatgactctttttttccaaaataaagtggagagcgctacggctcggacgtccgatatctcaccaaatattggacgcccagccgcagcgagcgtatgtgtgtgtatattgctgcacttcattcttcactcctcaatcatgaggaatcttcccatctaacgtcctatgtcccaaagaaaattggttggtcaaatgttctagttgaccaatgagtgaaacatcaaattatatatggtgaaacaaaaaatcagcaactgaaacatttaaaaattttatgaaacatgaaaaagatacatgttgaaacatatcgctatcacatataaaacaactagtgttaacggattgaaacatatgtttttctttcatcaaaatataatcatatgatatcttgttgtaaagatttaattacaacgaatataccgatgtgttcggatcatagattggataattagtttacgagaaaagttgttttgaagctcgctaaaatgcatgcatgtatgtatgaggtggagagaggagagagagtagtgagatgtagttccacgaaatttgtgaaacatgctgaagagacatattgaaacatattactattgcgtatgaaacaaagagtgttaatggattgaaacatatgattatttttaatcagaatataatcatgtgacatcttgttgtaaagatttaattacaacgaatacaacggtgtgatcagattgtagattggataagtaatttaagagaaaaattgttttgaatatcgttaaaggtatatgtgtataggcttgataggatgtgtgtcagactcagtccatccgatttttctccttcagtcggacgtccgaggagaagcattttcgaaataaagtacgcacgcatgttgtcatattgggcctgttcggtcggcattactgtgaatgcagttgcagttgctgcaacaacagtgtacacacgttttgactactttaaatttgactatgtttatgcacaaatatagtaatatttataataccaaattagttttattaaattaataattgaaatatattttcataataaatttgtgttgagtatagtcttaaaatcagaaaaacaattttgttactctaacgaattcagtatagttgcatccgcacacacctgtccaggtatgaagtcgttgagaataattgggagtcctcttatcagggcctctgcaattgtaccaggaccagcctgcaaacaggacacaaacattcctaagtaaaaacagtaaaaaaaaaaaaaccatcaactcctccatcagtccaagaaccaacctttgtgatgatgcaatcgcaagcgcccatccacttctccatctgcttttcgaaccctctaatctgagatcaaaacaaaaagagaaaagaaaatgtaaaaatgtcagccagtggtcactaccaaacgcagtaagagcagaaatgcgcatctagcacggcatcatcctccccagattcggcatatacatggtaccttgacagggacattccaccgtgacgactgcagcgtggaccgcagcacctggttcctgccacagatgacaacgatctgcccgacaggccggcgtctccggcgatcgtagagctcgtcgctgagtgctctcgccgtctcctccaccggacccatcccctcgccgccgcccatcagtagcactgcaggcaggtcgggatccatgtccagctctttcctcagctcatcctgtcaccccaaaccccgagcagagttcagttcagctctgcgtcagtgcaatgcagcaatgtgcggctcatgaagattatctgaaaatgcgcggcaaccggatcgaccgaccttgtcgagcacggcgcggcagaaggacggcctgatcggcaacccgtacacacggatttgggacggctcgagcccccggagcagtgccctcttggccacctccgccgacgggcagtagcacctcgtcacgccatggtggaacctgcacaaataagctctatcgatcaatctgagatcgcgccgcgccgtggcgaggccggcgagagtgcgtggctccggtgaactgaactggttaccatgtcgggtggcaggtgttgaggtcggtgatgacggtgacgaatggcaccttggggtggaggctctgccacttgagcacccacagcgggatgtgctgcatcagcgggtgcacgctgatgataatgtcggggttgtacctcatgatcccggccaccacctcgctgaaatcaaccatgtcagttttcgcgaatcgatcggatgaacagagacggaaacagaacgtgatttggattggacgatcaagttgtgatggctgcgtgcgtgcgtacttggcgtagaaataggccagcgcggcgaggtacatgccgtgcacccagcgcggcgaagtgccgtggaacgccaccttccagagccggacatggcggatcatgaacttgtacgaccgctccatgtcgttcagtggccacccgccgtactccttccccaaatctctcacgaacacctgcgcgaaagcaattcagttgtgattggagttcaattttttttcgcgagaaatcaagagattcatcaaaccagtttacaaacaattcatgtgattgtgagttcaaatgttttggcgagcaaattgaatttgggggcggctgtaatttcggagcggggaggagaggaccgaggcttggagcgcaaggaacagcgggcattgagcggacggaccgaccgacctggtaggcgtcgccgaactcgaggcggaaggcgtcgcggagggcctcggcggatgcgcggtggccgccgccggtgtcgctcatgaggatgagcacgttcttcgccgccgccgtcttcctcccgcacgggagggggacgccgccctcggctccatcctccgagagcgcggcggtgaggccgcccccggcggcgccgtcgtagaaggcgcagcggaggggctggtagagctggcggcctccggcgccgagcacgccacccagcacggcgtcgcggatggagcggcggggggtggcgaccgagatcaccatggcggcggcggcgggggcggcggcttctcctcctcgtctcgtggatcgagcctacgaaaggtttgccggcgaagagagagagacagagagagaaggcagggaggcgagaaggtggcgaggaagggaagggcggatacgccatttatcagtgctctcatatggattacttcaaattgccccttatcctttacatatttcttgttccaggccatttcaagttttgttccaaaatattcctctggctagattattaataagtatatagtcgagaaaattttcatgataacatttactcatctctactctatccaaatttcaaattcttaactagtcgtcattcgtagttacagagaaatataggcatttatgcgacaaagctgggttacacggtgcccaggcaaagtacaagcgggcaaggcaactcgggcaggcagtgcaaaaccacgaaaaagccccagagcgtccggtccacgtggcgaaatgctagtggccgaacgaattgcttttggggggttgggcacgcgcggctagcgggcgaaaggggatgattccgtcggagatgctgggattatgcttggaggattgcttcgttagcctcatgtctgttgctcaatgagtcgatcgagtagtcttttaccacacgcttaaaaaggataagagacagaaactggtgacaaatttctgatgttactaaacctatttgcacttgcatgtgctttacatttgtgggaatcagaatttaaaccttgatggggtggagtcatacacgtttaacgtctttaccaccacagaatcagtgcttctttgtctttggcttattttatttgactagtacatgataattatgagtatatgagttaaaggccctgtttagatcctccaaaatggtaaaagttttgccattttgaagcactttttgctattttggatctaaacactagtaacaaaacttagcaatttggcatttggcatttgctagtccatagtagcaaattgtgccaaaaagtgctttgggaccactccctctctctttctctctctcactttagtgctagaatggtaaaagtttaggatgcatctaaacaccaactaatacttttgcaataccaaaacttttgccaccaaaacttttgccatttaccatttgctattccaaatggacctaaacagagcctaagtattatgtggaaataatatagtaattctaaagaacccgtttaacaataattgatgaaaccatttgaattttcaatacttcaaaatctatagaatagctattacatgttacaacatgctcccttactccacaaataaaagaacttaagtttttttattttcaaaattaggatggaactatgatgcactccctccatttcattataagtcacttctcttttttttctaatcaaacttgttaagtttgaccaattttatagaaaaatttagcaacatctaaattatctaattaattttattaaatttaatattaaatatattttgataatatgtatgttttgtgttgaaaatactattatatttttatataatcttgatcaaaattaaagaaatttgactaagaaaaaagtcagacaacttataatatgaagcgaagggagtacccattaaattaggggtgtgtgggaggataatattggctaaatattacatgaggataatgaaaggtggttgggtgataaagtaatactctaagtacttatatttgtgaacagatggagtggtaaatatcagtaacaaggttagtacaacactacacaaatttcagattaacaaataagttttagactaacacactcttgtagtcttgtgttccttcctcctgcatctagaactcctagaccctaaaccctcatcatataatcaaataaaaatgacatttttcatatttctatgtttacaattgaagttggctattatactttttatgtaactgtatatgcatgactttagctaccagtattttagttatgatatttataattagatggatatgtgcattcacttttttttaataatggaatataacatccctgtctttgctcaagagagttacaaccaattattacagagaatgtgcattcacttattataatacaagttttctcaatatttacgaattagaacataaagaaaatatattctcattcgttgcagcccaagtgatgaggacatcctacaattgatacaaacatacctagtgcataacaaagaccaatgcatgacttgagcttgaacacaactaaaattgttccctgttattcaaacaaattctttttcgaatgatgattttattatgcttaggaacttgggacacgaaccatgtgggtgaaggaacagccacgacaatgaacaagtggaggccggcatgagcaaaggaaggattagaccaaatgattgtactacaagttcggatagcacgtttggacctccaagcaatggtaactttaattggacatagctctttactctggagggtgttgaggtccatgagtacttgttgaaaatgtcttgatgtcttctttgtagatggatcaagaaacactactacaaaaataatttttttacgagaacctctttatctgccaccgtaactggttgcatctgcaaaaatcatcctctatttttacgtgaggctacttaagaagactgcacggaaaaatcgattttcgcagacgggccttttaagtagaccgtacacgaaaatgagcctattttcgtagacgggcctcataaatggaccacgcacaaaaatatcactatcctttacagatttttttatcccatcatttctctcttttccctctcactcacgtcaaaattttcacctcctctctctcactttcccttttattttcactcttctctctctcttgctctcctctcctctcctctcctcttctccgagcgcgcggctagccctaccgcatgcgaaaacccctttcgggttgtccgcaaaaatctcttttataatagtgaaacaccaataaattccatcaatgttgcctagaaactacagaagagatgttcaagactctaacccgcgagttgggcctcttgtatctagaagagcccatcaagggagtgtcttagctagggtttcccatacctcctactattccccccatatataagatagcagcaaccaccaagaacacttccttaccttttatttagatgcaagtttcgcttcagctacttccttttactcacgtgtattggctagaccacccggatgcttgatttagaaccccaactttgtgtgtttgttttatcatctggcaagtgatgtaaatcgtttccttgtcaattggttcttgatgcctattcttttattgcttgcaggttcaaggttgtcggggcccaccctgtcttgataggtaaggaaactccggcgatcgaattctatactattacatttagcattccaccttctatttccagccagatagctgcgatttttagcaacaactatttggattttcaacagtgctgtcatggaatgtagaaaggctacccaacagccctctcaagcaccttactgctgacaatactatcacaattgacccatatatgccaacaaccttgtcacagttagtaccatgatgccatttccacttcaatggatgataggcttgttgggaatgtaccatgacaactagacactagcaatctgtcggagatatgggcccgggggtatgtggagtagaggggaattactttccctccggccacgtgactccgcaggctggccccactcgcgtgccacgcgagtcgtataagcgcgcgggggggggggggggaggggggggggccctcgagatatgacgtcaccctctcgggctctgccgcagcttcgccccgaggccctcacccgactgccgtgtggcagagggagagagcaagaggggagcgcaggctgagcaagccataaatgtgcgacgccccaactgtccctcaccgcatttaatgcggtcagggcagatgtgcggcgtgcctagctaacccctgtccatcggatgtgaccggtctgtgaccagcccgtctccgtcacatccgatggataaggcaaacatgtccccacgtcgccctttgtccccggcggagtgggggtgagtatgacccatcacatccgggcgccactcgaggaaggactgttgcatgtcaccgttcatttatgagggaatgatagggctgtcccccgtgtcaggcgggggacggcaccgggttccgcgcaagaatcggttattgcttagcttccggaagaaggcacagttggaagccaaaaaaggtggagtggggtttttcctccccccccccccccgcgatggaggggaggtagaggcggcatatgtggtatccccttaagctataaaaggaggaccctgcccaccgaaaaaagggggaggcccagaaaagcctgaactccagaagagaggaagcgagcgcgctctctggagtaaagaaacccttgtaaaacttgtccataatcccaaacacaggagtagggtgttacactctatagcggcccgaacctgtataatccgacggtgtgcattcactcctaatagtcatagggacgagcaagcgactaacgagagacgagcctccgcccccggccgaactcatgaaaagggggtctcacgactccctgctattgagggtcttccctcaacacaatcaatgtatgatagtgctgttgcagatatattttgtatatattttttaacatataagttaaaaggcatgaatttgccttaattttccaagagccaaatatattccctttattattcctctaacatattacttgtgtgaatttgacactcaccattcacgatgttgctttaaaacttttgaaaaagatacacaaaacttaattagagtatttattatattcctcataatacattttgttacgataaaaggcttttattttcttaaaacatgtactaaaaaagatatcatgatcaaaatattgaaatgtgaggcgagaaaaacaagaagaaatgtgaggggggaggaaaaaagagagaaaaataggcataattaggaagaataggaaatacatgagaaaatggaaaaaaaagaagaaaataggaaaaaaatatgtgaaattttaaaaaaaatatagggggaaatagggaaacagatgggtcggttgggcaatgctcatgcttgggtcgtaccttgtcggaatatcggcaaccatgccgtggtgtgccaagaatttatataagatactttgtgtatgtgtgaacttttttgcttgtaaatatataagaagaaagtaattagtttttgcaataatttcaaaatctgaatttagtagttacaaagttatatatagaagcaactgcgtattcgtaccgttaccttttatgttattagcttaatagttcttagatttgaaattcataaatacaaagttttactccttttcaaaattaataagttccatccttttcatcaaaactaataatgagtaagtcctatatgggaacaaatttataaatagaatgttgtatttgttgtggagtgataactattttgattttattcttcaaatttcgaaaataatatatacaatcctgtcaaaaaaatgttatatacaacgttgtatttttcttgtagtctaaatatcagttttcgtgataaagaactaaaatttggaattgatatacatatataaatatatatgtaaaattgtagtcagccaaaaaactagtattatctaaatctctaaaaatctagtatttccatccacttattacaattttttttgaatattttctagaaaatttgaaccagctttggtctaaaggaaataatgccttcgaaaaatacatctaaaaatctagtatttccatccacttattacaaatttttttttgaatattttctagaaaatttgaaccaactttggtctaaaggatttttttttgaatattttctagaaaatttgaaccagctttggtctaaaggaaataatgccttcgaaaaatacttcaaaaaaattgtggcaggaatcgaacaagggaccttgtgtttctcatcaggcatgcatgccaattttattctatgtgcgcgcgaaaataattcacttccctcggtttttccgcaggaaattttcatttccccctaatcccgctacacgatggcgattctcctataaccccgcgaactagatctcgcttctctctccaaagaagtgctcgctcccaagatttaggatcctaactgtcgtttccaaattagtttacttgagctacctatttcgtcggactttccagacagccatctccaaaaaaaaatcaccacgcagttctttcgattctacttggcgacgacatccatgtgttgaaccatgttcatcttcaacaacggtgattcaagggagagccggtgtcatattgcctgatgcaagcatcttgtagaccacaatcacaggtgcattttcttttgactagaagctgttcgatctatttccccttccgtaacttgagcgtacacgcatctgtgagttggtgtggggaacggggcgggggttgaagagcagtgctgcaatgatgccgccgccggtggtagtgaggtgtggtgaatggaggctgcggtcggctgggcacgtggttgtcgtaggggtgaccggtggccggtagaaaggcgccgggccaaggcgtgattgcacggggtggagatggccagccggctaggaagctggtgcctgcatctagaaagctagagactagagtcctagagctaaggttgtggttagtgtttcttgattactgaaaatggatagatgtaggaggagaaaagcattggagttctacaaccgacaggtgcatgtttctctgtactagttctattctctgcttttgtagtagggaggcactggatagatatctttgtttatctggaatcttgttggatgttgtggcaatgcacctgctatggattgcttcacatggatctgcagctttacattctgtaattggaactcagtagatacattgctcttttacatcagtctagattcaggatcactaaattgtattatcagattatatctaacagctaattgaatttattgtgtcatgatgtttcttggatggtaaaaatattaatattgtttcacagttggaccaaatgttatatgggtaagggcacctttggatgcacaggttatgtacgaatgcactggacgcaaggcacatgggaagtttgcaatggcggatggtgcaattgatagctcagaagtgcaattatccacaaatgctcatccttctcacacttacacagttagacctagccaaatagaggttgaactgcgtcaagagcttgctaatttcaagcatcagcgacaagaggattgccaatcaatacaaaatgctctatctgagttcaataatcagacaaaggaggttattcctcttttcatgatgctatattactgttctttgtttttactgcaatgtgaacgtgtctaactattgcctaatgaattcttattagtatatgattaatggatctgcaagtacacctccacctcagatcaatttggctgcattatttcctagccattcatctccaactactcagcaggtaagaatattctgaaaaaagttttctactacagatctgtactactttggagcattcatccatctttgtttaaaatatatatgtttgactaatggcatcatattttcttttattgtagaatactacaaataatagctccagaaatgtgttcaaccaaatagatggaaataatagtggaaactgcagccaacaagatgctggtttgagcaacaatgaacaggtattaacaaatctactcttttggtagttcctttttcagaatgattgataaagtaaaaaacttgtaatcatttgtcaattaaattgtggaacttagtcaatagcaatttctctgtcttctcaagtgtagatcaatatgaccatggaacattatattagcctagctatttttttgtacccacactataccagattatgcatatatgttacatacataattaaagataatgtgttgattagatatagtatgacatatcattccacatatttaacattattctagctttttcacttggagcttttattgagggccggaattgcttgatgtgatgtatcctaaaaaactgaagtcatcaatctctagcaaaatttacaattttcttactagctagaagtaacttttaccaagcagctttactatgttttgtcaaaaactagtttgatcataatcttgcgtagtcattgatgatcaccacatgagagtataaactagcttgtacaactaaaccattgtttcatatgctgaaccatatagacattaacctatccatagaacactttccaagtagactatatctgtttcaaacatctttagaagatatttttgtactgttagctaaattggagattggagggatacattgtcacctgatcctttttccttttagggtgacatgggaaacaactctgaaaatgtggtgttacaacgcatggatggaagcacatttggttattctagccaacaaactgctcctgctactaatcaaggcaacagtaagcgagggagagatggagactatgttgatagtgaagatgattatgctgatgatggaaactatgatgatgctgatgaaactcctgaaccgttcgttgctgcagttatagttgattatccttgtacaaagtagtgctcactgttttatgttggttaggaacttcaatttacttatccttagtgcaagacaattacttttatttaggaacgatgatttatgtttttattgtgaaacctaatgtcagtacaatttctgattatatgtgatattattaattaagtcatgagatcactggttcaagttacctttgcagtctgtaatagtattgaaaagtgtagtgctatgaaaatggttggaaatggcagtggttcatttataataaacataattctaaagtatatccactgatttgatttttgacagtgctatcgtggaagcatctgtatccatgacatgcctattgtggttactgctataatacccttgttttattttgctacttgtgactgtgttgtcactatgtatgttgaattttctgacattgcagtcatagaagggggctagctggacaccatgttgagatagcttgacaccaagttaccccaacaatgtgggcagtcagtaaacaagaaccacaacatggctgtcaacgatgagaccatatccccgacatagcaaccccaacaggaaatacccaagagctggctgttgacaaatggcatccgcgacagtttcgtacctttcaccaacagttctaggctgttgcggttgctatagtatggtgttcatatcctccacatgaacctataatagtttctacatataaaacaccacatattcaacacgcactgcaacgcaactaagttaggcaaatcacccgtttttacatcacatagttatccaaatgggaatataaatgaggatatttttagcatattaccatttgctatccagggtgagatccaacacggcatattgtacccccaggctccattcgaatgagatgcagatattaaaccttctctttcgcgtaaaacaagacgagtcattagcacataataaattcagtattaactagtacaaacttaaaatggtttaattgatttaaagaaagttaaaccagaccatttaacagtttgggaaatatgctcatgaaaaatgatgaagtagcatatcccaattgagccaaatcaaagatatagtcttagtcggctgtaggtataacagtaaccctgagtatcattagttcattaatcattacaagaatgcattagcatggcagcatgctaccgtaacgtaggttaattatgcggaaatacttaaaagtttgtaagaggatgtgcgtgatagtgatattatccactcatggaatcatctcgcttgtgtacttgaccaaagagggaatatgccacggaaggcagtcgctagtcacaaatgtgttgttcagggctactgatttggaattcctttttttggaaggcagttccgtttaagtttgatggagacgagcatcaagtaaaggtaaattgagaaaaccattagtgtttgattaattgagttttatttatttttaacttgaaaaataaatttatttggtattttatagcaacttatatattgaaagttttcgtacgaaacatatcatttaacattttaaaaaacgtgctaacgataccaaggtctaatatgcatcttaatcataaaacaacgggcagaaaataggatgtgctcgtatcattggagaggatctattgagcacaatccgcagcaacgaaaaagattcggacaatgatatatatattgcagaataaaatagtaaacactagtggccaggaaggcaggaaggagcccatgcaccaaattgtaagtggcagaggataaaaataataataataattgtacgaggcataatcctcggggtggtatacaggcctcagatttagaaaatgtgctcaacttttcatccaagtagaattgaattcagtgaacttttcccctgtcgctgctagaacaggctgtgacaggtacatgctatgttttccctaggatggtgaaatacggttatttgatgtcatggtccttgtaaacctttagtatgagaatgccatttcattgaattcgtgggtggtatatacctccacatcccttaaagaggcaaaaaaaaaaagagaattaattagctaaacggatgaaaaaaagactggacgattggcaaggtacaagatggaatttttgacataacatttgatcattggtcaaattaaaaatacaaatatatattgatcaggtttaaagtacatttggtaaaaaaaaaatcaaagcaataatacatatcacgataaatgaccaaatatcatgtctaaaagttaatgttgccatacattgaaaaaggagatagtatatatatataccttaactcatattgttacacactaagtacatatagaccttgcaactgtttttttctctctctaaaaataagttttgcaaaagaaatcaagtcagcccaactgattcttgatttgttttgtgaaacaacgccacaacaatgattccacgtaagctctatagactcaaaagatgtacagcagaaaaccaaataggtggccgcatgcttaaagctgattgagtactctttagctcgttcgaaaacaccctctgctttcttgtcccgcacttgtatgttcagacacagtgttcgttatgtgcaccgttggtaggcaagtggattttcataattttatggaacatgcttgaaatacagcagctatacacgaagcaagtacactttcagtaaaataaaaaaaatcaactcctgagaataaatgtggataagcattcatccttagaagttgagttttctaaaacagagagtagtattcagcaagcatagtagtgaattacttaaccctagttggaagcccaatttcaagcccaataagatggtaaattgtggtacctgaaactttttaaccttgctcatttgccatgagaaagaagtaaaaaattgtaaattttacaaaactatagatattttaacaaaattactgtaaaactacatatttaatatatagtatcgcaaaaatacatattcaaaaatgattttatagtttcttagaaaaagaaggaatggttttatcataaaactacatatataatctatgctatcttcaaagtataaatttagtgttgtttttttccacaaaactatagattttagatgctcccttcacctattatcatggtaaatttctaaaatgtgtagttttgcgaggaaatcaatgctctatctgtagttttatgggaaaaaaaagatgacactaaatccgtagttatgaaatataatagcttaaatctagagttttatgataaatttattactagatctatacttttatgatactatggtttaaatatattattttgtgatagttttataaaagtatttgtaataaaactatgttgacttttgatataaacattatacatagagaatattaatagaaatcaaaaaaaattttagttataaacttcgtttcaaagaaagcagtgacatcctgacaaaaaggtggggagcattcgcgcaacgcctgcagggcacccacccaggtagctttgatccctgcatcagaaggggccccctaatgggcgatcgctcgcttggagatgggggcagcgatcaattcgcccccccccctccagcctccctccctccacttggttttcttttttggcaccgcattactttcctattttagtaaatttatgcacctaaagtttatacacctcaagtttacacatctaaagtttagagaccaaaagtttataagtcaaaagtttatatatccgattcaaatttgaatttgaattcaaatatttttttatatatagtatttctatacatctaaagtttatacacgtaaagtttatagacctaaattttatatatccgattcaaatttgaatttgaattatatccgattcaaatttgaatttgaattcaaatatttttcatatatagtaattctatacatctaaagtttacacacctaaagtttatagacctaaagtttatagacccgattcaaatttaaattatatccgattcaaatttgaatttgaattcaaatattttctatatatagtatttctatacatctaaagtttatacacctaaagtttatagacccaaagtttataagtcaaaagtttacatacccgattcaaatttgaatttgaattcaagttttttatacataaatttttttaactttttgtttttttaaaaattttttgtggtgtactgtaataggaagagaagaaggggaggaggaagggggagaagagagagaggagcacagggggaggcgaggggtgatcgccagggcagcgcgggggcgatcacccgcgcgttaggatttccgcatcagaagaccatatcaattccataatgcgagccatgcagccattatatccgaccatacttaacattctctaatccacgtatccacagttcgttaccctaggtgtgaaaacgaagtagatagatcaaaacaaatacggataccatttggagcaaaatcttcaatagtctacaggggcaaagggagctagatagaagagggtgtgcccagaaacccggtcaagcaaatttatagttatagtttatttattttcaccatatgtgctcaatccaaattcaggcgctcaatcaacctaaacttggtctaaagtagactaaggcccctttgaatcacatgaataaaaaaatggaggaataggaaaaacataggattctcacaggaatacaagtgtaaaacagagaattacaaaacacaggaaaaacataggaatgactgtttgattgagccgtaggaaaaacacaggattttgaggagagataaagactcaatggattcttaatatgaggttctacctcatgctaaatttcctccaaaacttacatgggaagaggcattccataggactttcataggatccatatgattcattcttttgattcaaagggctatataggaaaaattcctataggaatgaaatcctttaaaatttctatgaatttcctttgaatcaaagggggcctaagggtgagtttgaggaggaggagattgggaagatacacaaaacgaggtgagccattagcgcatgattaattgaatattaactattttaaattttaaaaatgaattaatatgattttttaaagcaacttttccatagaaattttttgcaaaatacgcaccgtttagtagtttgagaatcgtgcgcgcggaaaacgaggtgtttactcaccctatctcacacgaatgaacgcagcctaaggccctgtttggttggagagatgtcccttaactttggtcccttccgagcataggactaaagtttttagttagggattaattttagtctcgggactaaatgatccaaacagggcctaaacggtgtgtccggcaccctttttctcaactcctctcattcgttttccacgcgcacgcttttcaaactgctaaacggtgtatttttttgcaaaaaatttctatagaaaagttgctttaaaaatcaaattaacccatttttgaaagaaattagctaatacttaattaatcacacgctaatagattgttccgttttccgtgcgggagagattagttcccatcccttcaaactgaacacaccctaaagtaagcgaatgttacccctctctatttcgttccggcttcatccgtgatagtccatatacaaatacaaacacacaacaaatacagatgatttcatgacctttcttccctacagccagccaacccttatccaaccttattgtccggcacggacaagcaaacagtacgaggaacagaagcagcatggcgcaccagcgattctatcgagatatgcacagcggagacatgtaaaaacattaagcactatgtgtagattaatgttagctaacaaactttcagtgtgtactacggttgaaatgtcaaatttatgcatcctaaaaccagaagcatcatcatgtttttaaatagaatgacaagtctgaactctgaactgaatgtctgcataagagtacgtacaaaggcgcatattatacctactcatatttaccagaagacggctgtatggagttccttttttcacaataaggcgatctttaataagcaacaagagaaacaaactgtaaaaggaaacacctttttcagaaaaatcattacattcaattcacaatccgatttcgcaacacagcacaagcaagtacactagaagagtgaaatcttcagtggacaggcaacaagatatggctgtgttcggcattgccggttcccatcctctccctagcttttcacgcgcacgcttttcaaactgctaaacggttgtatttttttgcaaaaagtattttacgaaagttgctgaaaatcatattaatccatttctaaaaaaaattagcaaatacttaattaatcacgtgctaatggaccgctccgttttccgtgtgtacatcctgtgttgggaagactggcttccgaacgcagccttagggcccatattatgtggagggatgaattggggtgctcgatgggaaggcgaggctgttgcagcctcgccgccccggagcctaggtgaggccgaacatagaagaggggagactagagatatgtttaacttcttttttgattgattccaaatgactgcggtgaggtcctctaacaaacatcctaacaaccttatctaataaagcctaacaaatctcctaacaaccttatagggaggctgagttctgcccataacacgtgattaattaagtatttattaagtatttgctatttttttttgctaaaatggatcaatatgattttttaagcaactttcgtatataaacttttgcaaaaaacgcaccgtttagcagtttgaaaagcatgcgcgcagaaaacagagagtagggagttgggactagctcttgcaaacagagcccgagtctttgtgctaccaagatctatataagtgttaacttcatgataaaaaatgaaacatgagattctaatcaggtggtaccgtggtagtaccttccttgaatgtttttttctaagtaagagaagggattcaattgaaatttgcaaccaacataatgaaatcacaagacagagaaacatctaagctatgtgggtggacactaagttagagtacataagcaacttgaagaattcatgtagcccatcacacatcagaaccgttttgataaatcaggtgcattgctgaagtgcagtatcatcttgattaactgctccttttcaaatcatatacatatatagctacaaatttcaagaatcaagttaagaagtgatgcagcatgtcctgccagcataacatgtaatgccaagagtgacgattgccgacctccacaagaatgaacacagaaaatgaggatgaaggggatcccctaataatttacagggttatacagattaaaattgcaatttgccgccacgaggaagttataagcataaggaactataccaaaaggaggaggattgcgatagtggcatagtgccatcaagaacactgtttttttgggacatgagaaccagttgcccaagtcaacaaccatagacaagtagaagagaacgaagttgatgaagtgatatatgcatagcaattaggccatgtacttttgcttgatcaatctgcctaagggattagattatgcaatatctgataatcttgacatcacctaaaaagatcaggaggagagcagagtagaatgtaatccgcaattgacatgccatgtgcattgcagttagttacatatgaaaccaaagcaggaaacatatgtagtttgttggttaggcatgtaacaagtgtagcaaagatacctaaatattgctagctgtaagctatcagaaaaacgcaattgaacataacagaatcttattttcctcacaattggaatagcgaaattgcaagagacaacgatattttgcttaacacattgttattgcctcagaaacaataatcatgtcttaaaatcaccaagagtacagcaatggagtatcacctagttaaggaagaagctttccagccataaagcaggcaaacttattgctccgggaatactcatacggcacgccggccacggtgagcaaccgctcgaggacctgcttggcctgctcgggctccgccgtttcacactccagctcgtagttcgtaccaaagtcgaagcgcgtctcgtcgagctccacgacgagcccgagggtgtcgccctcctccagctggtacacggcgcgggtgttccggaacccgccgaggcagacgaacggcgcggcgtccccgccgacgccgtactcttcggagacgagccgaatgatcggggactcgaccccgccgaggcttgccgggtcgtcgacgcaggcgagggcgatggcggggtcgagaggctcctcgacctcctcgacgcggctgacgcccgcgtcgatgcgcgggcggcgcttgagcgcgaggacggcgcgggagggggcgcggtcgtcgagcccgtagaggcggacgcggagcgcggcggtggcggcggcaagggggcgcgcggcggcgtcgaaaaagaggttgcgctgggcgtcggtgcggcgaaggcggggcgcgaggaagaagaaaagccggcggtgcgcgccggcgtcggggaggcggagcttgatctcgacctccatcaaggcgggcgaaggggggagaggagaggctagggtttggggttgggattgggattggtagggaggccgatgcggtgggacttggagggcgcggcgccaggcggcgggtggaggaggtggaggagggggttggagttggagggcggcggggtcgtggtcggagtggatgaggcggtgggggtgctggccgctgcggcggcggcggcgcggaggtggtcttcgagctcgtcgcggtcggaggagcggagctcgatgcgggtgggcttgcggcgcagcatcgatgtgaaaggaatgggttggcccggtgcactgtggtgaccgggtgggctcgggatgagattataatggagctggaaaataaactgcgatgaaaaaaatcttaaaattaaaaatttaaattttagcttgtcggtgacatgggaccgggggtatcttgactagaggtttggggcagccgcggtcacccacgtggcctgaccccctcgggggggtcgggcccgaagggtaaagtggccgcccctccctctgtctccccgaggggtcgggccgctcccgtttcggccccgagggctggggcgccccgaccccctgtgggtttggcgccacgtgtgtgggtgagcacagcggcgctaacctaaccgcgtttattgcgggttggacgagcgccccacgccgcatttaaaaaagcgtagcacgctcgttcggtctgtgacaggtcacagtgtgtgaccggtcacagaccggtcagatcgcgggttaggtggcaacagacggccttttacacgcctcgccctgtcccgtcggaatgatgagagcctctaggcactcgtccctagccggagccggcgtgctaactcctggagttagcacgtcagtcccggctagattcataccaggcttcatcgcaaccattacaaggaagtcattttatgaagaagggctgacgtgtggcatgctaaactgacgcgtggtagacaagaatgaccggtttgtgactggtctgacgccggtcacgtcatcggcagacagccgtgctcccacgttgcgcctgcttccggcggagtggaggtaggtatggcccatcccatcggagggtcattcgaacagcagccatggcaaatctccgcccattaatgagggagtaacagggagatccccggtgtcaggcgagtgatgacgctgggcctcactcaaagacaagctgtgatttagcttccaggcgaaggcgcaagccagttttttttgggaagatagggtgagtccccacccaaaagaagagtaggtagaagtggtgcgtgtggtatccccttgagatataaaaggaggaccttgcccacttaggagggggacaactcagagaacacctgagctcgtagaggagagaaagaggaagagggtctctagagtttgaactctcttgctctccagctctttgtaactccttcatacacagatccaccagaacacaggagtagggtattacgcttctcagcggcccgaacctgtctacatcgcccgtgtcttgtgcatttgctctctcgcgaaacattccacagatcgagggcttagaacctcacctaacgcccccggccgaaccggcaaagtggggcccgcgcggtctcccgatgaggagccccacgctccgtcatctggcgcgccaggtagggggcgcgtgtgtctttctaagccctcgtcctctttcgtgtgcgccaagctactcccgctcagcccaatggccgaacgggcagtggcgcacaacctctctccgagcgctagcggtgacgatggggagcagaacccgcgctgtcgagctcgtactccaccgtccccctctcgccgaagtcttgggcgggaggaggcgctcgagggggtcgaaaaatccgcgacttcgccgctcgcgggcgatggagaaggacggcgggacggggagcgtcgcctcctcgtctacggcgacggcagcacgccccagggcatgctccaggctgcgggcgcgctcctgcgtcacccgcccgtcgtccccgatccagagactccagcccgacgtcggctggatgacgggccaacttggtcatgacggcgcagcagcacctaggcaccggcag

SEQ ID NO: 8836 - DNA, 30870 bp, Oryza sativa
atgtggggcactttgaatttgtggtcatgccattcaggcttactaatgcaccagctatattccaggccctaatgaacaaaataatgtgaagtaccaggtaaaaaaaataatgttaagtagctcaaaagaataggaggctaaccctatgatgtagtattatatattcccatggaagtgaagttaaaacacgcctaacaaagatgtgtgttgattacttgattgcttccatgaaacacgacctagcataataaatttctaattgaggctggtaattcaacttaaacaaagttgcccttgacatagaaagatataaataaacatgcagtattccataccaagaaaaaaaattacaggaccattatcatataagctaaaatcattgaaaacatgatagacagtagcaacttgatcataggggaagcaaaagaaacaatggtgcgtgctgagtttgacgtcccagagctgttatatttaactagaatttcttctctcttttttaactcttctcgtgtttttgctaaagcttcttggagtggcatgttgtacatatggctgtggactgtaatgtcacaagttttcttattcggcaccaggtagaagaatccaccctttaaacgacgatccttgtaacggctgagcttctcgttaatgatatctatcaagtgattcatactgcgtctatgtttcttatagaccgtccatgtaagcatggctaatcccttaagcatattatggtaaaccaccgctattcttttttgcactaacaaggatacttcacggtctaatgacgtcgttttagccatagtataaccttcactgcaaatccaggtaccacgctcatctcggagacataaccgaaaattctttttcccaaccttgaaaccagtcttccttcgtcctttcctaaaagattaaaaaaaatctctaagaaaaggaaagagactctagttgcatccatcactccatttaaaaagacatttgcatcttcatatacaagaaaatgacaaccactccagatttaatttttcaaaactttaaccaccaaatagctctcaaaagattatgtttataaaagtaaaaattacatgggtataattttcgttacaagtacttttacaatacaacaatgtgctgtaagttatcgatatattctaataaaaaatagtaatccaaggtacatgtaactattttgtacatattatgcaatctcaattattttgtacatattatgcaacttaattttccgcagcaacgtagcggggtattcattttgtttgctttcaagtacatcaaaatttgttttgtggagtgacaattgcaatcatattctgcatatatagtaatctatccgttttatattataaggcggttgacttttttttccctaatcaaactttgttaagtttgaccaagtttataaaaaaacagtaacatctaaaatatcaaattagttccatttaatctaacattgaatatattttaacaatatgtttgttttgggttgaaaatactataatattttttctataatcttgatcaaacttagagatatttgactggttaaaaaaaatcaaatggcttatgatataaaacagaaggaatatttttcaagtccaaaagaaaaattctactatactattgttatttattattagtatctttcaaacctaaaaaaagtgtgcaacacgaggaactggccattacgtaccttgaacatatatatgccttgaattaatacacgttatatgatttgtgccggcccccatcggtgcacttattcaacgaacaagagaaacgacatatttgtaaaaaaaaattgtgaacaaaatttttatatacatgttcttagcgatctaaaattattaaaggataaaaaataaacttcgataaaaaaacctctaaatttaacttcaaatttaaagttgttaattcaatttttgactgataagtataagcgaaaagatgataccatacatgtttttttgaaaaaaaagatgagatgagcatataattatagtacatacatacctgaagctgcggcaggtacaatcattgtccattggctagcagagtcgcgggtgctgcaaaattgtcgtctctgttaatcgcgcggatgccaatgattttcatggatcaaccgagcacataagccacatatgttatatatacacgtagtattataccttgataacgtcgaagtgggtatggttggagtaggcagtgttgtatttggatacagtataggtgtatccgtgtatgtgtggaaaaaaaacgaaaaaaaaaacgaagtacttgagagcgtgccggtgaggcaatggactttgtatttatacctcagcgacacctttaccttcgagatggacccgatcggacggctacgatcagccgcaccccgcgtctcaccacccaaatacccaacacacaggctacgctataaacgcaggcaaaagcgaccgaaccaaaacccaaacgcgagccgagcctggtcgagacgcttctcaacgccacgccccctcacctaaccgggccgacgacccaagggcccaagcaccagccaccctctctctctctctctctctctctctctctctctcctctccgccgccgccaccccgccgcctccctcctccggcgaccgccgcgggcagagcgcgacaagagggagggaggagagctcgcccgaggtgggggcagggagcgcgaggagagggtgaggggaagatggtgagctcttcgtcgccggtggtgaacgtgtacccgctcgccaactacacgttcggcaccaaggagcccaagatggagaaggacacctccgtcgccgaccgcctcgcccgcatgaaggtcaagtaagtgtccccgcccccaaacccctccctgatctgacgctaggtttcttcttctccccggaaccctaaaccctagagctcagatcatgcccgcttttttccccccttcggtttgaacaggtccaaggtctgcttaaattagatagtactgaaacaggagtgtattaggcattttttttgtgaactatgcttgcttaagccgttacattttaactgggatttaagactaaacacttgtgttctgactgtttatgccaccctagtgttcagatggtcatcgtgggcacttattttgatccgtatgttgatatgggaaattgttttagttacatggcttataatggtgggtgattcgttgggtgttgacttgaattatagctaaaatgccacgaccatctatttatttgctcatgtatttttcctctcacgctgttgatctagctgccaagcactatgtcatgaatagttttacaagataatttacgtttgtcagaagaatacccggaatgtcaagccaaaatagtatgacactggaattttttttctgtttcttcagttgattgcgatgcattgttgtgttaattacatatatctactttgtttccgatgtaacttatgaacagctaggctccttcctcagtatattcctttctaagattatctgtccaataatgcaagttaattacaagttgcttctgtaatgacagctacatgaaagaaggaatgcggaccagtgttgaagcaatcctattggtgtgtttatactttcttcacattatttatgtacacaattttgtgtttgaaatatccaacagttgtcaaattttgtgtagttattactactagtccatataaactgcagtgtgtcaaacaaactgaaatctttgcttgcattgtcctaaataggtgcaagaacacaaccatccccacatactgctgttgcaaattggtaatacattttgcaagcttcctggtggacgtttgaagcctggagaaaatggtgtgttatgtatagctcttttttaaaccctgtcagtttcttcataaattgtaatataatgtatttagctgttggttctgctactggaatttgcagaaattgagggtctgaaaagaaagttatgcagtaagcttgcagtgaactcgccttcctttccacctaactggcaggtaatgagctcaagagaaatttagatgcaactcctttgaatttaagttatatctggtgacattttgcatgtgattcatagttaatccggtattaatgaaggttatccacatggcgtcctaaatttcatagctatttctgatttgtatcggttgccttaatattgatctagaagaaagagaaaactcaactgttgtttcggcaatcctttacctattgatttgcaatatctgtattatttgttactcatttcttatttcaggcacacatattagaatgttactgagtttatgtgtgtcatattgtggcataggtgattatgtgcacaaagttgtaatctgaagcttcaatggtcagctcattgtcttgtatacctcttagtcacagggctagttttctttatgtatgccctttgtttttatgtgccattcaagtacatgtgtaggttatggtatggtttgctggacctggaattttttggagaattgttgctgatgatttttcactagatataaaacgtgcagattcagaatgaacttttaacttattcatgcttgccactctttatagttatttccttatcgtgttttgtattcaatcatgttgataatggttttattgaatgcctttaaagatggatcttgtgtagtttaaattatatccaatctgataaaggtgtaaacattgtttccaggttggagagtgtgttgctgtatggtggaggccaaactttgagactgtgatgtatccttactgccctccacatataaccaagcccaaggtacattcttgcttcaaaaggctttttttcttagggcctgtttggcagggctccaactcctaaaataactccaggagtggagctgtggagtggcccgaacctagctccacccatctagtatattttttcagattactccagcccgctccactccctttttaggtggagctgaaaccgtttggttgggccccagctccatgagaggtggagctggagcgctgccaatcaggcccttataacttagtgaaatcagaaaatctaaatgtgcattgtggtgaacaggagtgcaagaagcttttcattgttcacctatctgaaagagagtattttgctgttccgaggaacctgaagctgcttgctgttccactgtttgaactctatgacaacgttcaggtaatctaactcatcctatagtacaattagaattcttgaagtttgagaatatttttcccatctgtgaggcgttatgaactatgtaccagtggttatagtttctttctgtttcattaggaagcatttccatattatcaatttgattttgcttcattctttcttttttctatttccacttaaaatcatacttacacagaagggaaggatccctatattaagttggtttctaaaagaaaggatccatctcttgtatttagattacttccctgatcttcgtcttgtttggtgtcattgacagggccttagttgtcacataatcacttatctttaacgaggcaacatgattaggacatcttacaaacagaatttccaagtttgataaaaatagattggtgttacacaaaatctaggttcaatcataatgtgccacattagcttttgtaagaacaattttgtatgtatagcctttcctttgtaggccatcacttctgcacagagtttgcttattcttctgatgcagttttttttgtgtcttatgttgtgcttattcttcaattactttgctactgttgctgaaatttctttgtgtggatgcagcgatatgggccagtcatttccaccattccgcagcagctgtctaggttccagttcaacatggttagctcgtgaaggtgatgagagatggagattagtgtgcactaggctctatttgatgggatcttcaacgggctgaactacctaatcgacttggcatgactaatttgttctatcacagagaatttccatgaattagcttgggaaaaatattctggatccatcgttggactgttagctggacatgcatttcgactgtattttgttggattgttttgtatcacatcgcaaagctggtgcctggtgtatttttagatgatcttttgttggctctgcacgctaattgttggtgtacatggctctgtatgcttactgccttgatgttgtatgctgtagctgtaactcttcaggctgcctagcttttttttctagccaggaactccccctcttaactgtaaaaatgctttggatttaagacaacatagagaggattaagctttttacagtgttccatcacatgcaaattatcgtgcgtctgtatgtggcatgcttgtcagttgtcactaaaaactttgcggctgaatgcaaatgcttcacctagcagcatcactaaacgcggactaatagcgctactattgtgtagttcatcttgcggaaacaacacagtacgtggtgctcataataggcggcaattcaggggtttccaatcttggggtaacaacaacacattgcgtagtgctaataataagcggcaattttgggttgaaagatcgactcggtattcttaaaaaaaaagagaggaagcagaactaagtcaagatgatatgggtcgccccttctttttgcgccaaagagtctcagtgagatggagcattgtgtagtgctcataaaaagcggcaattttgggttgaaagataagagtctcagcaagatggtggatttcgtgaaattcgatcactctttgaacaaaatccgatacaagccaagtggttcggacttagcttcggtacaattccgaaatttggatgacgaaattcgaacaaattttgttgcgatcaaagccaagtggtttggtagagctccgaaatttggatgacgaaatttgaataaacttcctttttgaatcggaaaactcgaacaatcttgtgaacagtgggccagtggctcaccgcccacttcaccggtttccggcgtccggcgcggcgcctgcagaagagcccctcgaaaacccctaccccccatagctgcccacgtccccccgtttcccgcgcccacctccaccgccatcgccatgggcaagccgaagcagcaagtgctctcccgcttcttctcccccaagccgggggcctccgcccccgccaccgcggacgatccgccgcctccgcctagacctcccgccgagccgcccgtcgccgccgtcgtctccttctcgcccgccaagcgcgcgcgcgccctctccgtctcccccaaaccaccgccaaaagggccaagccctcccctcccccttccgactacgttcgccgcaggctgctcgaaccgccccggccgcccccgcccgccgctttgaaccctagcggcaaaggctacaccccgctggagcagcaggtggtcgacctcaaggcgcgccaccccgacgtcctcctcatggtcgaggtcggttaccgcttccgcttcttcggcgaggacgccgccgtcgccgcctccgtgctcggcatcatcgcccaccccgaccacagcttcctcaccgccagcatccctaccttccgcttgggcttccacgtccgccgcctcgtcgccgcggggcacaaggttggcgtcgtccgccagaccgagacggcggcgatcaaggcggcgcacggcgggggcgcggccggcacgcccttcgcgcgcgggctctcggcggtgtacacgcgcgccactatcgaggccgcggccggggagctggagggcggcggcgcgcccgacgaggggagcaggtacctcgtgtgcgtggtggacaaggaggtggacgccatggggacggaggggttcgaggtgaagatcggggtggtggccatcgaggtttcgaccggtgaggttgtgcacggcgagttcatggacggagtctcgaggaatggccttgaggccgtgctgcttggcttggcgcccgttgaggtcatcctcgggactccaatatcctctgccacggaaaaggtatacctgtgcggtttgtgatgtgcgaattgtaggctacctgatttgttataatctgcaagtaattccaggttgtaacttacctggtctgttttctcagctattgtagttgttctaaatggaaacttatttaggattgttggtggaaagactcacagtcatctgggtagtttggcagcaatagttcggcattttaaaatttctcagcaaaaaaagaatgattgcttgttgactctgccaaattaagttctagcaaattattcctatagtgaactttggaagggttatttgccttacagtttaatgagttccccccagaattgtttaaagttcttacaatctgtgtgaaagttccttcctgttttgatgtgcttgagacccctctgtttgatttgttctgttctacatgttgtccagctgatggtggcatatgccgggcctacctctaatgtccgggttgagcgcacctcgcgtctttgttttagtgagggtggtgctttagctgaactgctctctttgtttgagaagtctggggttgatgctccaactgttgagaatggcagacatttgatggagatgaacgaggagaacaataatcctcgtgggattgaggtaccgttaagttcttctgaactcactgtcatcgcaccttatgattgggtctccatatgtagtttagtaagttccaatttctttttttctttttggttcaagcagggtatcatggctatgccagaactagttatccatgcactggccttgagtgttcgctatctcaagggttttggtatggacaggataatctgctttggttcttcatttcagccatttacagctaacactgaaatgtctctgtcagcaaatactcttcaacaacttgaggtagacttttatacaacaccgccaaagtaaattttttgtttgcatatatatgaccttctgtttatttactctgcactgtctgtaagtctcatcttgaatcctaactatatggaagaaagtgcatcctatcattaaataatatatatatatatatattatttaatatgagacttacagttggcttttcttagaaacacatggatcacgtcaactttttgtttttatgacctatgttcttaatacacttttccactccattcttccatatatgaaagtaacacctggagtgctttcaggtattgaagaaccactcagatggttcattggatggatcattgttccaaactatgaacaacacatgtacagcttttggatccagattgtttagacactgggtaagactctgtaacctggtcatggaatgaatattaatccatgatgcatcatatcactatgaaaagtgataactagacagctattgtttatcttgactattgtcttaaaggtctttggttgtgacatttcttgcagctgactcaccctttatgtgatagaaatcaaatatgtactcgtcatgacgcggtctctgagatctctgaatcaattggatcacaacaatattcaactaacaatctccaggatgaagtggacatgtcttgctcatcttctgtgagaagtgatctgagcaccattctttcatccgttttgagaatgctggcaggaactcttgatatacaaagaggaataacaaggattttccactgcaaagccacagcgaaagaggtcaaatatttattattccttttcggttctagacttctagttaatttgataatgacacctaattatgctagtttatttcattaaactgacattatacagcatgaatatcctgcttagactaatcccttttttttattatactctctgttcagactgtacatttttattatttactgtccaaatattcccatgatttcaattcaatattcatgtaatcagggtacttcaaatgatactcccttcgggctgataatacttgtcgttttagacaaggatgaggtcaaattttagaatctttgattatgaatcatttttaaaatatttgtctttcaaatatggtgactacatgtatagattagtcttaaaaagtactttaataaaatcatatatttgttaacatttttatacatattataatggaaaataatggtcaaagttgttttttggagaccgtgcccttgtccaaaagaccaaaacaacaagtattatcaacccggagggagtaaatgttatgctgctgaaaaattatggcttggttcttatgccaatagttgactggtgcattctgttcttgacgcctgattgcctatagttttgtattgtagtttgttggggtcgtccaagctatcctgacggctggaaagcaactgcagaagcttgttcttgaggatacagacaccatgtcttctcagcatagaactgtgcactctcctttgttgagaaggctaataaatacggcttcatcatgtactgtcctggctaatgctgcgacacttgtgtcttgtcttaacaaagatgctgctgatcaaggagatatgctaaacttattcattgcatctgttgatcagttcccagaggtataaccttctcttttagggcttgtttggttaatccccatgagggagggaattggaggggattaattccacaccccttcaattcccttgtgggagggattaactgaacaaagccttaatggaatgatcttgttattccctagtttttatgatgcatcgtcttcatatttgaaaaaaaaattataggttgcagagggtcatgcaactgttgaaatggccaagcagaaattggagctgttaattactgagtatcgaaagcagcttggtgtgcgcaacttggagtttaaaacagtagctgggacaactcatttgattgaagttaagtcgcttaattgaattcagttaacttctaactattgttaattgcagttccaagtagcaaatgatgtccatgagaaaagtagcacagagcaaaatattttacagttttgttatacgattaatattaccatcatcatgtcatatcttgtgcctgcagctaccggtggatagaaaggtaccttcaagttggatgaaagtaaacagcaccaagaaaacaattagataccacactccggaagtctcgaaaaacttggagaatttattgctggctaaggaaaagctagcagttatctgcaggacaacatggaataacttcctcatggatttcggcagatactatgcgcagtttcaagcaactgttaaatctcttgccactctggactgcttatactcgcttgccactctcgcaaaacaaaatgtaatagactgttcttaacccttttgtgctcatctttttacattcactttgttccaacagtacattgctaaacaaccaatattccatctgccagaaatatgtacgaccaaattttgttcgtgagaatgaagcaagtcagattcacataaaagatggccgccatccggttagttttggatcacttcccactccattcctaatatgaatgcaacttcagtttttaacaggcaaatcacaaacagtatcattgcattccttttattagttgtaatacagtactgcctcacaagttttgcatccctaagaaaacaaatagaagaacctgaaaatttgagatactcatactgcagttgaggggattagttctattggtcaattttaattactccttccttttggctgtacatctaccgtgctttgggcattttggtcttttcaaatatttaggtacctaggttttgtaagggaagtcgtgtgtacagatttgtcacgaaaagtactttcgtaatatttcaatttgatcgggtttttggccactggtggtcaaagttgtttttccaaggccataccattgttcaacacgttattatatctggcctgagtagagtagttgcatgaaattgcatgcatgtttcaactttaagagctataaagaatagtgtcatgataactgcatgctttcttgaaagcttagattttacctacaattatttcaggtggtcaatatgaaaataatattctactgtgccacggacactatttccaatactactggcagatcacacacggtcatgcatacttcatgtgaagcatttagtttatgttgacaatgtttgtatttctatgctgttggtttttaggttctggagtccctacttggagtcaattttgttccaaatgataccgagcttcatgcaaatagtgagtactgccagattgttacaggaccaaacatgggaggaaagagttgctatattcgtcaagttgctctaattacattgatggcccaggtataaatattgtctcacacttgtagttcactcatgttaacatgttctggatgtataacatagttactgcaaacttagttgttgggcttaggacctgaggaagtaagggtttactttgttgttatcttaccctgactctgagattatcctaacacttggtacactgatttccttaggttggttccttcgtaccagcttcatcagcaacattgcatgctgttgatggaatttatactcgaatgggcgcgtccgatagtattcagcatggaacaagtaccttttatgaggagttgagtgaagcttccaacatattgcataactgctcatctcggtcactagttatcatcgatgagcttggtcgtggtacaagcacacatgatggtgttgctatagcttatgctacattacactatcttctgaaagagaagaaatgcatggtaatttttgtcactcattatccaaagattcttaatattctgagagaatttgaaggttctgtcggtgcataccatgtctcatatctagcaacacggaaactgttggaagtagctgatagacagatggtgattaacaacacagagacaaaggatcttggtgaaatcactttcttatataaacttgttgctggagcttcagacagaagcttcggtcttaatgttgcgctgcttgcacaggttagttttaagttgtcatgtctttttgtttctatatttctagtttggtccaaatttgattagttattaagacatgtgcttaataccatgacttgcaagtgaccacctttcttcccttgtactctagactgattgtagaataacgacatacattcttcagtttgcttgttgctgtctatatagggaataggttctagttttgggttcattgttttagtacaggaaataagtcctctgttttcttcaatgacgatgcatgttgtggttaatttttgaagtacccttcctcctttgcaagctgagttacagtttgaagtgaaacagtgcttatgatctccttgtttttgttacttgtttgctgatatgtgttcctatttgcagcttccatctagctgtattgagcgcgcttcagtcatggcagccaaacttcaacaggagttaagtgagcgtgagaaaaataagttttgtaggctaatggacgttccacgggaaagctctccgaaagagctttgtgcacagccttatcaagggctggctgaagcatgccacaggatactatttaacgttacatctgctcaaagtaatgacgagttaacggatacactatcttctttaagggaagccagggaaattgccttgaaggcaataaaaggctggtgatcatgttcttcgaagcagtggatacttcaccactggtttccttttgtttttttgaagggatcaggtattgatgctgttccattctgttcaggtattgcttcgttctagctactagtttctaatgtagtgccttgactgatctttgcatgaaggtggcatcttctgataatctactaaaaatttatcgaagatgattttgggactaatgttatttatcgaagacgattttgggactaatgttagccattgtgctaatggcagcagtgtagactgtaaaatatagtggatctggaaggtggaggaccttgaagttaaagccaactctatggaagagcaagtaacttattgtaaatctgtagttacagcatcagttgatgtatccagacttgtccaaaccatattaaagctttgcctccattttgaagtgtagatgcagaaatgagatgcatctcttatatcctattcctcagtgaaatatccctgtgtttctaatttgtgtctatttgtgataatcctggaacttcaaaatgctgtcctccgtcttgatattttcgatttgaatttggactgatctatcttttttttaaaaaaaagttacactaatctatctactggagtacttcagcaacattttctaaaaggaaagaaaggaggatgctgaacgcagcacagcaacattttctaaaaggaaagaaaggaggatgctgaacgcagcacatcctgaaggcgtacttaagaaaggccagcccagcccagcaggggcgccggcccattcatccacttgggggcgtaccatcggtccatcgcacgtgagaggagaggaatatcccgtaaaatccgaagagaaggaatcctcctactacacaaatttcatatttttttagattttctttgtttgagaaagtttcaggtggcagagtcacgaatgcatcatcgctctcctgccctgcctcgtctcctccgctcagctcagctccggtccaaaccaaaacacacacacaacataagaggcggcggccctaacaaatcccaagagacttccactgcacaaccaacctagagcagctttgagacttgagagtgagagctcgcgagtcgcgcacagactcaaacagaggcagagagagatgggaagggaatgaggcggcggctcctctccccttctccggtgacgtgacgacgcccctctcctcctcctccgctgccgcatccgagttcataaaccttcgtcccttccgccccgccatccgtcttcccggaatcccggtatgtaagccccgcccccgcttcatcagttcggtcggattggatgaacgcccattttttgtggggacgttcagcgtgatgtatcaacgattcaatcgaacagccattggttttttttctcccgtgtttctaatctaatgccgcttactttttttagccaaacattttgttggattcctccggggttctgatttgggtttctgttgatattgtgttcgtacagggggcgcgtggggatggatttgtctaggtttactgccccgcggccgggcttgcagatcggcgccgccgggaatggcttccgggcatgctccctgcggcgtctcaggtatcgtgtctgcggcgggaaccccatgggcgcctccgccctcggaggctgcggttcccgtagcctcttctacttggctccaaaccatgggagccctcttgccctccggaccagagggagggcgctgaggtgccagggaaatgactcactggcctatgttgatggccctttggaaggtaccaatggctcagtagtcgataataccgaggacgaagcaaacagctctgggttggatgaggagaagggtgatgatgatgcagaaaatctcagggacttgcttcagaaggcgaggaaagagctggaggtggccaggttgaacagcaccatgttcgaggagaaggcgcagcggatatccgagtcggccatcgcactgaaggatagggcagataaagctcagagcgacgtctcttctgccgtgacgaccatacaggagatcatcagcaaggaggctgatgccaaggaggctgtccggacagctacaatggcgctctccatggctgaggcccgcttgcagttggcgtcagaagctctggatgccaaaaggggatcagtcgggccgatggaagttagcattgatgatgtggaggaggaggcccttgcgtccgcgcaagaggagattaaggagtgccaagaaagtctgtcaaaatgtgaggaggagctgagacgtatccaagagaagaaaatggagttgcagaaggaggttgatagattgacggagcttgctgagagggctcttttggatgcttcaaaagctgaggaggatgttgcaaatataatggttttggctgaacaggcagtagctcttgagatggaagctgcacagcgagcaaatgatgcggaactagcattgcagaaagcggagaaggccatctcctcggttgatgccgtcgtagagttaccagcacctgctgaggagcaagtaagtgatgaagaagacaatgtttctgaagtgtatgattacagcagtgatgctatagatgatattcctgaaagagacgaggtgtcaaatgttgagcgcctaactgttggggacttagctgtagaaggcattgagcaacttgaatcatcccgtgaaatgtctgatgacgaaagcactgacaagttgcttgttgagcctcagaaagaagccgaacctgatatagataagtcaaagcaagggaaaaaacaggaaatagaacgaaaggagtctcagccatcgaatgctcctaaagcatcactgaagagatcatctcggttcttccccgcatctttcttctcctccaaagcggatggagaatttacacctacatctgttttcaaggggttgatgaaatcgactagaaagcatgcgccaaagcttgttgttgggatagtgcttcttggagcagggtgagttgcatagtgaataatatcttttctctttggtttctgtttgctagaaagtaagaaaattctgatttcccatatgtttgtatatttatgctggatactgttatagtttgtcatattttctatctgtataatcaaataactgaaagtacttgttcttacaacagttgaagtgatttcattaatgttgataagccaattctttatgaaacggtgtttctattctctgtctacagagcattcttcttaaatcgggctgagaagagtagtcaattatttcagcagcaagaaataaccacaagtattgaggaagttacctccactgcaaagcccatagttcgtgagatgcgaaagatcccacaacgagtaaaaaagcttattgagctcttacctcatcaagaggtatgttccctttcaactgaacctgtacattggcgaatttatttcccttttttgtgagtacattctcttgctgctcacacaagttagacaagaaatttggcttgtgtctaactcccttctgctctttgttaccctaggtaaatgaggaagaagcttcactcttcgacatattatatttgcttctggctagtgttgtgtttgtaccattatttcagaaaatacctggaggtgatacatttatttctgacatctatatgtgcatagcatggtatcatggcaatcaaactttccttatccatctgccttttttttacaaatcatatcaaacaaattcgtctctgttctactctagttttagtttcaagtttcaaccgaacactacaaagtacaaacattcactttgattttctaatttgaaatatctgaacgtttgttcactgtccgatatttctttttctaatatgcaccttgatatcataggtagtcctgttcttggatatctggctgctggtgtcctaatcggtccctatgggctttccatcatccgtcatgtccatggaacaaaagcaattgctgaatttggagttgttttcttgttgttcaacattggccttgaggtagaaactgagtttcttttagattctttccttaatcctcatgcaggatatatcagcttaccattttttacctgcagctttctgtggaaaggctaagctcaatgaagaagtatgtctttgggttaggctctgctcaggttatactcatgctatgcaaccagtaaagcaatagttccatgtggatactccctaacaaattggagcaattgacaggtgctggctactacagcagctgttggtatgatagctcaccgttttgcagtgctaccgggaccagcagcaattgttattgggagtgggttggctctgtcctcaacagctgttgttttgcaggtacttataactggcatttatcttgtgtcatagattctgacattttgatatttctcatagtcaccgtgatcatatcacaattggaataaattgatcacctggaaaccttttttttctctgcttcaaactttgataccagagtattgtggaaacttcctttctacatatatatttgtggtcttcatttttttagttacactgggtgttgagcacttatggtttgcttctctaggtactacaagaacgtggggagagcacatcacgacatggacgtgctacattttctgtgttattattccaggtatgaccaccatgatcatgaatattggtgattatgttccaagtttctcttcctccctttttttttcttctgatgcacttccttatgttttatcttgagttcttgatgacaccccaccctgtggttgcatttatttgaatgtcctttactgttccttgccatgcatgtatgcaagcatggacttagacatacactcatctgcaagcacatgcttatgcttagggtttattgtttcctcttcccatatctattgccatttacaggaaaaaaaatgcattgacctgactagtgttaatgtaatctaagtctttcttctgatagatatttgttgtgacatactgttgtatgcaggatttggctgtggtggtcctgttgatattaatacctcttatatcacctaattcttcaaaaggaggggtaaccttttttgatgccatgttctttttccctgtctgagttaggacatttttgcttgttggtgcaaaatgatcaacgtgtttactacaaatgattcttcgtgcatgaacaatcaagtactctacatcactcttgtaacagtcagtataatcatgacatgaactgatgagataatctagatgttttatcctatagcatgatcaattgaccaattaaaattgttaaatttcttgattggtgataaattttatgaatcactttaaaagccatgttccattgcattgccctttgtaggctatttaagccagatgatctatttattgttctaagtgctcattctatatttctgatgacataggttaaattgacagaaatataacataagtaactgttgtgtaagatcagctagtgttatatatgtttattgaaatgtatgcttgacacttggacacagccaaagacattaatttagcaagagttttaattgcaatatgaccatggttgcttctcgcagagtctttccataaccatgtggtgtcgcaatgttctctttttatctttttctttctgtttaaactttcttacacaatttctgcttcttataggttggtttccaagcaatagcagaagctatgggaatggctgctgtaaaagcaatagctgctataacagccataatcgctggaggtcgtctggtgagtcggctgttgtttcatttagttggcattcttatccgttgatgatttttgcattgactctaagtttgactgccagctaaacacgcacacctacatgcatgcatgtgtgccactgcacatttatagcccttgttgcctgtgtgctcattctgctctctagaatttgattataactgttcgatttgtaagttatcctttttatgttgaacagttgcttcgtccaatttacaagcaaattgctgaaaataggaacgctgagatattttcagcaaatactctccttgttatttttggaacaagtcttctcacagctcgggtatgtatatttttcttattatatcccagccttgcatagttgcattccttgaatctactttgcatgttgttttactctctcatttcaggctggattgtcgatggcactgggagcatttttggctggtctattgctagcagaaacagaattctccttacaggttgagtcggatattgctccttaccgtggtcttctgttaggtcttttctttatgacggtaaggactctgaatataatcatcattttttttgtctatgtcaatgagctgataggagtttgcttcaatgtttatatggataatataacaatgtacatatcgaatgcaacattacagacatcgaattatgttgatattatcttgctagttcattagttatgatgccaccgacatatgcaatgaataactttacacgcttgttcactatccaactgtttgacttcacatatttgtcaagttgttatgttttatttatttaaatttttaatggtcatgtattgtgtagaacagtattaatggttccagtgtcatatcacttatgtttctgtctttgattcttattttagatttttttttaggtccaacatcgtggtttctattatttactctggaatgacgataaatcgctaattcttcctgtaagctactatcttatttgaagcccttgcttaatgcttgcactgcatttgccctttccaggttggaatgtctattgaccccaagttgcttctgtcaaacttcccagcaatctctgtgatattaggtcttttgattattggaaagacaatgttggttacatttattggtagagtatttggaatttccaccatagctgctgttcgggttggtctgttgcttgcacctggtggggagtttgcttttgttgccttcggagaagctgtcaatcaggtttggccctggttctttctgtttttttgtattgttttaggtgataagatgtatatgtcacacacatctgagttaagacaaactcatggacaatatttttgcagggtcttctatctcctcaattatcgtcattattatttctagtggttggcatttcaatggctcttacaccatggttagctgctggtggccagtttttggcatcaaaatttgagcagcatgatgtgagaagtttattacctgtggaaagtgaggtatcttcttttcactctcatagaccaacccatgttttaccttctgtttcgatgacctttttttttttgctgcaatagaggacatttgcaaaaacttagtatttttcccagtttagtttgtaatgaactgtcaagttcacagattttaacaagaatgcataattccatgctatgttcaattcagctagtataatacaaattttgtccatgtagacggatgacttgcaagaccatattataatattgggatttgggcgtgttgggcaggtttgtaatcctcataagattttatctatctatctatctactttgctcgataaatttctactaatacgcctttcatatatttttagataatcgcacaactcctgtcagaaagattaattccatttgttgcacttgatgttcgaaggtatggtactgcatcttgcaataaccttgttaaaggcagctacaagataatattgaagcatatctcagcattactattggctattatatgtataataatcctcgttctcaagcatgcatataagctgctatgtgttcaaacactttgttatgatttatgtctggctggtgatgcctacttgtggttagtggcatgcttgttagacagtgaacatgtagctggagataaattctagtagatccacaaaatattagaaaattcagttaagtgcatggaaactaaggaagtggtggcaaaacctgcaggaaacagatgttacactttccatttatcgttggttagttacattttggtagattgataaggctggtagcttccctctgaaacaaaagtgatgtcgtgtgtgatgctattgccgtaacatttggttgtcatctccatctgtcttgggctgccaagcctgccacatgtacttgttcaattagtcaatacctctggttaaacctattatcttcaactatttaattcttgggcacctttttcactcagtgatcgggtggcagttggacgcgcgcttgacctaccagtatatttcggggatgcaggaagtagagaggtagaacaagttcaactaaaaattctaccatacaacttgtcaaaaggtgctgatctcaatcgatttttgccaggtactgcacaaagttggggctgagagggcctgcgcagctgctattactttagatacccctggtgcaaattatagagctgtctgggctttgagcaaatattttccaaatgtgaagacattcgtccgagcgcatgatgtggatcatggtgttaacttggagaaagctggtgcaacagcggtaagtatgtgtaacaaagttgtgtgcaatgatttcagcagtgtctaggagtctaggtgatgacatactcctggtgcaacttgaatggacattactccatgtggttcagtgcaagtttttttttacacattttattttattggaaggaacttttaaaatccagtaacctgcctattaacatttgcggcaagtagtttttcacaaatatatgaattgaaatgtttattaaaaccttaaaccttgtggcagttagttttggaacctggtagtacacacccttagttgtacagtcatttgcatagaccattagaaaaaaaatcttttggtcactaatgaattaaatgttgaacatggaagggttttaggtgctcatttgccactcatgggattacccaagtatctgtcggtgcaattgtaatatttggtgtcatcatttggtaccgatggttcttctatacttgtgggctagccatttcgatatgatatataacctgccattgtgctgcactgctgcataagggcccattctttgtcttatgcatatccttttgttatatactgtattctatcaccgatttaataatactatctcctaatggaactacatctacttttaaggttgtccctgagaccttggaaccaagtctccagttggctgctgctgttcttgcacaggtaagcaatgctgttacagtattatactgttatgctctttcatcaagtgtggaatttaatgcacaaacatcaatttttcctattactgtatttcaggcaaaactcccaatgtcagagattgcagcaactgtcaatgagttcaggaaccgtcatctgtcagagctcacagaggtttgtgactgcattgcaacttagtgatcttagtcataaactcataatgatttcaataaaatccatagagctgtaaaattttcctatgtttattgaagaccttaatgaagtcctacgttggtctattggtggatgattttttattcaggttcaaatgctaactgctaagttcttttttctgacagttatgtgctacaagtggaagttctctgggctacggatactcgagagtcatgtccatttccaaatcaaagaccgtcacctctgatgatgagagtgaaactgttgatggagcattggcgatttgagctgatgcgttagtcacctcccttagactgtacagtagataatctgtcatcaaagataatttgcgtatagaaaagtagtagcaaaataattcacgcaatgacgattcccatttttgaaaacttagcattacccctttttttaatgtatggtaggacataggatattacttatcttctaccatcagttcatttatttgtagcccttttactccgttagcaagtaatttcttgatggagaactaggacgatgcttgcaccttacatggagaacactgagaatttcacaagtggcctccaaatggcgcatgatggataagtcgtagtcgtctcttatgaggaatccatacaaccaagattttgggttcagaactaaatattatgattttgttagtactcagagctgatgttggaaacaagtggtgtcgggtttcttttgatattgcattatatttttaacagagcttgtttattattgttcttgtatagtatcttttgttagagctgcaaataacaaattaaatatcaaactagtaaacatttgcttaattaaaaacgagtaatgctatacgtacttaaaaatatttacgaaactcttattaacaaagatcttaaccgtcggatttaagtgggtatttgtgaaaaagcaaaattcgataacaatgtttgtcacgtcagtttttgtacgtgtacccttctccattaaaaaatgcagcagtaatgcgaactgcacatctataaagcgtcttccatctctgatgggcccagttttggaagtactcctgcagtcaaaaaaaaaaaaatccatttctaccatcccgtagaattagtggagagtgagaatgactaaagtaactttaattattaaaaaaataataagagtattgaatggataaaatttttcgtttcacgtgttaatggtaggtaaaatgatagaagttaatttttcgtgtgataaaattcaaactttgagtattttttggaccgagggaatcttacgtggccgcagcgtatactctcaaaaaagaattaaaaaaaagtggccgcaaagtacgctctcatacgacggcgcgtccggtcaggtgccgctccatgcggcctccgtctcctacgtggcgtgtgccaagcggttctctctggcagtctggcacgcggtccccccctgccccaccttgttgcgtccgccctctcacgcaaacacacacaccaacgcagaacacacagaagaactccaaaaaaaaaacagtcagagagagagagagggagagagaggcagaaaccatatcgtttctctgaacaaatcactactactacctcaaatagaaaaaagacgaagtgaaaaaaaaagaaaaaaaacacgcatgaaacgtagaacaatcagcacgagcacgccgaggaagtagtagacatgcaaactttgcaactcctcgatcggaaaagtacttcagtttctagtaccattcgcaggtctcatcacacaaaacaccatcactagctacttaacagataactgaatccatctaggactatagtacctatcaaacgacgacgaatctgtcatgagacgataccaaaaaaaaagataggatatcatctcggtaaacacacatacggagtatgcccttcacgatatgatctgccgcgaccgcgagcacgaacatcctgctgctactcctacggcgccgcgcccgcgtcgtccgcggccgcccccgccgccggcgccgcgccctcgtcgtccgcggccgcccccgcgtcgtccgctggtgccgccgccaccacctcgtccgctgcagccacctcatcttcagcgaactcctcaaggtcgtcgtacttgttgaggcggactagttggtccttgcgcagcggcttcttcaccgggacggccaccttgctaccgtccggctgcacctccagacgaagctgttacggcatcaatacagagcactacccataactctagtatcattgggcctagaagatccaaacgagaagtccacaccaacccaaagtatatgagctgtgattggtctaatagttgaggaagtctataaatactagaagaatcttctagaggcgggtgtggtaattgaatctaacttctatctgaagaaaccattcctcctcctaactctgtttccttcttcctctgctctgaaatgctatgttctgttctgttcttcctcctcatccccaatttcatctgtgattcgatctagggttcgtaacatcttggtatcagagcccgatcctggagcggccaacattcaagacgcgtttgcaaggtcaagtggacgccatggagaagcagcacgaaggcttcgggaagatgctgtccagtattcaagaggcgatcggcgccttgtcggtgaagcaaggcgaggtgcaggagacgatgaacaaaatggagaaatccatttcaagttggcgacctcaagttgatgctgcggtgcagagcttgcagcgtgacatggagttgctgagaaatcaagtcggtgcggtggagcgacatcaagcggaagctgacaaatcgtcgaacacctcgcaggcgttggaggagcgggaggaaattgctcgtcgcacatctctgctgccgacgccgccaaccacgtctctgccagtatcgcaggcgttggaggagcgggaggaaattgctcgtcacgcacctctgttgccgacgccgccaaccgcgtctatgccagcctcgactggcgaaattggtctggatggccaccgcatttcaactcagttccgggggagggcaccgggggtagtcactactctcgtcccacctccgggcaagggtacgcactctctaccgtttcctcctcgtgttcattcaaatttttcggagtttgttggtcgcgaggagagtgggggatcagaggggcgtgggtacaatcacagattgccgaaattggattttccccaatttgatgacagtgatcctcagaattggcgtttaagatgtgaacattattttggggtttatggcactcatccagatttgtgggttagagtagctaccatttatttcattggtcgagctgcatcttggttacgttcttcgcgagctcatttgctttgtgggagttggggagttttttgtgatacggtggataggaagtttgataggaatagacaccttcagcttgttcgtcagattgatcagctcaagcagtcagggtcggtgaatgagtactatgagcgttttgatgatttgtggagtcagttgttggtttatgatccaaccttgagcactgtgagttgtgtccatagattcacggagggattacgcagtgatattaaaaatgcagtgttaatgcattttccccaagatttggagactgctttggctcttgctatcttacaggaggaattgggagaggctggtggatctttggtgtccaaggatgggaagaaattgggtgatcacgctgctcgaattaaaggcgcttaccctttacctttaccaccacccaaatttgtgcatgctggcaagggagatgataaaagagcagctgaagttcctaaagtggccagttcttctgacaaattggttgctctcaaggcctatcgacgagctcaaggtctttgttatgtttgtgctgaaaagtggtctcctactcacaagtgttcaggaccagtacagttacatgctgttcaagaacttttcagtgttttggcagctgatgtttctgatggtgaacaggatgctgattctacctctagtctgatggctatttctttacaggccattcaaggcacggtttctgcacatactttgcgattacaagggtccattcaaggctttgatgtgttaattttggtggattcaggcagctcttgcagttttcttagttcagtggttttacctcatctcactggtgtgaaatctttacttactccaattcaagtaaaggtagccaatggtactgttctttattgtacctctgagttgccggctgcaaaatgggaggttcaagggcatcagttctctactaatttcaaactgcttcctttggacaattatgatatgatcttgggtatggactggctagagaaatatagtccaatggatatcaattggcaggccaaaacaattcagttttgtcttcatgataagtcagtggaacttaaaggagtggtacctgaattggataaatgtgatctggtctctattcaccagttacagttgttgcacaatcaaggagctgtggagtcattggttcagctcactgccagtgacggctctagttcttctcaaaatgttccaagttcaattcagtccattttggatgaatttgctgacatttttactgaaccagaagggttgccagcttgtcgatcttatgatcacactatccctttgattgctggagcacaactagtcaacattcgcccatatcgttatacacctgatcagaagaatgaaattgaaaaacaagttcaggaaatgttgaaaaaaggtatcattcgtcctagttccagtcctttttcttctcctgtgttgttggtcaagaaaaaagatggcacatggcgtttttgtgtggattaccgacatctcaatgccataaccatcaagaataaataccctttacctgttattgatgaattattggacgaattggcgggtgcttgttggttttctaagttagatttgcgctcgggatatcatcaaatccgcatggctcctcaggatgaacataagactgcatttaagacccacaatggccatttcgagttcagagttcttccttttggtcttaccagtgctccagccacttttcagggtgttatgaattctgttttggcagctcaattgcgtcagtctgtcttggtctttgttgatgatatcttagtttacagtcgttctttggaagagcataagaatcatctgagacaagtattaagcactttgacacatcaccaattgaaggttaaactctcaaaatgttcttttgctcaacaaagcttggcttatttgggtcacatcattagtgctcagggggtagctactgatgaggagaaaattattgctgtcaaggattggcccactcctctttctgtcaaagacttgcgtagttttttgggattaactggttactatcgcaagtttgtcagaaattatggtgttatttgtaaaccattaaccaatttgctacgaaaaggggtactgtttcaatggacttctgtcactcaggaggcttttgtagctctcaagactgctttgattgaagctccagtattggctttacctaattttcagcaaccctttgttgttgaaacggatgcatcggacaaagggattggagctgttcttatgcaaaatagtcatcccattgcctttctcagtaaagcacttggacctcgcactcaaggtttgtctacctatgaaaaggagagtcttgcaatcatgttagcaattgaccattggcgttcttatttgcaacatgacgagtttgtgattagaacggatcatcgcagtctgtcttttctaataaatcagagattgtcgaccccttggcaacaaaaagctttgactaaacttttaggtctgaggtataaaatctgttataagaagggattggagaatggggctgctgatgcattatctcgccgacaatctgatggtttggaggaattgtctgccatttctatatgtttgccggactggctacaggagctaattgctggttatcagtctgactcggaggctcagaaattacttcaagctttatctgtgtcaggtgcaggtccatctaactttgaagtgctgaatggcattttgtattttaaacatagaatctggattggtcataacaaacttttgcaacaaaagattttggccaatttacatactgcagcagtggggggtcattcaggaattttggttacttatcaaagagttaagcagttgttctcttggccaggcctgcgcaaagatgttcaggagtttgtccaacattgtgatatttttcaaagagctaaatctggacatgttaaatacccagggttattgcagccattggaggtaccttctcaatcatggcaagtaattactatggattttatcgaaggtttacccagatcggcttcatttgactgtatactggttattgtggataaattctctaagtttgctcatttttttacccctgaaacacccctttactgcctttggagtggctcagcttttcatggaacatattcatagtatacatggtttacctcaagctattgtatctgaccgtgatcgagtgttcactagttctctttggaaggaattgtttcgccgagctggtactcaactccgaatgagttcttcgtatcacccacaatcggatggacaaacagagcgtgtgaatcaatgtgtggaaatgtttttgcgctgctttgttcattcttgtccttctcggtggaagcattggctggcattggctcaatattggtacaatacgtcatttcattcagccttgggtatgactccttttgaagtattatttgggcacaaacctcgttactttggattatccacttcatctgttgatgctcctggagatcttgcaagttggttaagtgagcgaaatgacatgaatactttgattcatcatcatttgttgcgagctcagcaacggatgaagagccaagctgattcgaagcgatctgagcgttgttttgcggttggtgattgggtgttcatgaaattacaaccatatattcaacaatcagttatgactcgatctaacaggaagttatccttcaaatattatggtccatttcaagtcttacaacgaattggattggtggcttacagattacagttgcctgctcacagcttaatacaccctgtcgtccatgtgtctcagctcaagaaggctctcgcaccatctgaagcagttcagccttctttgcctgtgttgaatcctgatgctggtcatttagcgattccaatcaaaattctggatcatcgttcgattcgtcgaggttccaagatgatcaagcaagttctaattcgttggtccggtgtgtcttcttctgctgacacctgggagagtttagatgaaatgcaagctaagtttccagctgcaccagcctggggacaggctgaaactcaaggagggaggaatgttacggcatcaatacagagcactacccataactctagtatcattgggcctagaagatccaaacgagaagtccacaccaacccaaagtatatgggctgtgattggtctaatagttgaggaagtctataaatactagaaggatcttctagaggcgggtgtggtaattgaatctaacttctatctgaagaaatcattcctcctcctaactttgtttccttcttcctctgctctgaaatgctctgttctgttctgttcttcctcctcatccccaatttcatctgtgattcgatctagggttcgtaacagaagcttgcggggagtcgggacagcgttgaaggtagagcggaggagagcggcctgcggcccgcgtgggaagcggcacggcggacggtgatcagccttggcgagaggaggagggggacgtgggcttcgattggaggagcaggtggtggtatctcgctagcattggccgaatggaatggacatggacacgcctgctctctttttaaaggcggacatcctatact

SEQ ID NO: 8837 - DNA, 78115 bp, Oryza sativa
tgctgcctctgctcaccatcctcacacgtacacgtacgccttgatcacttccacgacctgctcgttgtctccacactcaacgacctacacatatcaggcactcttcgaacgtgggctgcagcgcgaaacagccactgggtcctacatgcccccccccccccccccttcctctttctttcccatgtcaccgacatatggaccccactaagcaacctaagacaactttggaaactgcttggggtgcaaaatgaaccggtattggcaattaatagatttcgtatacccggtctgtggttgagggatatgaatcaaaattacccccaagttatatacacgcagaaaattgtcttttttatatttctccagtatacatagaattttgagttaatttttgtttttgttgtctatgagtatacatagaattttccagtccgcgccatcgtccctttctctatcctcttctctctctctctctctttttcgctgagggatgggtggatggtgtcagcgttgcagatgaccatacatagagacaaccacgtgataaggaggaactcctcgtaggagtcttgtgcgcgtggcaaggttgcggaactcacgggtgagattaaggctatgtacaaaggtagagtcaggtatgagctctacattatctagagactagcatcctacaacagttggagacaatatggtctctaatcactaatgtatcaaaatattttttcttactcttctttcctttctttcgccaccatgcaacaaaaattactctaataaatgttaagagtcgactctgagccattgtcatgcataacaaccatatttctctttcttccatgtcatcaaattttacttgcatagcaataaagaaagaccactaataaaaaccgttgtacatgccctaatggccagacggtttccaacctgtcctcgaacctgttcacttcatcaccactttcaactcagccaaaatttaatagggtaacaaactaagcattatcttaccaatatcattctaccaattttggtaattctggaatttttttctcttataaaaacgatatcaaattttagagatgcatcgaactaaatacatccaaacactattaaaatttagcaatgccaaaatttactaaaatcggcattaaaatgaacaagccctcgttaccatggccctcaatatagatgcccagatgggccacccagtccgacatggcccaggcacaactgggcctgagccaaggttagtcgggtcgacacggctcaacctacgcgccgggccaggttgggcctacccacgggctgcacccacggcccagtcatggcataataggactcggcccgcggcccgaaggcacaaccgcccatcgtgcttctttataaattaagtctatttttccatcctcatctctttgggttgtgccttatggttagaataagtctattttgtcccccttcaggcatggcacaataggactcggcccgcggcccaaaagcacaacagcccatcgtgcttcttcatagaataagtctatttttccgttctcatctctttgggctgtgtttcatatggttagaataagtctattttatccctcttctctttgggccatatcttatatgaatgaattaagtctaatttagatccctcgactatttttctttgaccatgccgtgtcggaccggctcaccgtgccaaggcatcgccctaggcacggcccaactgtcgggtcgggctggcacgggtccgacaccaatcgtgctgtgcttgtgcttcaaataaccgtgccgtggaccgggccgtcgggcctcggagcttatggccatcgtcttcttgttcgattcaaactcttcgtgctctgcccgcacggttccataccctactcgttgtgttgttcttcttctacgtacgtcttcgatgcaatgcatcggtgatcgtcgaagctcgaaggaccttgtgtgattccggacggcgacctctatggatttgttcctgtttcaagggccatggacaaggtcgatgtaccggctgtcggtgtttgaaaatgacacagttggacatggcccatggacaagtggactttgacacagatttgtgttgcaatattcggcaaacatagctagcttactgtaaatgtgtaataaatcatatcgatttacttatagtccgtatgatcgtcgccgaggtctgccgtgacgacgtcgacgaggaagtcgaagagatcggtgttctgcacggcggcggcgacgtcctccttgtgcacagtccggcgcttgccctcgagcgtggcggcccaggcgcggcgcgtcagctcggcgatgaacagctcgcacgccttggagaacaccaccggcgcctccccggagatcatcctcgccccgccgccgccgccgccgccgccgtcgacgacgctgctgtcccccgccgaccgcttcatgatcttcttgatgcgagccagcggcagcgcgtgcggcccagtccgcgccgacacgccgccggcgaacatcgccgagtagggcctcgcctgcctcatctcgcctccttaattactggttaaccaatggtgcaatccgctgccggagacggtaacgatggaatggatatttatacgcggccatgcatttgactttgcgaggagcgtgcgtcgccggcggaggccggcaaatggaggaggccggccgttttgacagtgatcggtactttgcagagattatgaaatttaacaaagtacgagatgtttaattaggaacataggattgtgtacgttgctttcacttgcactgtgcagtcaaatttttggcccttgttgcttgcatccttgtgttgcatcattgcttgctagcttctcctagcctccttgtgttagtgcacatgtcattcggatggtgagttattttctaatcaaagatctagaggctagctatgtggcgcgtttaccagtattcgaacaaatattttttagattatttaccaatagaacattggtatagtcgttgatacaaacaagctatttttgattgaaattattgttactgttacgctattaatagtggagacaatgcttgatcattagtctttattctattggaaaatatatatgtaagaatcctttgtttttgttgtgactttcgaggatgactttttttaacgaaattttcatggggcaaatttggatcgcgaccaaatcttaacaacatcttggtgggccgaattaggatcgtaattttagtgggccgatatattcctttccccttcatctcattgtaccgcacaatgggcgtaaggctacgtaactgcagctgcaaagcgtaaaatgcattgacgccttccccgtcctcgatgctcccctcctccgccgcctcctcgccgccggcgccgccgccgtcgccatgggacgacgtctcctgggcggaatccacctcctcgactgttctccaacactacaactctctcccaaagaagggcaagccgcaggggcgggagtccaccgtcctcgccgccttcctcctctccactccgcagcaggacccccggaatctcactgttctctcgctggccaccggaaccaagtgtctcggcgccgctcgcctcaaccaccacggagacctcgtccacgacgcgcatgccgaggtcgtcgcacgccgcgcgctcctccgcctcatctacaccgagatcggccggagcggcgcttccgattggttggttgcttccggtgagaagtggaagttgagggatgggtaccaccttcatctctacatcacccagattccatgtatattcggtttgctgttcgccggttcgcatttttttttaggcttagccgattgtttgatcaattgaaatggcaaagttctacacatttagagttcaatggattccttggtttggtgaattttgcaggtggagtcatgcctgttccaccatctccctcagagttgctcagggaacagctggatagtgttaatggatgcgatggtatgcctctttcttggcattgagcagaacagtaaattcatgtttatagctgctaattttcttttactattagccttacgtttgacaaattgtattaatcagttgatggcttgttagaaatgctttatttgtcctggtaacatttaatttctacttaagtttttcaatgagacgcctactcatgtatctggagtagcagttgattcatgtctttagctgtgacatcgtactgtaactcagtagatatgtcgaagtttcttatttggctgattttccagtacttgttgtttttcctttctgttggaaaaaatggtatcatgaaagtgtgggagtggaactagctcccaggtgctaaacaagttggcgttggtgaccaatgcacaccaattttctagacttggaactggagagttttaatggggattacactaaatctagactccatgggtatataatacagtctgggaaactgatggatctttcatctcggtttaattgtttttttcaagatgtgcctactttgcccgcatgttaaaagtctaattcatttcattgtcttagtgttatttttctgtgtccattttaattggtagactgccttgtgtgacagatgttgggtttgttcaaaggaagcctgggcgtggtgacactacattatcaatgagttgttttgacaaaataactcgctggagtgttgttggaattcaaggtttgttgtccacgatcattttcaattcaatgttataagtttgttgattgcatcctatgtggcagcattttcatgctattcatcatttgctgttcatggcaatatatgctgcagatctgctgaagtaatatatagtggacatgctagtatttctccacaattatattgcttctttatttttctagttacgatattcccgtttcacgggtcaatggatcaactctataaccccttacctctgttctttcacaggtgcattactgtctcacattcttgagcccttgtacctgtccaccattactattggacaatcacctactggtgcttctgatgggttttctgttgaaaataatatcaagaaagttctcgatgctcgactgtcctctctatccagcaaactgctgttgccttttaaattgaacaaggtcggagtggcaatgttgtgtactgatatacaaatcatctgctaacttctcatgacagtggatccgttttctttcctacagccactattttatgaggcacctatccctccaaaagagtttcaacagacttctggagatttgcaacctttgacatgcgggtagtatatggtttgttgtctttataaacttagaccctttttttttagtttacctcatgtagtatgtacatgtttttagtaagagcacctagctttgcaatttatattttactaggtactcgatatgctggaacaaatccggttttcatgaagttgtcttaggaacaactgggagaaaacagggtacatcttcaaaggcagcatgctcaccatccactgagtcattgctctgcaagtaagagggtgcatcctttcccattccaagcatcctgatgcaaaactgttatggtatatttatattctgttttttaactgtaggagaaggttgctagaagcctttgtgttgattgaacatccattagtcaaaaagttccatcgcgaggaaatgtcctaccgtcaaatcaaggtatttcatcttatattggaaaatacagtagcttagtagcgtatgatgaactaacccttttgtcaaacgattctagtgtctgatgaatatgagaagtcaatgactgactactggaaggtggctgatgttctttgcaggatatggctcatgaataccagcagacacttgagcttctcaggaaggctccattttttagccggtggagtgctaagcctgcatccctcgattcattcacggtttcacggtgagattaacccccaaatggctctttgagttcccccagaatgatgttttcagtgctagttttagtgttgaggtgtgttaactctgaatttgttcagaaaatgtatgctcttcagccgatgcagctctgaactactgtacaagctgtcactgtaacaaacctacaaaacttttggcgttattaggttaagatatggataactcatgctgtcttgctcaaatttgtaagggggtaaattaaagtctcatttagacttagacaaggtctcattttggtacggagacccactgaaaatctgaaatgctggatgttaggttgatactactaaattacagtttgcctatcaatggatgttaggttgatactactaaattacagtttgcctatcaacggcccaacctttccttttactgtatgtcatttttttaaaacatttctagccattattcagatgatgtttcacatttgtagttatgttaaaacactagaattccacatgaatttcgtcagatatatagttcagttcccgtcggaaacctacataatttcccactctagcccaatcaccttccagatcgtcgttgccgccggagtcagcgactcatcgctcgccgtcgtgaatctcgtgacgctgccatcgcaaaggccaacacgcatgattggaacggatgatctccccgtctcctttttctgcgtgttttctgaatggatccaatgattagagtcgctaagcagtcaggcattagctgcctgcacgtagtacacggcaggcagttgcacggagtactatctactggcctgaattcgtagctgctgcagtgcagagagcagagtggcctgggatattaagagctgaccagcgcagctgaactgctctgatctggagcatccaacgaacaaatctcttttcataaaagcgaagcttggaccaacctaaacaggagagaaaaaaaaagagagaagaaaacgcgtgttagggtagagaatcatcacggcgaaaaacagaggctgggattgatcaaccgagtgtattaaaattcacaagatcaagtgtaaatttctttctgtactgaaaaaaaaagatgatctctgcactgaagaaatggagagcaaaatgccgaaatgattggggaaaatgtgcagatgtagacatacatatatggcctggcaactttacatctgtgctagtgtatgatctaaggagcattcaatgggtaatggccctctctcgcttttgtctttagtccagtgagtcctcaccgtcctgcactcatctaagcctgcaccaacagctaacaaaaccaggacacaagtgagagcagtacagcagcaaggtcttttacttctgggtacaaagtccaaacatctactagtaatggcgttgtcagccagtaagttcatcagttcatctggcctgaatttcctagaactcgctctaatgatcaagttacaaagagaagaagaagatcttgagatttcttttttgtttgtttgtttgttatgttgaaaaccttcacttgtaagtaaagagagtatttggcaatggcagtggcattgtgggtgtagtggtatagtgcggtgagacagattgtagaggagtttgttgttgctggattcctcaaagacccacttgcttaggagctcctcaagtaatgtacttgcttaagcttcaattcacaccactatcttctgtatagtcgaaactaggataagttaaactaacatatattcagttcttgcttttctctgaggtgtgagagaaatgaaaagggtggccttactcgtgccggcccaattaaacttttaagtggatcgtctacttgacaagtgtcaattggaaattttgcaagtatatatgttatatagattgactttagcctttaggcgtttgctgaatggagtgcaaacatgtttccgaattttcgcttatgaatcaccaaatttcattttgtcatgtagaatataggtatgacttaatgactgactaaaactcttgaaacccggagctatgtctgaagaaatggttgtaattaactaacatattgacaatgacaaagaaccaaaccttcctttccttctctcctttgtttatcatctcactctttcctttctcattaactacaaactgctttacaaaagcatagcgtcaatgccaaccaagcaatgaggcatctgcttcctagatcaatgctaagtacacacttgctctctaaacaaatgttctagtgcaatctaatcatacctacaatacacaagaaatgctagcatcatgcatattttcatcgatcggtctcagcctctgaattcttttaactgccaccagcacaccaggatatgcaaaggcaaaggtgactgcagagaagagaggctggcgatggttgttgacatgggaccattgatttgttgcaaaagacctaagtttttcatggattctgcctagctccacgaatggatgggaggcagagacagatgcagaaattaaaagaatccagcatcagagaccgaaagatacggctaagagaccagacagaccctggaccccaagtgagcacatgcatgtttaaattattgaaagcaaccattaagaaacatatttgcatgtaagtgctcttaatgtaggcaaaaacatattgatggcgcctcttgttcatgaaggaaaagtggtgatgaccgaacttgcaagttttatctgcaatccttttgttgcttctgaaaaactgaatttctcaccctcttggtgctatctttcttgttacttttggattaatgggccttttgtagtgaatttctcaccaatcttgatatatttctgaaaactgaatttctcaccttcctttttcttgtcaattttggatttaatgggctattttgtttgagatataatcagatgaagggttggtggtcgagtgccgagtggcctaatactgcgtgccttgcgccatcagaagagctgtggacacaaacatgatatcttagttggtgtggcctcctcaaccatcaagcaatacagacaaggacccctccaactgcaagaaaaactgccattttacagctcaaatccaaaatctaatctcctcatcttgctaatcaaccattgcctttgccagaaggagaggcctacttttggcttccttgaattatggatttcaataagctggttggaagatgaggaacacttggtgctcactgcaatgatattgctacgtttgaattcatgagctgcttacacattgcaaagaaccattggccaccatcaatctgaaaaacgaagtactatatttttaacaaagtgtaatgctccccagaaacagtaatctagtgtcagggaggagacagccatctgggaggttttgccttttgctgctgctgtctggcctgatcacatcaaggctgcttgcttccaaattactcaataccaatacagtttagtttatacacacgatggcatgtcctgcagtcctggtcactgtgatctgaggccatctctgaatatccaagtaccaagtggcaagctctctggtgacctcagtttcagtttatacggaaacatttctttcgtgtacatagtttctcataactcttaattatataccaacccaaatagacacaagagatattagtacaatgcagtataataaattgactagagaatcatacagaccgaaagaaaaaaagaaagaaagaaagaagaattttgaagtacagtagtaggtcctagcaacaattggggcaggtctttcttccttgacgctgcaacaatactcctataatctacttgtccctccatatttaaatgcaccaaagaaagaactgttctatagttgatgaccttgaatcaatgcctccgttttctcatttcgctgctagctctctttcggtgcaagaagttgattgcctgcagtcaccattgctggtccacacaatcgactgtgtgcatactatgcagagacctggaagcgttataagaacaattgtatcatttggatgtaattgaccgagttcaatgaaaactttacccttcacctcctgtgccattctatactactatacactgcctgcctaaacatagtggttttgacagtgtcctttctctcatgctgtcacgttcgattgccatgcgatgcagccccgtctgtagacacatcttcataaaattgaggtgtctgtttgctctcctcgtaccatgcatgtcgtgtacgcttcttggccttgctgaatgcgatgtttttcttctctccttgatctgttgcctgttgctggactcccaagccaccaagtggcaaaaaggatttgcaatctcagctcctatttttacacgatcttggctggcagaaaggatgatatgataatatgatatgctcactctgaatattcagtgcatcttactactatctcatttctgcagttacagctttgctacgttatggcctctgaagagggttgcgtgtgcagtgtgctacaacaaactgaactgtctgaactacgatgttataatcaagagtgtgactgaggctgtgtttagttcagcgcaaagtttagattttggttgaaattgaagatgatgtgactgaaaagttgtgtgtatatgacaggttgatgtgatggaaaagaactgaagtttggatctaaattttagatctaaacacagcctgaatcttttctcttctttggaagctgtctgaatcttgaattgcacgtgaacattattagctgtaaggctcctttcgtttcacccatttctgatacgttgagattaacgttaagagtgggtcccttgatttgcaaaccatatatgcagaattggaattggattcgatcgatcctaccaaaaattgtggtgtctcatgagattaaccatggctgccatgcaagcagcaggaccatggtgtgatagtaggcaacaacctggacccaaatttgcaggtgactaccaaacaaaaaaaaaagccactgttacttaatttgtttccaattctctttcagcggctgatcgatgccattgtcaaccaataatttctgaactgagatttttcttttctgcaacacgaccatgcattcgaattagaagaagagacatgaagaacatggagtatataagtccaagtgcaagaggacaagagtcaagacaaactaattactgaaactgccgagctgtcttcactccctccaccgctattactgcagcagctacgtctcatccttatccttcctctgtttacaaaaaatctaaggctcggtattattacagcggattatatgttctattatagcgataaattattttttgtaaaaaaaattaaaataagttatctaagtttttttaagaaaatgaattttcaaagcgtagagtaaatactatgtttagtaatttagtgaataaactaaaaagagcatgacttaaacacacgtccaagatgtaccatgtagcagcagcattctagcaatataaaccatcttaagttcttaacagtatttcagctaacggtattgtttttgtgttacccaatattaaatctgttgtagcctagttatcacaccatatgctgtaaaaataacatgaccttttttattatatcttgctaagtcaccgcactgtaattaagagagaatccaagaacgcagagaaaatggagggaccacatgaaaaaacaaagggaggacacagcgttgaacggtcagaaacaccacacccatttctgaagaaccccaaaataagcttctcctaaagaagttaaaaaatatataggcaaagagagttaagagacactgcaaacagcacaagagcagatcaaaaaaatgctgctaatgacattctataaccagtggctagtcttaaaataaaaggaagatgctccctaacccctaaattttcttttgagatgcttaatctctaacactaatgctaatactcagtaagtggtgggggtaatttgttaattaattgagtggtacttaattgacaaattaatagtgcgcgtgataactaatcggccaccgcctccccccacccttgccattttaattgctcgcactaaattagcccaacattctcctcgcttcctcctctttctctctctacgccctcgtctccctctctctctctctctctctctctctctctgcatcttcttcttcttcttccagtgctcggctctctcttttactcaactgctcacactccccaaacaaccaacccacctccatctccatctccatgtggtgctgaggccggagcagcagcgaggaatcggagcggtagccatggcgccgtgaattcgcgcgaggacgtgcgatctctgagagaggggggagtgtagtgctcgagtgagtgattcggaggcggtgctgcagctgcggcggcgttcggagatgaggcattgttggggcggtgcttcctccgtcctccggctcctcctcgcgttgcagtgcggggtggtggtggtggtgttgcagtgctcggcgaatgcgttgggcagtgacggtgagtgttgtcgcttgcgcggttgcgccgtgtatgtgtgttcttccactgacttggtgtttttctttcctgttttttttggtcggattttagggagttttgtttgaattcgtggtgttttttctaattatgcactgcctgtgaattccatttctgggagacgttttacgggttttttttttacatttttttaccgagtttgaaatggctgttcagatttttggttctgatctatcttcttcgaaatttccacctgttactcggtggaggcgatgcaaatttcgagatttatccgcgaaatttcgtgcctaaaactcgaattccacctccatttctatggtgcatttctgatctgtgaccaacggttttgctgtgtctcgtacactctcgttctgttcctccatgagaaatgtggcgttctgctcacacgcgctttgctacgccttgtgctagtctcggcgctcatcgcgttcaagcgcgcaatcatcgaggacccccggtcggcgctcgcggactggagcgatgcggacgggaacgcctgcgactggcacggggtgatctgctcctcgccgcagggctccgtgatctccctgtaagaaaccccccccccccccttgcacctgcactcagctagatctcactaatgtttcacctactgctttactagttactactgtggtacttactagccggtaatatcaaatcctgttcaacattactgtgtacataaagtggggagggaaaagagtttgttatggtgatttattaatgtttacattagcaggtactacaattttgtaggtgaagacttgtttgatactataagcactgccactagcttatcgttggagctgtacaatgctgtatatgtttgacatagacgcatattgcatgtgcaaacagctggaaataatggagtatgatgtgccatttagatatgtagtcagtagattttgtttgcaatgaaacgccaactaaaacccgtacttgcgtgatcagtcaaaatccttctgggatggaatttcttctcatgtgtcatgactcgatgattccgcaccttgcaggaagctgtcaaactcgtcgctgaagggatttatcgcgcctgaacttggacagctgagcttcttgcaagagctgtatgttctgttttattgttttttcaactggttatgatgaattagcttcaaggtttctgaaggtctcctttttgggcaggtatttggatcgcaacatgctttttgggacaattccgaaacagctaggttcactgaggaaccttagggtcttggatttgggtgttaataggcttactggtcctatacctcctgagctggctggattgagcagcgtaagcgtaatgtaagatgccaattgatttgcttatatattcagggttttcctgtctctggtgcttctttgctattgaaactaaggctgctttcattcatctgctgtagaaactttcattccaatgggttgactgggaatataccttcagagctgggcaagctacagaatcttgttcagctgaggttggacagaaatagactgaaaggatcaattcctggaagcaatggttctggtttttctcctacggccaatagtgggttggtgacttctccttactccatttttatttgatgatcaagactgtagatgcattttctatatatattaaaccataaaaatgtcacttaattcccttcaggttcctgtgctcttgtattctatgtctatatttctggatatccatgccatagtcaaaccattttattcatgaactgaacaccgcagctatgatatcatggcgattgtatttgtgtgtccctcttaaaaaacattcgttcttacatactagttaatttggcagtaaattttggtgacagtaaaaaggataagactaggtatcaagtggtggttacttaaggccccatcgtttggctttttccctaataagccaaaacggaataaaattaaatttgtaggtaaaacttttatatgtgtgttcttggtgacttaaaagccaatgctgaaaaaaaaaactacgttgaaaataactcaaaatcaatctcaaaattaagtttgaaaatttaaaatttggctttttctttggcttattaggccatccgatgggagccttagtaactttgtgcatgcagcttctttattatattctctcttgatgacatctggcagtgagcctgcaaaaaacttatatttgaccatgttttattatctttttgttaattatctgaatcgattttattttactccaccagatccacggctcacaatgggctatgcccttctcctcgattaaatgttggagatttctcatacaactttcttgttggaaaaatcccaccgtgcttgaagtatcttccaaggtagtaccatacagtgtgtttgctactgctttaaggtccatccatttacatggcttgtctgcaggtcaagtttccaagggaactgcttacaggatgagtactctgtccggcagcgggctttccaaatttgtataagtatgtatttttccttctagcattaacaggattacgcccccctccccccacccaccaaaaaaaaaacattaacaggattacttcagcatgcattaaagtgatatccttctattggaatttcacgatgtacctgcaagtggtgttgtgattgatatcctacaggcctacacttgcaaaatttatccgtgtcatgataagcagaagtatccccttttatctgcattcagtatagccctctacctttacagtttcactgctttatttagcaatcaatagaaggccaagatagcccacttgatctttgcatggtcaacatgataagacaattgatgtgcttcatttttccgtctttatttttttaaaaaaaaagtgacaaaacttaaagcaaagaggccaatattgaatttaagctaaactttaagcaattcctgatgtggggacctgacgcaaaacaccacactgaaattttgcacaccaattaaattgattgcatttctttactatttgagtattgttgggtaactagtcgataacaccatgtactgatattggctgaatccactcattttgtcttaggtggttctccggctggccagcgaggtggcgtaaagggattcaagcatcccacctctgaccataaacatgaaagatcaccacaaccaacatggcttctcattttagaaatttcaactggtattcttctgcttgtatttgtgatcactggtgcaattactgcttccagaagttgcaagctaaagccatcgataagaatatcctcgtggaacagatcaaaaagttggagtgatgagataacagtgctgatcggttagtgctgttatcggttaattaattgatatgatttgaatagtgctgttaatatcttaatgctctcaccagattctgatatgctgaaaagcctgccaaagttaagtcgccaagagcttgaagtagcttgtgaggattttagcaacattattggttcatctcctgagacagtagtgtacaaaggaaccatgaaggatggacctgaggtttctgtcatatcattatgtgcctttgaaggtcattggactagccaacatgaactattttaccaaaacaaggtaaagcttagcaaaattctgctgtgagaacagtatgttgtcccacaatattaatgggtgtaaattttaggttattgacctggcaaggttgaatcatgagaacatagcaaaatttctgggctattgcagagaaagtgacccattctccaggatgctagtgtttgaatacgcatcaaacgggaccctgtttgagcacctacactgtaagccagcctctttattttctgacgattatgtgatgcttagttattgcatattgcatgtgttatgtgcagcaggtttgcttatttgatttttatggggttccttcagatggagaaggagctcagttatcttggctcagacgaatgaaaatagccattggcatcgcgcagggtctaagatacctgcataccgagttgcagcctccatttgctatctctgagctgaattccaactctgtatatgttactgaagattttactccaaaggtaaggtgcacgttatttttggttcttcagagatagcctttccttgtctgttcatccctatccttagagtgcaatactctccaacctggtgaaacaaacacaattgttttccatttttgttttcagctggttgattttgagtgctggaaaatgatgttcaccaaacaaaaacatgagaaggctcctggccgcatcaataacaaatcctctttccctggccacttggattcttcagaggacaaacaagcagacatccaaggcaatacatttgcttttggagtgattttgctggagatcatcagtggacggcttccttattgcaaggacaaaggctatttgattgactgggtgaggcattctactctttctctatctcattgtgacaaagaagtaaatattttagaaattgactctgaagtctgctcaagaggaccagagcctagttccaccatgaacttaaaatgacttaaacaaaacatatagttcagaaaatacaggagcatgcagtttggaatattagttgcattgaacatttgcactgcttattctgaatatgcattctctacattgttcaggccatcaagtatctgcagcagacagaggagatcggtaagcttgtcgatcctgagctgaccaatgtcagaacagaggatctcatggtgatctgcagcgtagtgagccgctgcatcgaccctgatccatccaagagaccatcgatgcagatcatcacaggagttctggagaacgggatcgacttgtcggcagccgccatcctgaaggaatcctctctagcatgggctgagctcgccctggcgttgtagcataccattcttaccgctgtaaattcgtccgtcacatcacacactaatatttatctgatcatggccattgcatgctcggaatatagaggagctgagacgcacgagcaggcaggcactagttcagtttggtcgtgatactgtattgactgtttttgactcataatgctgtatgatttacagttgattgccggtattgcacagcaggtgtttcttcaatgcctcaccggtctaacgaaattcctttgttcgcctctgctggcatacatgtgtaagtttgtggtgcaacctattaggatgaaaaccggcatggaaattcccaattggctctgtacggttttcgatcgtttctgatcatcaccgcgtatgaatattgaaactgttttcctagttctcttatcatcgtattgcgattaccactcgaaaaattaaattggtaaatatggaatttctcgactgacacgtacaaatgatatcgcatccgacagttttcgttctaggctcctactccgtagtgtatgctgcgtgctgcacggagtttggaattgtcttggattgttggaatcggcatcatttttctatccgaatattatgtcaggtttctgtgctgcgtttcctccaacttggcatgctgcaatcctgataacatccacagagatggattgagaattccaggcaactacgcgaatcacaggttggggcaaggcgcagggacgcgcacgcgtccggttccaggggtcgtggaggggaagccaagggagaccccagcttcgccgagcgccgggcgatcgcggatttctcgtggttttgatcgcgtatttttcccgtggttttggaggctgcacgggtcgagctctatcgagattttcggccacctccttccctgtggccttgtgggcttgcgtgggctgtggctgggattcgctacagggatacgtaggagcgctcctccatcagttctcgattgtcgattgcgctgcggagacgccgagagatgggtgttttgtgggcgccggcacccactgacccaccaaacgtcacttccctactgtgggacaccacgttggtggggccctaccttcctccgtcgtttctcaaatccggaaagcaagggtgatcgttggatcgttgatcgattgatcgatcagtttgtgactttgaggaaacgtcgccgtcgccactggccggcacagtgggcgagtggcagcggcgccgcggcacgtcatccctgacgattttttgttgcaaaaaaccagaaacgactccgcgataaggtccattgacgtggaaatgcacgtcgttgtccccaacaactgaaccaccaaatcagcgagcgagaggtgcctgacctctgctgacgaacgcagcaaccggtggtatgtatccagtatccacctgcgttctagaatatgccacgaacccgcgccttctttttctcttttcttttcctctcgactcgatcgactggtaaaagttggacgaccactgtgctgtgctgtgggcacgcgctcacgggtggaaaaacgacgacgataatatgaccaacacgtacaatcagtttggccggtgagaagtaataacaacaattcaacacgtacgaaaggacgggaaaccgaaattttactactcgttagcacgggaaacccaaccctaaacgaagctactggttgtagccgaagtaaccagaaaaaatcaaatcaagacacgaacttgatagatacagtaggacgatggcatgcgatgggttggtcgggaggtagagacttttattacgccttggtgggcagcaccggcacgacgaagtgctgcgcgacgatgcggcgctggatcttgccggtggccgtcttgggaagctcgtcggcgatgtacaccttcttgggcaccttgaacgcggccaggttcctccggcagtaggccagcacctcctcttccccgagcgacacgccctcccgggggatcaccgcgcagttgatctcctccccgtacttggcgtcgggcaccccgaacgccacggcctgcgcgatggccgggtgcccgagcagcaccgagtccacctcgatcggcgatatcttctcgccgccgcggttgatcagctccttgatccgccccaccagccgcaggtacccctcctcgtccacgacgccgatgtcgccggtgtggaaccacccgaaccggaacgccgcctcgttcgcctccgggttccccttgtacccgctcgtcacgttggcgccgcgcacgcacacctcgccgctcttcccggcctccacccgccgcccttcctcgtccaggatcgccatctcctgacccaccgcgcgccccaccgacccggccttcctcgccccgtcctccggcagcgggttcgacgtcatcaggtgcgacgcctccgtcatcgcgtacgcctccaccaccggcgccccgaacgccgcctccagcttctccatgatcgccggcgccagcgacgcgctgcagctgcggatgaaccgcagcgccgggtactccgcctccggcttcgaggtgtgccggtcgatgatgatctggtggatcgtcggcaccgccgtgtaccacgtcgcgccggcgccgcgcatgtcggcccagaaggtggacgccgagaagcgccccgccgccgggagcgtcacggacgcgccggacgccagggaggcgaggaggccgcagaggaggccgtggacgtggaagagcgggagcacgatcaccgtcgcgtccgcctcggtgaggcggtacacggcgcggatgttctggacggacgccgccaggttgcgctgcgtgagcggcacgcccttgggccggctcgtggtgccggaggtgtgcaggaacagcgccacgtcggacgggtcgttggcgaagtccttggccgcggcggcggcggaggcggggaagccggcgaggtggacttggccggcggcgtccttgaggctggcggtggtgtgggcgaggcccagcttggaggcggccgcctgcgcggcgacgttgccctcggggttggtgatgaggagacgcgccccggagtcggagaggtagaactcgaactcctcctgcgtgtacgccgggttcagcggcgccgccaccgcgcgcgctcggatcaccgccaagaacatgatcaccagctgcaaaaacacacaagaaccagatcagcatcagcagctcgatgatcgtcaccgtgatatcaacagcttctgtgactggtgctttacctcgacggtgttggggaaggcgagcgcgacgacgtggccggggagcacgcccgcatcggcggcgaggcgcgcggccgcggcgtcgacgagcgcgtcgagcgccgcgtgcgacaggtcgaccttgcccgggacggcgagggcgcggcgcgaggggaacgtggccaccgccgccttgagcagcgtggtcagagtcggggtctccattgggtcgcccgctgcaggtgcttcacgtacaaatctctcgtgcgtcgcgttggtttgtgtgtgtggggagaacgtgtcgtgtgtttggcgcctctcaaaccgtttggccgtgtggggtttatataggcgcggaaaaccgaaaggccctcctctgcttcgcgtttgggcctctgcttcgtcagccacggattattgctgtgctctgatagtgaggtttactggagctcagctcacaaccaaaatcaaatttggatgtttggcctttgctttgcctccttgcattgcaccaggtgtgtgcgtgttgacgatgggaggcctttttctttctttatttctttttttttcgagggttcgtgtcgtagcgacgagtgtcttcctgctggaccccacaactgttgcacgtggacgcatagattaaacattttgatcctaatacgacacaaaatccttttgattaaacatttttctgtgatatgatattctccctgtccaccactgcgccgagtcttttttgttgtttcttcaacgaaactactgtctttttttaggcctcgctgggaggcagagaatcacttgctactgtttggcaccgaagagaacgcaaaaggctggaaaataattaagttggagtgtttcctttcttacgtgtccgggattcttgtcttgtgcggtttatgttatctctcacggtgttcaagggggaaaagccagcatttttatatgcccatccaactgggcattgcaagcgtcacgagtgcgcgcagctgatgcagttctaaattccttttcttttggatataaagctaagaaaacaggacgagtcgatcgtgctcagtatgcagcagcagccggtggtcagccaaacgtcgacccggccggttatttgtggctcaaagtgcgtgtggaaacgctcaaactgattgattaatccgcgtccgtttccaccgacggtaacccagagcgtaatactagaagcaaaagctatcgacaccgtgaccgtgtatgactagagagatctactagaatatactcgatcgaggatattcctctctctctctctctctctctctctctctcacttgtccgttagaactataataattataaactataaataaggagacaaattaacagaaattgtaaggtgccaaattgtaaggtgccaacaagctcgacgtccatatcaactcagctcagttagtacttatactacttctttaaatacaactatcattgaaacaattgattagtagcggctgtgatttaagcgcagttgtatagtagcgggggacgtaacggtgataagacgtgtcgagcccgggcagccggccagccaatgtttcgatcgaaatggaaagaccaaccaggcaagcaagcggcgccgcgtacgagcgagcgactgtgcgatcgaggcgaggcgaggcgaggcgagggcgcgcttggacaggcgggaaccggggaaacacgcatcatagagcggctgatgcgagtcgctctctatgtttggtttggattgaaatcaactagcgattgcgcggctatcacctaaacaaaatcatatattttttatataattttacttaaattttattaaatagctatcttattgtcttaagagtttgaaagaccaagtttgaaagaccaaaccttatcatctacgtgtttctaattatatagttttttaaaagtcacaccagttgctacccctatgtcatctccttctttatttgcttgcaagatttatcactatttctattcattctccttggaacctttaaagtttggatcttgtactttttagagtttattgtcacgttggattcatttttataatttctagacgtttcgtcaaacgttgctattatactcctctatggcccgtccactgtatcttctctttattgtcattgagattttaaaaatcgaacataattaccgtttggattcatttttactttctagaagtcccgccaaaccgtcagcggctttgccttgtatttctctacggcttgcccgctgcctcccttctttattatcattgatattttaaaatcgaacatgattataatttttttttactttttggaagttccgaacctttaaaaattgaaccttatagtttttagagtttactgtgttgttgggtttcattttttataatttctagaagtctcgttaaacgatgccactattctcctctacggctcatccgccgcctactctttattgtcattgtgattctaaaagtcgaacataactatcgttggaatccattttttattttctataagtcccgttaaccgtcagcggctttgcaactatactcctatacaccccgcccgctgcttctcctttttattgtcattgatattttaaaaatcgaatatgattatcaatggggtttatcttttttgctttctagaagtcccgacaatcgccttgctcgtttgctggcctgcctgtcgttcttccttttaatcatcattagtgttctatttggtgttttattaacagtttttatatgtcgtatcaaccgccaccactctactcttttataggcttgttacttaaattatctcgtcatgtgttttagatggttttttctttcgatagtctttatttttatcacatttttcagttatttataaattgtattcctaattgaaatattatttttcttctttttctaatttaagaatttatttttttttaaaaaataaataatatcgtatcgtgttcttttaatatttttattttttattttcaattttagttgtttcaaaattatattcctacttgaactctcttttattttttctaattttggatattattttattttttattctaaattttaattaatcttaacagtgtttatttttaattctgaatttcagctaattttaaattgtattcctacttgaactcttcttcttttttttttcttttgctaattttggattttatattccggcttggttcctgagcttccaagcttccaaaaatcagactggagtctggttggttccggtttggtttattgatgctgtttccgagtcttttgtttccataaaatatgtagactcatattaaatcacaaccattaatctagatctattttaatccaatggctaatatttttctctttttctctgattaatgtgggaatttctagcccccacagtgaacgtggagcctccttttaaagctgttttaataatataatagatagatttattagtaatgcccatattagatttcacattaatttagaacaatcttaaccagaattcgaatgttggcttatattggtaacaagtgacactaccaaaaaaaaattggcatcgtagcaatccaaataagccccaagtttgcggagcggcgggccgtggacgctgtcgcgcaagtagccgagagagtaggaggtgtacatagtgtgcatgtcgacacttccgcgctcaggcggtcacgcgtgcgtgcgtgcgttcaagctgctggtggagactggagtaaatattattcagccaaatgactcggtgaattgaacatctgaactcacgccacttgcgcgcgtaagacgatgtccgcgattacgatcgagccgacgcccgtgcggtcgtgatttgccggggcccggcctgcaatctggctcgctagtcgcccggtcatatatgcaggctgcccctccaccagatgcacctgcgacctgcgtgcagcctctcattccttcgcgcgctctatgcagcatatgcaatctcgattcgtagccactctaggttggttggtaggttgttgaattgaacccctttgatgggataggtgacgacatcgcatcgcaaaaaaccgtgcgtgtgtgcaccggatatatatcttcgtgctggcccccggctgcagctatgattctcttctgttaggatatggcgacgtgcgtggcgttgatttgtactgttgcgggggcgttgctatttgagttgagtaccatacatgcatgaatgctcgcttgctcgcaaaatagtagtatcccggctgtgcacgtacgcgtctcgatcggttgttaacttgctggttctcgcgcgttaccgtgaggccacggcgcttcaatcaaactgtatcaaattaaccaccggatgtgatagaggctgtgtttagattggcctaaagtttaaaatttagttaaaattgaagacaatgtgactgaagttgtgtgtgtataaaagatttgaggtgatggaaagttagaagtttgaaaaaaaaactttggaactaaacacgcccagaataatggaagatcttcttgtccccgagtgttattatcagggatggtgtcttgggcaataagcaacgtgatttttgacctagctagttagagaagttacagcaggtgcgtggaaactgcaaagtaaaagtgccatatttgcggccatggcgagcccagacatgatggagatagttaacctctctcgcatggttgaaattaattgcaccagttatatcgtgggcaccctgaaataccatcatatttgaagacaggatacgtaacagtactagtttctttatactaagcttaatgtgctgttgcttttgagcccttatttgttttctgtcaggccaaggccgggtcatcctgcctctgagaagagagaccacaagtggttgaatttggcccctaggagagggaaaaggcaaagatactgatacatacatgacccccggtcggcgaggcgactcctactattcagtccagccgcgcggcgcgtgacggcggtcatcggtcaaagacacgaaccggaaccagtgtggtgaggcggacgtacgtacgggaacgggacgaccaacccctggctgctacgcgatccgcaataataattctcggacatgccaacaccataggcccaccggcccgcatgtacttgtagcgattaccggcccggagaatccagcgcgaccatcggcccatcaatctgcgggcgcgttgcgcctccgcaaccgcaaccgcaccgagcgcgcggcctgcctggctagcgtttcggcccatcgatccgcgcgcaccgcaccgcaaaaccggcagcgcggcgcggccgtcgctgctggcggcagcagccggctgctcctcgcgaatcgtgatggatggacgcgtgagtcgtgacgttgcgagtggtgcgactttgacctcgtttggttttgcgtttccgtcggtgcctcggcccggccccggcgcgcgtcggcatgtgacgtcccacgtgcgcctcgcctccacctccaccgccgcgctcctctccgctcctaggattgttcttttttttaaaaaaatatacatttttggccccttctacagcttcttccctttgaattttttttcgaaaccgaactcttccatcaattccttcattgcttcttttactcgctttctgaaacaaacaagagtgtaggtgtatcagttgtgtgccattctcgtctcttctccgcgacgcgttcgctttctctcccacccaaaacccccagagagggaagagaaacgcctccctcccctctcctcccccgacccaccctgcacctccttcctcgtcgacgccatggcagcaccggagtgaagcagccagccagccgcccggatttcaccatttggtcccgggtttcgcccggatctgggtctctcttcaaccgtcttctccaatctggcggtgctatagctcgccgcgcccggttggggacaaggcccagtaggcgctagccaaacagtgttgagcgcctcctcccctcctcgcgcctcggcgcacggccggcgagaaggttttgaggggcggcgagcttcttcaatctgcctccatctcggtttgaatcggtatgcatatactagcatctccctgtagactgtagtaatacgaaattgtactagtagtttatgtatgcgtcgccgtcggtttgatctccagaaccatcgctgtcagcgagtagcattagcacttactgcgagcttatggtccctggggatctagtattagtttgtggatttctccatttgatgttgacatgctacagtatctccttcgcccatcatactactagaagcgtttctttttgcgcttttgtcgaatggaaaagatttgtagtttttttatgtgtaaatcaagtttgatttttattttttgttcacctgcatctgttatgaaaaattgttgtttttcccttgttgatgctacagatgttctatgactgcatcatcaggttcataagtcctgcttctaatcaatggtgctaacagatgtttctgttttgtacagagtggtgtagcaaataacatcattttcggaggcaatggcggcatataagttgggtgtggaggttgcaagtgctcatgacctgatgcccaaggatgggcaaggttcagcaagtgcctgtgtcgagcttacgtttgatggccagcggttccgcacggctatcaaggacaaggatctgaacccagtgtggaatgagcgcttctacttcaacgtttcggatccgtctaatcttcctgagcttgcgcttgaagcgtacgtctacaacatcaacagatccattgatggttcaaggtccttccttggcaaggtcagaattgctggaacctcattcgtgccattccctgatgcggttgtcatgcattatccactggagaagcgtgggatgttctcacgtgtgaaaggggaactgggtctgaaagtatacattaccaatgacccatccatcaaagcttcaaaccctctcccagcaatggatcctgtttcaaacaatcctcccccaacgccagcggagcaaatagcaactgatataaccggtacaaatctcagcacaactcatgagcacagggctgaggtgaaaacattgcacaccatagctaaggaggtgcagcatcagcaccatgggcatggccatctaccagcttcctttcccgaccaaccttccaagtatgctgttgaccagatgaaaccagaacctcaacaacccaagattgtaagaatgtattcagcagcctctcagcaacccatggactatgcactcaaagaaactagtccatttcttggtggcggacaggttgttggaggccgggttatacgtgccgagaagcatgccagtacatatgacctagtggagcgaatgcagtatctttttgtacgtgtggttaaggcacgggacttgcctgacatggatgtcactggaagcctagatccttatgttgaagtgagagttggcaactacaggggtataactaggcactttgagaagcagaagaatccagagtggaatgcggtctttgctttttccagagaccgtatgcaggcaactatccttgaagttgttgtcaaagacaaggatttgctaaaagatgactttgttggtctggtgcgatttgatctgaatgatgttccgatgcgtgtgccccctgacagtccattggccccagaatggtaccgcctcgttcataaaactggggataagtcaagaggcgagctgatgcttgcagtttggatcggcacccaagccgatgaggcatttcctgacgcatggcattcagatgctgcaacacttgaggatccatctgctgtaacacacatgaagtctaaagtttaccatgctccaagactctggtacctgcgagtcaatataattgaggcccaagatattgccataactgataagacacgctatccagatgtttttgtaagggcacaagtggggcatcagcacgggaggacaaaacctgttcaagctagaaatttcaacccattctggaatgaggatctaatgtttgtggctgctgaaccttttgaggatcaccttattctttcccttgaagatcgtgtagctcctaacaaagacgaggtgcttggccgtgtaattataccgttgacaatgattgatagaagagccgatgatcgtattgtccatgggaaatggttcaatcttgagaagccggtacttattgatgtggatcaattgaagaaggagaagttctctactcggcttcatcttcgtctctgccttgatggagggtaccatgttctagatgagtccactaactacagcagtgacctcagaccaacagccaagcaactctggaaaccgtccattggtttgcttgagcttggaatcctgggtgctcaagggattgttccaatgaaaacacgggatggaaaaggttcatcagacacttactgtgttgctaagtatggttcaaagtgggtacggacacgtaccatcgtgaacaacccgggccccaaattcaatgaacaatatacctgggaagtttatgatcctgcaacagtcctgactgtcggtgtttttgacaatggccagcttggagagaaaggtggtgagaagacgtccagttctaaagatgcgaaaatcggcaaggttcggattcgtctttccactcttgaaactggccgtgtctacactcactcatatcccctcctggttctacatccatcgggggtaaaaaagatgggtgaattgcacttagccatacgattttcctcaacttcattagtaaacatgatgtacctgtactctcgacctttgctaccaaagatgcactatgtacgcccaataccagtccttcaggttgacatgctgcgccatcaagctgtccagattgtgtctgcccgacttagccggatggaaccacctctgagaaaggaagttgttgagtacatgtcagatgttgattctcacttgtggagcatgagacgaagcaaagccaacttcttcaggctcatgtcagtcttctcaggcttgtttgcagttagcaagtggtttaatggtgtgtgttcatggaggaaccccattaccactgtgctggttcacatcctatttataatgttggtgtgctttccagagctcatactcccaacagtgttcttatacatgtttcttataggggtttggaactatcgttaccgaccttgctatcctccacacatgaacactaagatctctcatgcggaggctgtccacccagatgaacttgacgaagagttcgatacattcccaacaagcaggagtcctgatgttattaggatgaggtatgataggctgaggagtgttgctggaagaatacagactgtggtaggtgatatagcaactcaaggggagagggttcaagcactgcttagctggagggatcctcgggccacagcaatatttgtcctcttttgtctcatagcagcaatagtcctgtatgttacaccactccaagttcttgcagcattggcagggttctatgtcatgaggcacccgaggttcagatataggttgccttcaacgccagtgaatttcttcagacgactgccagcaaggaccgacagcatgctataaaatagctgccatctggtggccttatcattgtgataaattggatggagtactccatgccgattactgtagtctggcttcgttttgttgttattgtaactgtgtgttcttagtacttgagagcctgtatatcgtattagcttctgaatgcagggaataatgtgtttaaggcttcttgtgaactatcagattttggagttgtactggtcattttaaatatctagttgcccaatatatagtactttaaaatcttgcttgcttggtttctgttgtatgcctgcatatatgttgtcatgaaccattctctggaaagggtgactactgatcatcatacaagatattttttctgcctaatttttgttgattgatcggataggtagaaagggtgatgatattttgtggctaattagaaagctgtgctaagcgttcaatttgtacctgttgttgaacagctgaacattcagcattgattgatagctttacacactgtatgatatctccgactctccattatgattatattgtgatttccgctgtatactttgagaatgcccagaaactggtgataggaatggcttctgtgttgtagcgttgatggacacaatattttgtctacttgtatagtagcgttatatagagatacatgtgctttagaaatggcccattcaattatcatgttttacatattttgtggttggcattagcatctgtggaaaacatttggactggaaaaaaggggagaattctcaaacgaaatgtctgataaaatgcagaaataaatctcgtggtgctagttgccagttgtcacacttctttttgttccttcattgtctctttgcattcttctccaatccttcttccagtggcttgtccaggagagcacttcagtgttgctgaaagcaaatatgggagcagctgagtcatcttcaaagctcgctggctccatccatgaattcactgtgaaggtctgttgagcgcctgtccctccttccatttctctagaattatttattcttattttttatcaagcatgttgagaggttttatgggaaattttgaagaagccacgttgaagtgtctgtgaaccaatgcaatcgggctatttgaaaattgataatacaagaacaagagatggagtttttcaatgacagggtctctattcccattcatccaactttgatttcatttcgtcgtgtttaaataacggtctgtggaataattctgcaggatgcgagggggagtgatgtggaactcagcagatacaagggaaaagttgttcttattgtgaatgctgcatctcgatggtattggtctttacattttcattcgaaattgtctaatgagagtttgtactttcccacctgatctgatgatatctctgcagtggtctgacgaattacaactacactgaacttggtcagttatatgggaaatacaaggagacaggtactagttgtttacctatatgacagtacgtttgttgcaactcggctctgaagtcacgcgaatacctttatgaagtacttttggagaaatcgctgcaaatttcttgaatcttgaccagtgctcatttttcagtatcggtttttttaataacatttttagacttttatctgtgggcactgggcagctgtataataccgtactgctgttattgcttttactctgaagaaagtattcactctcttatcgtttcctctgccgtccagttaaattgcatcaaatctttcagtttccccttgacacctcaattgtaatttatgagagcataacgctgtccgttgacagtctacaatgacctcaattgctttgtatttcccctttttcttgtgcaattaggattggagatattggcgttcccatgcaatcaatttgcaggacaggagccaccgagccaggcagcaatgagcaggttgtggagtttgcttgtacccgcttcaaagcagagtatcctatccttggcaaggtccaaccaatggcaatcttttcttccagtgctagcttccaaaaccatatccaattatttgttgtttcggtctaaaatcaacgcgcccgagttgtcaaacaggttgatgtgaatggcggcaatgctgctccactgtacaagttcttgaagtcagagagaggtggcctcttcggagaacgcatcaaatggaacttcaccaaatttctggttgacaaagagggtcatgtggtgaaccgttatgcaccaaccagctccccattgagcattgaggtgatgaaacaaaacagtgttcgttttcattttattatatagcttcacaggcatgattactcatcagtcaatggttgtttctgcagaatgacatcaagaacctgctaggggcttagagctcactccatgaaagatgatgcatcgtcctgttgttgctgctactacaatctgtttgcaatttctgtgaagaggaacctacaatgatgatgctctgtatctgtgtagtgagaaagaatataaaggtagtgaaggaaatctgaatgtacaggttgggcagtagcacatgtcgctgaaagaaaagcaagattatcctgttgggattacacaactctgagcatgcatgcatgcatgaatgcaacgttgcctagtgaataataataatctataagaattaacggctcaaaaactgaacaggctattacagagaggagtacaattttgggggtaattctttgggaatcagaaaaacaaatttctggagcacatatggaagagtcgacaaattgagagatgaagctagcctctagatgagttgatatcaatgttggaacttctcgtgtcaaatatcccggagctaggccaccctcccgtcgttgttacagggggcggcggcgttagattttggttatggccggagctcggcgacgcgtcctgccctcctccggtcagcgagtccgagctgaaggccgccgccgccgcctgttgctgctgctgtttcccggccttcttcgacttgggcttcgaccctccctgcacgaaactcccaagtaccacctgcaagtgccaatgagtaccccaggttagaccaagatcaatgctagaattgaatcccatttctgatcaaaactcagaatccctttgattggaaaagaggaattttgtaggaatcatgtaatcatcccttccaaagaaggccttaatggagtgagtacatttgcaaccagacaatgctactataatcttgatgatgaagatgatctagccatctaggagaggagaaaaagaaaagatgaggttggttcagggttttaaatctcccgctatagctgtttgagaagggttatagctatttgctctcatatacaatttagctgctatagctgcttgagaagctaaccgctaaatgtcttagcccgctatttaaaacattgggttggttacctgaacggtgctggcagctaccaatgctccgccgagaacgcctccaatgatatgcctctcggggctgcacagcgtcacgctcagcccgtcgctctgcccctcgttcatcaggttgtaacaccccgacatgctcaagatctcgtacagcccctgccacaatgcacacacaaacatcaaatccactcctgtcacatgcaactctgaattaaacttaccaagattgcattgcaccaaccaattagttgttatacctcgtagatggcagggttcttgtagtgggaggaggcgtgaacccttgacatggcgccgtcggccgggtggcggaggaccacccgggagacggagccggtggccgagagcacgcacaccgccctggacgaatggttggcgaacgccacgatcttccctgcaacgtcctgacaatgatcaatgtcgcctgtcagctcagttcagttttacctcccctctcagtttgcatgcagctctgcattttctgctgatgaaaaaattgtagtaacggtgaatgagctatgagtatttttatttacctctgaaggagatgccgtgatgatgtgaggggtgaagctcgttccagctgagccactgaacgcattgccccctgcacaagcacaaacacgatcatcaaggtcatgacagttcctagtctgaaagttttttggtattatagagttgcaggacaattttgggtaggaggaatgcctatgcaattctctaagttaattaattaggaagtcacagaatactatactgtttttcttttctgaaaaagataacaacacatgatatatttttttatcttttctaagtaaagtacacatggatgacagaattcaatatttgagtaaacaaaacaaacaaaaaggaaatctaccactaaagattaaataaatatcaacgtggcagagcagtgcagagcaaagcagaggctttccctctctctacatatataaagactgtcacttgattcacttacctgaaagcttaaccggtgatgagagctgctgcttcttccctgtccccggcggccgcccgcgccgcttcttctgcgccgagtcgtccatccctgagccgccgccaaccatgtcggcgccggacacggaccccatcctcggcggcgcgctcagcatctgctgctggtgctgcgcggcggcggcggtggacaccttcatggtcccgtccgggccgtacttgcgcgggcggcctcgcttcctcttgaccggctccatgggcgtcgcggacggcggcacggtgggtgagccggcgccggcggaggcggagacggaggccatgctgttgtgcatcaatggcggcggcggcggcgcggcgtccatctggaactgcatgccggcgagcgggcccgggccgatggactggaggatcgcggtggggctcatccccatgttgggcatgggtcggatgaccgacgggccgccgtgcatcccggcgagcggcgacgcgctatgcccgccgccgcctcctccgcccccgagcatccggtgttgctgctgatgctgctgatgctgatgctgatgctgctggtgcgcatagtatgacagttcggacggtgagaggagttctttgccatccatgcatggatcaccgagctccccccaacagaaacagatcaatcaaactgcttcttcctttctttctcctgttcttgaacaatcagcacgacgagacgaggacgaacagcaaggtgttgaagatgaagagtgagttggttgggggagaaggaaaaggaggggaggaggagatgagatactagatcagatgaaatgatggggggagagagagagagagagagataagatgacgcggttggcctacatgctatcgcagcagccgcaacgcagacgatgcaactaggccaagcgcgcgcaggcgcaggcaaacccaagccaagaaggcacaagaggacggcgagcgtgagagagagatgggcagcggacggagggacggatggcgcccacacaaggaggcgataagatttggttccgtttccttggcccaacgacgtcgaaagggaaaaaaggcggagccgagcgcgagcggcgcggcgcgggggtggatttgcttgtgatttgccttcctttgcaatttgctggctgcggcttccgtttcgttcggcgcgcgccactccattttgcgtccacgcgcgcggatgggctgggtgggcggtggcctgtcgctacccgcccactcgatccccgcccccacgctacagtccgatcgggacctcccctcgggtcccacctgtcagctctccacaagatgttttcagatatttatggcgctcgccctgtcgcccacgaccttttcttggttttcaaggttgatgcttcccaaagcttcacctcacctcacctcacctgaccaccaacggcggatatctcatgaacctttgtgttgggcggttcatagttcacgtaagacttggttgaattgttatatcgagatagtatgtctaagcaggagcggagctagaacgaaatgaagagagctgccactcacttattttactctactttagactgatataagtgcctaaatttggattgagggaggtgcatatatggtgaaaatagatgaactatagcttaaaaaaatttcttaaccgggttcctgggcaccccctatcctacctagctccgctcctgtgtctaagtgaaaaatatgcatataggtttctcacacacaccaactagcaaatgtcataaaaaattagaaaaaaataaacagttatttctaatagtactacacatatatgcgaaaattcatattaagattcattacattttagccgtgacaaaaaaaatctgataattttaagagtaaccatctctaaagatttttttttacaattaaaatataatgaatttgaagatgcatgtttcaccacaagaaatctaaccaattgacatatcaggctttcacatactaccttcatatttcatattttaatgtatgacaccgttgattttttatccaacgtttaaccattcgtcttattccaaacatttatgtaattattatttattttattgtgacttgattcgtcatcaaatgttctttaagcatgacataaatattttaatatttgcacaaaaaatttgaataaaacgaatggtcaaacgttggtcaaaaagtcaacggcgtcatacattaaaatatagggggagtacaacggaggtcggagtcttcgaaagtttcacatatggtatttgcaaaataaaaagtgtgtccatgtaattatagcctacttattgtatgtaatatttgatattcacggatctacttcaaaataaaacacgatatgacattaattaaaattcaaaataaaaataaattaaatccctaaattagaaaaataaaaataagagttcaactaaaagtacaatttttatataactaaaaattcgaaataaaaataaatattattgagagaagaaaccatatagaatacatcacgagattaattaaaaatcaaaaataaaaaataaaaaatataagagtttaagtaggaatataatttgtaaataacaaaatatcggaatgaaaaatatggaattttcattaaaaaaaacaatccatttagaacacaaacgatgacaaattacaatagagaaaggagaagcaataaccaatagagaagggagaagcaataaccccgtaaagaaatggggtggtagcggtggactataaaaaaaacccaaatagaattccaatgatggttgagaggggagacgacgggcagaccattgaacagcacggtcatggctgttggtgggacatttagaaagtaaataaaatcacacaatgataatcatgtttgctttttaaactctcagtaacaacaaagaggggtagcaacgggcgagctgtagaggagtagtggcgaagtcgctgacggtttggcaaaacttctacaaagtaaaaaaataattaaactcaatgataattatgttcaattttttaaatcccaatgacaataaaagatgaagcagtggaccgattatagagtagtatagtaatggcgtttgacgggatttctaaaatcataggaacgaaacctaacgagataatgaactctaaaaactactagatttaattttaaaatttttcaaggaggatgtatagaagccgtggtagatcaagcaagcaaataaaagggtgagaaagaagtttggggtagcgactaatgcaacttagaagtttggggtagctactaatgcaactttttaaaaactgtaaaattagaaacacatgaagtgataaagttcggttttcaaagttatatgacaacgagatagtgatttaacaaattttaagtaaaattatatataaaaagagataattttgtacgtgtgttggtcccgcagctgcgcgggtcacccaaaaagttttgattaaatggtactccctccgtttcaggttaaggttataagacgttttgactttggtcaaagtcaaactgttttaagtttgactaagtttttagaaaaaaatgttaacattttcaacccaagacaaatttattataaaaatatattcaattattgatttgataaaactaatttagtattataaatattactatatttgcctataaacttagttgaaaaaaaacagttttactttgaccaaagtcaaaacgtgttttagcctgaaacgaagggagtagaagttattaatatgaatagtagtggtatttttttaattccaaaaaattatagtggtatggatctaattaaccatatattttacgacggatcgatggagtataagaggaccatgggatatctaacgaattgaccgatgggaagctagctgcttgggtcgtcgggcgatcgtagctagtgtcgatggctcacaggtcacaaacaagcgagaaatgttgctacctcccgccagcgataataatattccaaattgcaaagcaacgtctctttctaccgcggagagtagtagtaggagtggtactggcgtttgcagcgagtgtgcaaccaaccagcgatcgactcgagtgtgcgcgcagcggccacttgggggcaatcacgtcgacgcgggcggcggtcgatgtctagcgaggcgtccgtcgagagcacgacacgtccaagttgcgtccccgcttgcgccgggcccacccgtcggggggtgagccactctcactctgtatcatgctgctgcatcttatgcacatccatcgatcctttctgtgaataatggctgctgtccaatccaatgatcaacttgtcaaccgatccaccgatggaatggaatggatccagccgtaggtgaggagcagtgttagagcaggtacagtaagagcatgaagatagaagagcagcgggctacagatttatagccagctacagcacatatgagaccaaaaaataggtaactattatatgaattggctactaaattaactttaaatgatttagagccaatagttggctataatattaaacttgctctattagactataagggtgcgttcgttcctgggggattgggtgagaaagcccatcgtattccgcgcgcacgcttcccaaactactaaacggtgcatttttttaaaaaaatttctataggaaagttgctttaaaaaaccatattaatccatttttaaaatttaaaatagttaatactcaattaatcatgcgctaatggcttacctcgttttacgtatcttcccaatcttctcaatccccttctcctcaaactcaccctaagtcggctacaagcttatgtggagaagataagagaggaaagagaagataaacggactacagatttataactagctgcgatacaaactcccaaacatgttgtatgtataacatgtgggaccaattattaatgatatagtatatatttatagttaattattgtatgaattaactattagattgacaataaatgatttgaagctagcagtactctctacaattaaacttgctcttatagtctcatgggccacacatcagtcacagatatgtgccctgcatgccaaggaaagccaattgaagaatcgagcgatagtcacgccgccattactcctagatttcaggacgtctctggctccgttgcggtgaggtactgaagccaggcatgcagccttctcctgctactccctccgttttaaaatatttgacaccgttaaaattttagtacgtgtttaaccattcgtcttattcaaaaaatttaagtaattatttattcttttcatatcatttgattcactgctaaatatacttttacgtacacatatagttttacatattttataaatgttttaataagacgaacggtcaaacatgtgttaaaaagtcaacagtgtcaagggtggcagtatccgttactactacagttgtgttatctccatccatcgcgtcgcgtgtgtgtgttgactgttgcgcgcgggagtattgttgtggataagcgagcgagggagcgagcggcggattggatgcaggataagatcggccgtcccgggcgcgggcgcgggcgcgggcggcgataccaaccaactccaacagtgactgctcctcctcttcctcttgctgcgctgcgctttgccttgcgttggcttggcttggcttcgtccacgaccacgcgcaggcgcagcacatggccccgatgagcgtcaggattggattgggtcgtggatgggaagtgcgagttggttcacggaaccagcggcgccaccgaaagctacgtccccccagcgcggacttccattcgcattgcaccaacaacttcgctagtattaaccaaaccgaaagcaacgagatttccttcatgggccgccaaagtcgaggctttatgtaggcccatcaagccctgccgctaactaaggtcgaacagcccagatctctcatgggccttgtaattcgccatgccatcaggccctgcatacaaggcgtgcctgggcttcactgcctcatgggcttcaaaattccgccaggaaatactgcatcccaggggccagcggctgagaaatcttttgagattttcctctctgaaagaaaattttactagtaactttgacaggattacataaaagacatcagtattctgctacagtagatgcgtgtgtgcagaatcctcaattgcctctttgctactacattgaattaccagatcaacacataaatatatatatacaagttgttctgcactcggccttatggacgaaagaaaatggacactgatcagccagaatagatcagaaaccttagctagccaggtattcaggggctgtttggttgctgccctcgcctggagaccattgctcaggcaggtcgatccgaccgcaggcgaccgaaatcggacgcctgagatcgacgcatgagccgggcgcgaatctgagggcagcaagcaaacacgccctcagatttcagagtggttcagcgattcagccgtgcgaaccatattcctttgattgattccatcgtcataaactgaacttgtcgggactcgggactctatatgttttaccctgtctgtcaaaagaccttcttgcactgccaaatatgcactttcagcagacatcactgtgttcaataatgcatcatggcatatcatcaactatatattttatataggagtacgtttataagcattgacagagctagcttatttgggttccggaaatattgtgcaatgatcgtttgtgttccttttctcttgataagagaaaatatagtagtacattagtttagttgcatgcgatggagagataaaattaagatagctacggagtatgtatcagtttcttctaatatattgacgtgctatttttttacgcgttcgcaaaaaatatgtatcttgtctctttctcgatgacgatcgaatccaaattggtactcattcacgcgcaaaatgagttgcaatcgagatgcgtactactccaactctcaagcaacaagcggaacaattaatgcacacaaaaagcaagatcagaaaaagggaagatcattgcaaaattccaactagcttaggcaccgatcgatgtctaatgtcttgtaccgtgcaaagtttaatgtaaaacccaattctccacgtttcttctccactactatacttttgttaccatttatatatcaccaatcaatccacttgatgatcaggtcagatgcataacaaattaaattatgtctgaacagtcctgcaagcagtactggtgcatatgcatcatgttttctgtactctatcttagcatattcagagttagatcgatagggctttaaacatatacatactggaaaaaaacaacatatatagtcaaataaagacaagatgcaattgcatgttgttatcgactaattaatggcttcttatagtctaacagctagtagcttacatctacaattcaggactagtgaaaccagtagtaatttgcttacacaaattagatgccattaattcgttctcaaagtaaaagaaagtaacactagaatactcaatactactcctactgttgttcatttcttgtatacggggatgatcaatatactgatgtggagcatgcatacatatgcagtaattgtatacgatacacacctgtgtgctagcgttgggcttcgatttaactcctgaatctggagcagcttgcggattgatcaaggcggcgatggaagaagcaagccggcaggcaagcgcgtccagcaggcaaaggatcgatcgatcaaggaagatgaggaggcggaagcaagaggaaaattccaaagggattgcactgatcgatcacgcacgtcgtcgtcgatcgatgaggcgatcgatcgagatagctagccagatcaatgcgatccctttggagtcctccactagtttcctcaggccgatatatatgtcggccggttgaattggcaactacgcgtagctaagctatcaggttgcacgcatgcattgtggtagctaagctatctaattaactctcctatctctagaattcaaagtgcatgcagaatgtttgttgcagccagctgctagctagctaggtaaacactaagctaagtgtatagtggtattatagttaggtgctagcctggggtttataaggaggtagctgagcctgctcgagtgcaatggcatggagatcgagattgatatagagagagataggctagctggagagagagagagagagagaggaaatggaaacaagcaacgctagctggaagagggaggcgaaagctacagggcaatgagatggagaagcggagaagcttagcttagcttcacagtttgggcgtgtgaagtgaaggcgaaggcgatcgagagagagagagaggttgatgggccggggaacacaagggcccaccacggagatgctagtgtacccaatgtctggcgtactacttctgcccactccaatgctgacctctctctctctctctctcctgctgctgctgcccatctttttatttacgactctacccctggcaatgcccgttaagtttcactttagtttcgttttatccctagttattatacaacgagaagaaattactgactgatccatatccatgtaaaaacagtcgatcacgagtgtcatgcatccagtcttcgtccatagtgaaatggctattcattgatctatattgcacatgtgttctttgtgcacagctaactgtagtaaaaaatatatatgtgtgtgtgcatgagtgagaagtactctcactgtttacatttattaatttgtagaatatatagatgtatacaatagtaattagcacgaaggatgttcagcagtttaaccccgacagaagccaatgaattgttttcaaccgctagatcgagtagctaggatatgaagtatatatccaacgtcgtaaccgcctagtttgatatgatctgatcgagtatatagcttgcgttgttcttaaaaaaaaagaatatatagcttgcgtttatccctaaggttttgaattatatctgtttcttaatgctgcgttctttccagaagttggagagagtttttcagtgcacgcgaaatgggaaatatcattaagatattattaattaagtattaataattatataaacttgaaaatgatttttttattttttaaacaacctctatataatttttttataacaaatacatcatttaacagtttgaaaagcaagaaatttaaggtttggaattgaagaaaacaaataagcattagtactagtactacacattatacttgaatgaatatgtataggtagctagcagctttaaatatttgggcgttccatagcatagcaaacactccatgttgcagttggaagccaaatagctacagctaggtagataagttaacagtacacgcgcgcgtgcgggggttacagggacggccgtagttcagttaatccaatccacagccacccggcgcgattcgtgtataaagtggcggggaattaaaacatatgagatcaattactagtggtttatattggagtacgttatttctttatttttttatttatatctaaaaattaaggtttataggatgttttttaaaaaactgtgggatcagtcaaccccacgaaaaagacctaaatccgtaacttgatgcattgttgttgcaagcagcatttggccatttcacacactgacacacacgcacacatgctagatgcacgactgcaccgcatgcacgctcaaatgcttgatcgatcgatcgatcgatcaactcgattgctggctacctacctacctaccgacttggcaggctgccgtgtagggccatatgatatgtacgtcgatctgaattcctgaacctgagacgatcgagacccacacgggggaacatcaaattgagctacagatgcaacgtatgatctactcccttaaaaaaaaaaggaaaattggaaccataccattataatgtccagatttatagttagaactagtttttttttttgaaacggaaagaggagtatgtatttatgcacagggcatttgactgatagacagagaagaaagatctggcaacaacagcaaaagaaaaaaaaccatccaagaaaagaagaaagattaattcagatgcatggtttgggtcggcccctcttgattgcactgccacattaggcatgcatatgcatgatatggggtcgatcaatgggttgcacatgcatgcaacttgctaaatagattaattattaacggttgggcatacatactacctccgtttttaatagacgacgccgttaactttttctcacatgtttgatcattcgtcttattcaaaaaatttacgtaattataatttattttgttatgagttattttatcactcatagtactttaagtatgatttatatcatatacatttgcataaaatttttaaataagacgaatagtcaaacatataagaaaaagtcaacagcgtcatctatggaaaaacggagggagtatctagtaggaccatccatcgatcgatcgattcattcatgtatccatgcaacaacaacgatatgcacgcacgaacgcatgaccctgcaggacagacaagctctaaacccacaattaatcataccctgacccagatagctaagcaagcttctgcctgactaattgcaccatcaatccatcatcaacacatacattcgttcaaaagaaaaatcaatcatcaacacgatcgagctagcattagcaatacctgcatgccctctatcaatacagtttgataaaaatcaacttcagctagacagtagttctaagtacagaatatttactcccttccatccaaagtttaacaataaacacttttagaatgccgattccaatacatggaaagtcaagcattttcagtcaatcaagtacttcaatgggacataaaagcaattcaaaaatcgaaatttaacaatgagagaaatcttacatattatccttaatctttactaaggacctataattacttacatttagatcacggttcatttttgcttaaaattttttaaaagagccaatttgtcaaaaaaaaaaaatttaccgtggaaaatagtaattgttgcacttactctatgagttactccctccgtcccaaaatatagctatttctagcacagtgtcttgtcctaaaatgaagctatttcttcacctacctcctctcaaccaatcacaaccattcttcttcacctaatttctcttttcaaccaatcacacacttcctccaatcattctcacctactttcttaatacccgtgccaacctcaaaaatggtttcatttggggacggaggaagtagtaaaaaaaaagaagaaacgagcaaggacaaacgggggcatttcggtcattacagtagggtggtccaaatacgaaagcaagcaaggtccaaaagggaggagcacaagtatgcaaaggcgaagagagagtcgctggattccgccgggccgtgctacagaaaacaacgacgtgtgctcaaccgttttgttcacgacctccggcctcccttcctccgcttgccagtgcctgcctgtccgtgtctggagccaccaaaactggacccagcacacacagtcataccactgcgaccacagcaaatatcggcacttcgatctgttcatatatttatttttgaataatttctcactagtatatatttggattattcctgcaatatatacagaaaaatctaaaatatcattgtactagtctaatttcaagaaatgttattaacaagtacgagttccacgaaatatcatcgtacaatcaactttgtcctacaaaatgtcattgttagggttccatctatcccgctcacttaaccaaaaactgctaacggaaccctaacgacaataacatttctagagtaaagtcatttgtatgatgacattctatgaaactcgcacttatcaaggatctctcttaaaattgggtgtttttttttgtattttctctctatatatactcgactcgagagcatatttctatgtcagccactgtacattggacggacggacacagttgccgtatggaggtttcgatcgtgctggaggcagcatcatcctttggaacagtgagcagcgcattaattctggatagagagttatcagagaggcttttctttttatccgttatatatactaaaaaagaggtttttcttttgcaagcaaagcaaagcaactagttggtgctagccttgccaaacgccatttcgatcgttaaactactgctactacttgcaactagaccaacgattcgacgacttttcgagatagaatatatccaagttaaaatggccgttggtttttctgggtaaattattttgaattctcagtgaccgccaaagcagaaaagggtgagaaggcttctggagtacatgcatatgtggtccacgcgtgcaaccagccggccgtgtcggcttctgcagtgcaagttgccaaacctaccaaattcactcaggatccggacactttttttctcccccatttgcactccattattttctctagttaattaccatgtgtttcttcctataatcatcacactagtatacctgttcagctacccagtccacacggtttttcatttgttatttaagtatcttaggatttcctatggtcatcaactcatgatgcattccaaattataaaatgtttgagaaagagagaggaagatgccacgtacggctgacggaatcagatcgtaggcgtagctggaatgctggctaggataggtaggcacgtacgggtatacactgtacaccagtacactggcagatggtgtccctgcgtatttgtttccgtatgctgtgtgtgcccaagggggggcccacgtggcaaaccttcgcaaagacaagcgtcatgtgaagtgtctgagcagcggagaggtaggcccaccgcgcccggcccactttggcccacaaaacagaaccgggcccacgcgctgtgagcttacgtcctcctgccctcctattgtggctcacgtgggcctccacgtcggacccatatgttctttcaaacttcttccccgccatcattccttctcctctcctctacctttcccactatttttaccaatttttaccattcctatgcagtgtattaaaatgaaactgataaacaaaaccaacagacaaagcagtaatattgatctagctacccatccattcttgagatattattctaccaagaacaaaagcattcctgcatattagtaaaatttgtcctggaaaatcctatgtggtttgaacatgaagcaacataatgtagacagctcatgtgatttggacagatcacttacccgcagaagacaggatttagtccggtctaaaatttctagaatcccacaatgagaaattcccatcccgccttttcgttttctcaactttcaatccaagacggtatctcctttgaattcctgcgttgcctacaaaagatgaggcaagcttttagatatctgcccttttcctatgttctggactgagtaaaaagaaagaggcaaaacagtgacatgattccaccttttgaaatgacttactcacagatggaaatgctccacttctagcccaattacattatcagggaaaatgcaaagttcttgcaagtcactaccactttgtgcagccactttgagggcactagttgcgaagaagatctccaaggatgcacgcagtaacaccagttagtcaaggtagatagagttgtttcctgtacatgaaaaagcaactttcaacagttccttcaaagggatggcaaaggtgagaaagattgaaggaacagcggaggaagatatttattttacagcatcaggtaggttggtgttggtattcgaatttttagccagatcatgcaaacaaaactataacaagtagtaaccaaatttgcctgacaaaactttctctgtttgaatcttctacacttcactttgtgttcaaattcttttagcaggccatatgctccttatttcttgattggaaacaacaattatctgcttgaacactgtggacagacaccgattcagaaacagtgcgtgcgagagtaacatttctttttttgagagaacaacatttcactgtggggaaaagctggccggctatttgcaccctacaattacttcaaaacaagtgttggggaaatattttgagagttccgtgtgaggactttgttgacgcagggccactgttcgacagtgtcacgttgctttcccagcttcaggaatgtacgaagaaacacagacagccatgcgtggtgggatttggacatggaaaaggacgttgaggacgattgattgtcgggcatttgatgaaaggaaacagaccaaaccaggttactgtgttttagttatggaaccagcgacgccttcctctaggatggaaatttttgactagttggtgccaagctaagtgctaagtacagggctagccggtggctactggacatccacaaaagcaattatattatgaaactacacccaagtgactttatgaacacaaaaggcaaagatgcagaacaaaaagctgatatccacatggtttagtggcatatatcagcactagtcagcattctgtcatgtgcactgaaacataagctaagcagcagcgcatccaatgtggagcattattagtacccaaaccccagggtgtataaatctatggtagcagcactgagagttaccttttcaggagcattctccccgtagaaaccatcaaggctggcacataactgagtgttctgaattctggtgctgaagaacaacaagaaaaagggcgattccagtccagatcatcaagctcccccaatgctgggcaatttatactctggagaaagtttctgctcgccacttgaaagtgccgatgattagatttatcggagccgcggtgccgaagcagcacgagtgtggagctgggatgattaccagctaactgatgcccacagcacagtgctggcatagtggacggcatggagtccagcacaccaaccagaaagatatagtcatgtcaggaagaaagaaagagatcgattggtcctaaagcagtgagatgctcgaatccaaaccagcaggcgctgtagaagcacagttgcatgcttggagaagttgaaagagatggttaatcaagcctgtgagctgtgaccatggcggacagtggcgatgcaattataggatgtagttcaccgcagcaacgggcaggcagggttgacagggtgcatagtgcaaccggagacagggtaactgagcggcatcactgcaggccggcattccgtcgaacacttggcgcgcacgcgccaagcgtgccacgacaagcaacatcacggagacatcagacatcccatggcgcggtggccggtagaggcctgagacgcaacagaaacacaagcatgtttgccccgccagctcacggcgaaatccgcggcgcccacgcagcatcgaagaggaagaggaagagcaacgccgcggattcgcacttccgcagagcgcgaggcggaggaggagagatcgaagtgggctgggcatttcctttcagttgctgacttagcataaatgagcttgaatcgcgcagagcccgtctagtagtgggctttatattcttcgtgagataaacgtttaaggtgggctttctaacggacagttgactgagcccgtgggcctatattgacaagtgggccaatacgcgttatgagtcaatcaggtcaacggattgctgttgttgcggttgaaccccacataatgggggaaggtaagttaacacgtcatcattgactaattgagtggtattttatgtgattattatgtcaatcagggtcggcagggatgatacggaagtccggccccacgtttttgcttgatttcccctgtctagatagacatctatgctaatttagctgtcgttctgaacttctgataaggtgtaaacaatgccggttggcaacttcgtcaagctcgatctcctcttccgattttgagaagaaaaataataaaaagcatcaagcaagtgtccttactgctactgctataactttaaggtcccattatttggctttttccctaataagccaaaacggcttattagagaaaaaaagtaaatttataggtaaaacttttatatatgtattcttggtgacttaaaagctaatgctgaaaaagaaactacgtcgaaaatatctcaaaaccaatcttaaaattaagtttaaaagtttaaaatttggttttttctttggcttattaggccatccgatgggagccttatacagcagcagtagtagtagtactaggtatgagaataatgaaaaaacgttgaactctgatttggtttgggagcattcgtgcaaccgccagcctaggagtactatacctcctcagaaaaatagctgttccttttggagatattgaactatatgccacttttagatgtggcaattaactatttgttactgtacccccatgtcatagacacatgtggacccacatgttattgagataggagtggcaaatagttaattgccaaatctaaaagtggcaaatagttaaaagccccgttttttttggtatacatggctagcttcatatagcttaataaaatccaatatgatcgactgatccgctgcatagcgatatactccctccgtttcaaaatgtttgacaccgttgactttttagtacatgtctgaccgttcgtcttgtgaaatatgtaaaactagatgtgtacatgaaaatacatttaacaaggaatcaaatgatatgaaaagaataaataattacttaaaatttttgaataagacgaatggtcaaacacgtcctaaaaagtcaacggtgtcaaacatttttgaaacggagggagtagcatgatgatagcaagcacaacagtagctgcacgacgaatcagccgctaacttatggtcctgctcttttctccaacaagaaatgaatgaatattaagattttcgtggtacgcttttcaaactgctaaacggtatgtttcgtacgaaaactttttatatgaagtttgctctaaaatatcatattaatatattttttaagtttataataattaaatctcaatcaatcaacgtaaaaaacttaattttcatcttcatttctgcaagaaaagaacaccacctgaaaatattactcctgtagtgatgcagcgcatcgcgggagcggacacgcaggttacagatcaaatcgacctgttcgcttttggctcagtggggcccgattaacagccgcttggcttgcccgccagttcagctctgcagcaccgaacggaattaacggcctggccgactccgatcggcttgcaacgaattatttgtttgtttgataaggtaaatcaaatattatttttttaaaaaataataaaataaattttggttcaaacaatgcaatagaatttagaatttcgttgagaaaacacatttttaaagatgtggagcacatgatcaaccgtctaaacactcgtcagcgacaaatactactacttacgttacgtgtaaacagcgaacttgattgggcttccctccgtttggttggtctggttttgccgaacaatcagtctcatgacctcaccaaagttgctgcgccattcacccccaaaaagaaaattaaaaataaaaaaaggtaagttgccgcgccattttctcttgtcgtaggttggcttttgacggatcgatcgatccatgccaatctcaacattcttttcgtttcttttatccacaggcgggatagctactgctctgctctcttccttgcagcatcgctttcgctttttggcagcttgatttatttgttttatggacattaattccggtttgtcatcgtcgagttaattaatactggtaagcagcaattttattgcaaagatgcacggccatgtacaggacgacttgatgctgcctgtctgaacgtacttacgtacatgtcgtagcgtgtacacatacagtacaagctaatatcggtcggttcacacaacgattttgacttttgtgatcgattgccaagtcagaagcatactgtattcgctactagtaacagtgatgtttatctagtttactatcatttgaactgtggtcaaaccaaacctgcagaaaacgcaagttggatagaataaaattacctgctggtttgttgtagtagcgcacaggcacacagatgccgcatatggagtatattttttatacgaagatttggtccccgcatatcgctcactcgcacgtactgaggctggcagaaagagaaagcgtccgagtctcttttcatcatttcgtctgccaacgcaaacgtgcgtgtgcacgagtcgagaacaaattaactagacttttctcatcatcatcatcatcagatgcaacctgctcctcctacctatagcttccaagttccattccagctcgtatatcagctagctgggagtatgatttatcaggagaaaaaccagtacaagcaaaacaaaaaatataaacatttagtacggcttttatactttttttttgatagatgcggtggccgtgtgtgtgtccagcccggcgacggcacgcagcggccggcgtgcggttactggagcagcacacgaactaccacgaatagtcgcgcttcccggtgttggaaacgcacccaatttggccaacttgcccgtggcgttttactgccaaacagcagagtaggtaattaccgcgcgcgggattaaattcagagctcgtaatcacgacgcaaccaaccccgttgtcccagttacccagtacagcgcaggcatgtcggtataaataaataaataaataaacaaatgatagtaatagttaaataactaattgattaattaataatactccagctgcagcaacggcaacgataatattcccggcgaaataaaccccattcattagcaacggggttgtagcggtattagcgaataatagttgctgcagcggcggccacccagccagccagcctcaaccccaagccctccaaccccaagagaggccgcgccgcgagagagagagagagatccaatccaatccggcccccgtctccccccctcctccacgccgcggcgccgctccggttgcttgctcaggttggagtggtcgcgccgccgccgccgccgccgcgccgcgcctctcgattcggccgcgcgagcagatccgagcacccaacggcggccgctgcgcgcgggggggttcgaattctgcgccgctgccgttgcttcgcgtctcctttctcagggtgtgctgctctgttcgcttcctgcaggggggcgggctgctgatcgaaatgggcgggcgcgtgtccaaggcggtggcctgctgctgctgccgctcgcagcaccatggagtcgtcgtcgagagctcggagaagacgggtgcgtgatatgcttctctgcgccttccagaatgctctatctatccatccatctatctatctttccccctttttctgctgctatttttggagctcgctttcccttttccagaagctgtgggcgctcgcgatcttactttttatttgtcccccgagtttgctctattttcgcctagatatggccattaattcgttaaattgggtcgacatctccgcatttggaacgttgttaaactgactccggtagccattaatctgttccacctatccatttggtggtgatatctgcgttattatggtcaaactatttctgatttatgtgcgcctgtttacatattatatagcgtttctgctagtgatttgggggtgctgattagttttgttagttctgcatcttcgagtgatttttggctgcaagcttgtggtaatggagtaatttgagcggaatacatgtttatctgtagcggaggaggaccatggggagtcgtatgagctgccggcctttcaggaattctccttcgagcagctgaggctggccacctcaggctttgcggtggagaacatcgtgtctgagcatggtgagaaggcgcccaatgtggtgtacaaggggaagctcgacgcgcagcgtcgcatcgctgtgaagaggttcaaccgttctgcatggcctgacccgcggcagttcttggtatcctattgtcttcaccttaatccttttgcattgctaacgatgtgcgtttgcttggtgccaatggtagttgggtacgtggtggttattgtgggaatggtagattctgttctatttataagtgcatgaattggtttctaggtttgggttgtctcttatcatggaggttgttgatgtgtacctgttcctgagatgatatgcatgcttgttctttacttatttggcttttgggtggaatatgatggcttgcagttcaaattgtggcatctgccaactgtttgcacaacatatcttttttggtatgattattagattccaatactaaacaagtatcagacagcaatcattacagctagtagcaccatcattttgtggattacatgtttgattgctacatcactccattaattgctatgtgtgagttagtgtctcagtaattataaacttactattacctgttgttaacattatgtatttttgactgcattagttctagctcttcccgtggacaatgctttatatgccttgttattttgctaactgtcacatgttaattcaccaccatgccatttgtttctgattgctattgtacatactattaaaatggcaagtatagaggttttcttccacaactttaagcagcccattttccatattgatggcattttgttgtgtgagtggatggtggaatctacttcctatttgttgacgcaactttttgtttgattacccatatatttttgtggtaaattctctaagatcatctaataatccttttggtggaaacaactatgcttcaggaagaagctaaatcagttggacaacttcggagcaaaaggttagcaaatttgcttggctgttgctgcgaaggtgacgagagattgcttgttgcagaatacatgcccaatgacacactagcgaagcatcttttccattgtgagttgccatgcatttcttgtcgcatgccttagaacttttatgttgctgtcatcacatcaattagtaactgggttctgttcatggttacatttccgcatcatatataaataggatatctagagtagcaactgagagtaaattggacatgctgctttaatttcttttcataacactgttcaccatgacaattagtacttgccacgtgagagaagactatatgttcacttcaaagactcgtgtactctgtattggagctttctttttggcctctaagttcaccaatgcatctgaacttttggggagattccttgacatactttttccaacaatcgaaactgcatttcctgccatacatcttttataatgtcttgcattattaatgatgcaataccagcaatcttgaaattgatgtaatatttcaaacttattattgtatgatttcccaggggaggcgcaagcaatgaaatggcccatgagattaagagttgttctctatctggctgaggctttagaatattgcaccagcaaggggcgtgctctgtaccatgatcttaatgcctacagagttctctttgatgatgtgagtatcatatagattgtttttgtaacgtgatcatctgtgtgttttgtaacatttctatgttgtttacatggcacaggactgtaaccctaggctttcatgttttggcctcatgaagaacagtcgagatggtaaaagctacagtaccaatctggcgtttactcctccagagtacatgagaactggttggtaccttcttacttttcaaacatcgtaaagcttaattagtctttctttgtgagtgttataatctgcacatgatctttctggtcgtctaataacgttgttgcataccctggtttgaatcttattatcctttaacctttaaagttagtagggtcaacttttctctggagcattccaatactacgtggtttgaaattatgttaaatttttgcagcattttcataacttcctacattggattcttacagtttgaaccgtaatgattttcgtagtgcttctatccctttaaatgacgtttggtttgattttagcagaattgtacatctagaacccccccccccccctcattgtgcttggtggtgaattcatatttggtcaattgtgtctaagttcaagtgttcaactgctgtaaaatatgaagtcttgttacttttacattacaatttgtctcactcactcttttggtttacctgcaggacgtatcacacctgagagtgtcatttacagctttggtaccttgcttttggatgttcttagtgggaagcatattcctcctagccatgtatgcctttgagctttatttcatctagcaccattttacacttcctgcttttgcatcctgtcatgactgaatattttttttttctatatgcatccttgaaagaagtttagcaatttaaaaatataaatatgtacatacaataataaaagcataaatatgaatcctaaatatttcatatatacattatgtcattcacaatgtgtcaatactacttatttgtttagacttttgaaggatgaaaaataatattctcaaggaatctaagtaaaagataaccttttctttggaccactataaggacctttatcgcactatcaaggtcattaaggctgctacttagaacaatggatacagcaataaataagacttggcttcgcatatcttcatcttcaacagactaactaatatgagtgcaaatatgacaggcccttgacctgattcgagatcggaattttaacatgctgacagactcctgtttagagggtcaattttcaaatgaggaagggacagaactagtgcgattagcttcaagatgcctgcactatgaacctcgtgaacgacctaatgtaagatctctggtgcaagcattggctcctcttcagaaggatcttgaggtgaatatctttccacttccctttctcactatggcactgttgagttcaggtctcctaaaattatgttgagaaaattacgccatgaatttcaatttgttctatttcaacctatatatccaaattagttatttctatatctaaactcttcatatatttagtccctccctaagctttccacgactgacgccatttatgcttgtgtacattttttattctcagcttgaaagttaatctatcaaaatattataacagggtgattttggcatcctcattggacttgaagttctataatattgtaattgcagtaatgttgaaatattttgcagactccatcttatgaactgatggatataccccgtggtggtgcaacatctgttcagtcattgcttctttctcctcttgctgaagcttgttccagaaaggatctgacagcaatacatgaaatcctagaaaagacgggctacaaggatgatgagggaacagcaaatgaggttttagttttttttcccctcttctttactttctttagggtttgacatcattgccagtatgatttgtgtggtcttttcgtgagaatctttgtttgtatgtcaatcttgatggagcattctcagaatttacaagcaagcgaatcttttctataaaatcatttgtactgttagtcctcatgggctcattgcatcttttatgtcctacctcaagaaatattgttatcgatggcatgctgattgcattttgcttttttagatgtctgttggaatacattttagtgtaagaattctcttcatgttcatttcactttgatcctagagcaactatagttgacatgattttatgctgatctgcttgtcatctccttagttccagtgtgttaaagcaaaatagtcagttggaaagtcaccaaatattctgagtgtgacatttacatagttgcagcatgtgacgatgtgaaaccagttgtcagtcggatattgtgagtagttatatacgtagttgaaactttgtcatgctgaatgatttagcaaccatcctcgttatattgttatgctgttgcatgatccattgttttccttgtttgctgcagctctcatttcagatgtggaccaatcaaatgcaagatacattgaactcaaagaagaagggtgacaatgcttttcgacaaaaggacttctcttctgcaattgactgttattctcaggttgattttgcatctgtgtttatattctatatgggtttgtgagaagtgtcaggagagttgcatgatcaaatgtaattagtattcaacatagtatgaacagttccatttaatctttttttttttaaaaaaaaagtgtatgtgaaaacaacaatttctggaccgtgtgactatctgtaaacaccatcagtccattgaaaaggaaaaacttttaatcctcacagctatttttgactttgctcccatttgttgtatgcagttcattgaagttggtacgatggtttctccgaccatttatgcgcggcgttgcctgtcatatctgatgaatgacaaggcagaacaagctctcagtgatgcgatgcaagcgctagtaatatctccaacatggccaactgcattttatcttcaggctgctgctctgctttctttaggcatggagaatgaagctcaagaagcaatcaaggatggttgtgcccatgagacaagtagcagcagtggacattgaatatgactgaacaaatttgtagttcagaaaatgcacataacttcaggtatatgcttctaacaagtcctactactgaagtaactcagtagcccaagtaatcagtataagttcagtgtttggataaatgtgatgaatttgactttagctactaggttaatcataaggttgtaaacatctttgtgcaatgcagtttctgttgccatattgtggctcataacactaacaccaaatctgctaccatatttggtcacaaatggcatttactggtgtagccattaaatccatcagtgccatcactcggaaaaaacttatatgcaacctgaaatactgttatttgaacttacttagaacaggcttaagatgttctatgaacaattgatatttggaaggaaaacattaatataagtgaggtattgtttgccatctcttttaattcaccgtcattctgcttgtggcaggtgttttggtgtgaacaatcattggacatggaagcagctgttgttcatttgtcaatttggctaggggtttctttaaccttgttctgatttgcacgtgcggaaggtcgtccctcgtccatatgttcatgtaggatgtatatatggaagaaagcgacagcagaggccctgaaagagattgcaaagacattgaaggtgaataagtcctgcagacacgacattgatgggggaagggcaaaacttggtcttggttcctcctacccaagaaaatgggaaaacgaaaaaaaaaaagggattgttatcaaaaggcgttgttgatgtacatgtcaatcttgctggtaggcgtgtaaacttgtacagcaagcgttgtgttttctccaggtcatttttcttttctttttggttttgtttcatatgtgttagcccccattggtatattctagagaaaatcgtggaattcttgtcaggcggaaattggcagtgttgaagggcttggttcatttgcaaatcttggacgggctcatcacccccggtccagtttaatgctgtgctgctcaatttggtactagaatataacggtcaactaaaacctctgatgtgtgcgtccctttgacgagtaaaccggtaatgccgcttgagcttcggtaagaactggagttgctggtggtcactaaagctgggagacggcattgctggtggtggcagcgtgatcgatcgaacggcaaacacaacgaaggtgtagagggcgctgccgcatctaaaaccggactgcgttactgtgttagctcgccacggcgagattggtagccggatcctgcacagacgcgctgcgtaggcttgagtttagtcagtatgacgtgctcgaaattcccccagcatgagaggctcaggaaaccgagaaagctgggagtttttcctagctcggcgctggagccaagcaggacagggtactcctacatccaggcttacggcaatattgcggctgccgctgccagcgcagcgcacaatgcacgcacgaatgaaacaccattctgctgcacttgcaatcgatttcggtacgttactactgacccaaagcttttgtttattccgtgtgtcaacgaacgccactagcgactagtgcatctgttgctactatgcccggccgcttcgcgtagcagttgtcaaccactcttaactcggcaactccgctttatctcgcacactcactctgtccacgaaccacaccaccctacccgctgcacaaacctctgcacaaaacttacctataaatccatctcatctattcatgcagatgcaactcgtgcacagctctcatctcgcagccaaaaccactttactatctcgcagccaacctgtagcaaaagctaatcaaactagctatcaatcatgagctccggcgagcctgccgccgtcagcatccccatccacgaccaccatggcaaggccccggccacctcctccgccgtccctgctgctgctgctgctgcgcccgccgcggctcccgcggtggcgccacgcaaggtcggcatcccgttcttccggcgcggcgaccaccaccgcggcagccggtgcctcgcgttcctcgacttcatcctgcggatcgccgccttcggccccgcactggcggcggccatctccaccggcacgtccgacgagacgctctccgtcttcaccgagttctaccagttccgcgccagattcgatgacttcccggccttcctgtcagaatcacatatcatcacacatccaactcgatcacccaaattaaccatcgattatgccattcaaactgatgatgatgatgatcggatgcatatgctttgcaggttcttcttggtggcgaacgcgatcgtggcagggtacctggtgctgtccctccctttctccgccgtcctcgtgataaggcctcagaccatcggcctcaggcttctcctgctcgtctgcgacatggtatgtatcttaatctaagcaatgaaatggtttctttggatcgatagatttggctcctgatgagaattgatttgatgcgtgtactgcagatcatggcggcgatgctgacggcggcggcgtctgcggcggcggcgatcgtggacctggcgcacaacggcaacctgcgggcgaactgggtggccatatgcatgcagttccacggcttctgccagcgaaccagcggatccgtcgttgcctccttcctcaccgtcgtcatcctcatgttcctcgtcatcttggccgcctgctctatccgcaagcgctagcttaatcatcttgctagctaattaaaaaagattgtgcttaattatacatgcatataatatttacgtttgatttctatctgcatgcgcgagcgagtgcgtttttattttcgaattgtaatcctcttctgtactacatgcatttctttacttgtgagcattggcattggcgagtgatcgagcagtagtgcattgtaaaagttcacctgtgcatctatcgtttcactttctttctttcttgtaaaagatcaacgttgtgtgatcatcgtgctctgtaatctgaattgaacagcttgtttaaaacaaacattctgttatctctggtgtcaaacatgtctaataaatatcttattttgtcggcaggttcttttaataatgtcagatatggagtagtcattaatatatgaacacaatgcgcaactcaacaaatttatatagtcttacggatattttttttataaactagcataatattcatgctttgctatggataaaatactcatacttatttgaatatatgtgtactcacttgattaaaaataaaataaactactacataatattataaaatatcatgaaataatttgtacaacatgcaaaagcaattatgttgggctgatgtcaaaatcactgcaactgctattatcttttatatatagtagtattgattcagtcttacctattttgttttttttaaactaatataatatgcccctacattgtaacgggccatgtccgtataagtgtgaccgggataaaacatttagatccagttgttacttacttacttacttgtgctaagtgtgtgggcgcgtggtggaagaaggggatggaaagagaatgactccgtttttaaggtagggtaagagcatgcccaacagttttctaatatttaactcccgaaaattctaaattaggactatcaaaataaaaattaggctcaacaaccactcccttctccaagagaaacctaaaaattaaatcccaataatttgttggtttgccacataagtatggtgggaccacttgagagttgatcggcctctcccctctccatgtacgaacacccgatactcctcttcccctgcccgcaggcggagccgcctcatagttcgtcgcgatcggactgctgttcttatcttaatctgttgaaaaacgaaacattaagagcatactgtagctattcgtgttatcaaggaggtaatcccctagccaatatcattgatccgttgatccctagccaaacgacaagttgttgatcatgtacagctcttctgccgcaaaaaaactgataactgataaatgcatccagatttatttcaatagcaatcagtagcaatttagcagcacttcagcatcgtttcagcggcatttcagaacagttgcagcaatcaacattttagaacatctgcagcaatcagcagcaggcagcagcagcatttcagaacagcagcaacaatcagcattcagtacagcaccagtacatactccacagcacatacccacgaaaaacatcagcatatacttcctgctaatatttactcttatacagttatacttcctgtaaatattttcgtggtctctctctctctatatatatattaactggtgcaccatggagcccaggctccaacttaatccaccgtccatttgctttagaatgcgtgctttttaaaaccagaatattgaacgaattagtgggtttaatccatttaacccgttaggaaagatttgcatcaggtaccattccatttttaattcgcattcatgtatttccaaaggacgtacggattttgaatgtcattatgtttctatatcatagatcgtccaaaaaatcagccccgttaattacgttgaattgatttcttttccatttatatgaatttttctttttttttgcacgtatatatataaaccatccaacgatactcaaaattttacaatttaattagctgcatgcgctccgccggccgggagtacttctaccctcgttgctgcgagcttgcaccatgccgggacgccgccggtcgtccgcgaggttcatcgctgccggttcgtcggcgaggtttcgttgccgtcgccagtcgctagcttcgtcgccacgccgtaatgcgccatcggttgtctgtgagattcgtcgccggcaccccggtcgtccgtgaggttcgtcgtcgtcactgccggtttccccgtgaggaggttcgtcgctgccgtcaccggcgatgacgtggtttcatgtgtaatttattttaatctattcttatattttggcgggttccggctcaactgttttgcaggttgagtactgacaattttctttgtttgtcaagaccttaagacggtgatggatcctactaataattaagttgttggttcatcctcctatagtgatccaatgactgtacacgtatgctgccgcaggatgatcaggagaagatggtcgtaggaagaagaagcactagttggatgcacgcactaggagctagtaggctgttattcaaattaacttgaaaactaatttgaatatacaataattctagagtatacaaaaaaaaacttgtgtcggatacctttgatcgcatctatatgaccacagatttttctagaataagaaaaaacagctagttttaaacatttgtgttaatcacttatcactgatcactgaaagaataataattttaaatgtgaagcactaatattaagacgaatagactcagtcagacaggtttcaccacactcaactcgcaaaatatccaatcatactttcgaaatttaacggaagtttcaaagttccatggttcaattgcgtcggcattaggtatattttgtcgcatacttaattagccacagttatataacgaaaggatttttcaaactactttctccgtttcaaaatgtaagtcattattctagcatttttcatatttatatcaatggtaatatgaatctaaatagatatatatgtctatattcactaacataaatataaatgtgggaaatgttaaaatgacctacattgtgaaacggatggagtatgctatactgatgggaagtgctagttttgcatgtgtgggagatgctatatatacagatacacgtcaatacatacattaactatactaggcatagaatacccaatctgtagtacttaaacataagtttccacattgactaaatttacccaaactatgttattttttttcacgcgcatttagacaggtgcgtacccaactagaaatgggtatttttccaaaatatgcatttcagtgggtatatgaacgtacttcaaatcttgatttcctggaaccatgaggtcccaattcatcatccttgcccaatttattagtttgtactctagaatatattatacctagtttaataatatttcataattgtgtgtttaaaatactcttaatatccatgttcattaaaaaaaattattccacggtcattcaaattaatacgaagtattttggtactatgtatatactccctccgtcccaaaaaaaactcaacctcgtactacgatgtgacacctcctagtacaataaatctaaacatactctatgtctagatttgttgctttttttttgggatggtgtatctactatcccactattccataaatatcagaacctaaaattcatctacatgggcaggatatacgtaccacacaaggcttatatacctacatctacatctggtcagctacctagctagagtagaaaaatacttaactaaaaggcccagcaaatttcaaattcagttcaagaaaaaaaaaagcttcatgcaaaattgtgtgtgtttcagatgcatttagataggtatatacctaattaactagaaaacacagcacacagggcttatacctacatctacatgtaactagttacatctggtcagctacctaactaaaaagcctagctagtttcaatttcagttctaagaaaaaaaaataagcttcttgaaaaatcaaattatttttcacacgcatttagataggtatataccaactagaaatatgtatttttttccaaaatatgcatttttaagggtatatacctagtacgtgtgtttaaaccggtatatactcaaatagaatcatgatacgtcacatacctacctacatctacatctggttagctacctagctagagtataaaaaatacttaactaaaaggcctagcatatttcaaattcagttcaaaggaaaaaataagcttcatggaaaatcaattttgtttcaggtgcatttagataggtatatacctaattaactataaaacacaacaaacaaggcatatacctacatctacaagtaactaatttgtcagctacctagctagagtagaaaaaaaaacttaactaaaaggtctagctagtttcaaattcagttaaaaaaaagctttttgaaaaatcaatttttttacgcgcatttagataggtatataccaactagaaatatgtattttaacaaaatatgcagttttaagggtatatacctagtatgtgtgtttaaaccggtatatacccaaagagaatcattgatacgtcgtcacacatacccaatataccggtatacgtgtttaaatactaaaaaatatgcgtgctctaaatggtatattatacccaattaaatggtacatctaaactgcatgcatgtacgtacctagccgcttggtagtaagggtgaaaacaggacgggtatttcctgcttgaccgcccgaccgtattaattcggaacaaatttggctcagaaattcgggtacccaaaattttatacggatatagggttcgaatacgggttatttttggtggatatgggatcgggttcgggagcgcagtattcgacggatacggaaatacggatactacccgaatatatatacggatagtacccgtattacgtagtctgtacaaccaaccaaccagatttgaggcaagctagccaaaaagccaacaactcaggcccaaaactcaccggcccaatagtattgttaacccgaggaaataggagagagatgaggagaccgagtggagtgattgttcgtctgttcctattcctgggcggcggcggcggctcctggctcctgccgtcacgggctctcggcgacggcgtctcctcctggctcctgccgcggccgcgcccttgcgacggctgccagcagcgccacccacgccggcggcgccgctccgtcaccgcgccggctcccacggtgctcgtcaccaccgttgctgcacggcctgcgtcggttgccatctccgtcgtgccgtcctgccgtgtgcaggcctgccgtgacagccgtgtgcgccagtcgtcgtctcctactgatgatttgagtgtcttgtccttaaatatggtttacgtgaaatggtttgtgttttctggttggctcaagactcttgtgaaatggtgatgtttcctggttggcatttggcaagacatgtttctgagtattatggtattatgtactggagtactatgtggctgtgagcctgtgactgtgactgtaatgactataagtctccgttatgaagaattggtgatattttggcatgtggctgtctgacgtactgtactacttttagcttgtggctgtgagcctgtcacgtactgtactactgtgtcttgtttcctaagcccctaatgacctaatataatcgcattatggatatatagatttgttgaatggttattatctatatggtatttatgattgtttcttcgacttgatatccgaataagtatttgtaaccgagagtgtacgtatccgtttgggtatgtattcggcccatatttttgcccgatattatccgaacctatatccgtattcgacactatccgtgtccgacccgattccgattataaaatataggttaggatatgagaagggtgagatccgacccaatccgacccgatttcacccctacttggtagtacatttgaaatgcatgcacgttgcatacccaaaaatttttggagcatcttcttcaggttcatcgacacaaattaagaaggtccaccttacttttgtaagaaaaattatactaccgaaaaaagtccatactaaatggaattgatttgccataagtactatatcaccaatattaagaaacattttttaaatatggcatatccgatcatatgcattaattaaatatcattatcatcccataattaggctattgtatctgacagcttttgattcgttgtcaccattccatataagaaatcgttactgggtagacccgttaactttcatactcacatcaatcgatctgatcagagccaaatccaacggtatgtagcattggtgcccatacactatatatatatatatatatatatatatatattgtgaggggatctagtgcctggttctcccaaaccagggaggctggctggtcccctctgtcctctgtcgcctgaatgttggaggacggcggttgagcgggatggggaggcaccaacccacagagaccatacctgggtgggcgcgacgggacaccggcaccccgaatcgaggcggcgccggcgacgctacctgcggaagcggtgacggttgtcctccgcctggatccgttgaagaagtgaagatgcagccgtcactgccatagcatgcgccgcacctgcgaagagcgccgactccatggaagctagggagatcgatgcaggcattccagctctctgtggagaagagaacgccggcgacggtacagatcaaaccagcggcagatgagggcgcaaagagaaagagctgcgtggaaacgtttctctgcgcgcgcgcgaggaggctggtttcctgtgatttcgctgattgggggatgaacggacgcccctacgagaaaccatgatttgggaatcataactattgggcccgaggatagggagactgttggattagatttttcaataaaaatcccctaatattaagattgggattcatttagcaaatctgttaggcatgctctaaggagatataaaatcagaattacaggatgggccgaattgtagacgaaatccggcccacccgggccagtccagttgcggaagtaggacgcgcgccaaataacacgacccgagcgccagatagcatcccaaagtcgagaacgagacgagacgagccttatctccaatccggattacacatcgcgtcgcgtccgcatccaattcccgggccattcgaaatccccaacaccagtagccggccgcggcatgcagttcctctcgctctccgccgccgccgcctcctcgccggcggccgccgtcctcccaccgaagccattcaaacccctctcctccgcggcccccttccgtcgcccctccccgcctccgccgcctccgtccccggtgccctcacccgcgccaccgccaccgccgcatcgcccttctccttctcctcccccgaaccccctctcctccaagctatggctgtccagcaagctctccccgccgccccccgagacactagagcagccagagccttctactactactactactactaccccgccgccgccggaaccggaggcggaggcggaggcgcggcggcaggaggaattccggcacaaggggaaggtcttcgtcgggaaccttccactgtgggccaggaaggcggagatcgccgagttcttccgccagtttgggcccctggagaaggtcgagctcgtgcgcggccacgacgatcccgagcgcaacgtgggcttctgcttcctatactacggaggcgacgacgcggacgccgcggcggagcgtgcggtggaggttgacggggttgacttccgtgggaggtcgctcaccgtgaggcttgacgacggcaggaaagggagggccagggctgagcagcgggcgcgctgggtgaacgacggccggaggcgcgagccacggtcgccgtggcacgagggcagggacgaggcgtgccgtgagttccgcagggtggtggaatcacggcccgacaactggcaggccgtcgtctctgcattcgagaggatacccaaggtgtggcttctcatctcaaaatctattttctgctatttccggtgaataataggacatcaattgcatattatgtattttttttgaaaccaaaccaattgcattgttataggtgtacacgtgtgtgttttcaagaatgcaaagcaggtgaagtttttctataagtaattttgcaggaagcagtaccgttcgcataggagtcctacaaatgtcatctgtatttcggaatagggattaatgtgccactgaataggcacatctttattatacaatgcatgtttgaatttacatgttagcaaacttgtcatgaaaattgtcatttcaatgccatcttcagctgtctggtgtagttagcgcatacttccctctttgtaagcaaagttttggatgtcctggatcttacttacccatttctttttaaaaaactgctccatgaggtaatattcattacacaaataccagatgcttcatcttttcctattagatttgatgctaattcatgtagtcaatatatcatatagttcactagttcagtatatttgttattttcttttagataatggatcctttattgaactcattaaatcacatcgaggtgatacaattgtcctcccgacctttgcattataagttataacttttcttgagaataggtatacaattacttcattgagatttctggttagtgagtgagcaactatattttttcgaataaaattataaaatgtgccaattcttaatgttcaaaaatctctacattcatggttatgtgttcacatcttcccaagaaagttcaagtgccacaggagaaaaaaacaggtctagctgatgcttattgaatttattgcattgaagatagaggcatctcataactcatattaccattagtacattgttgtatgcaatgcattgacacttctatcttgatgtttcagccatcaaggagagaattcggtctgatgattgtttattatgccaagcgaggtgataagcatcatgctcgtgcaacatttgagaacatgagagcaagaggaatagagcccaatgcatttgtttttacaaggtaggtttattctttctgctatttgcaaacgttttgttgctgttcttttccaatcatggacaaactggtgtaggataaaatgtgtagccagaggatttgtgtaaaaaaaaaacaaccctgaaacagacaggctacagaatttttactacgtaaagataagaacttacatgagataaacatcacgagggaactgaaagaacagttggtaaggaaccttacacagaatcagactaattggttccttggatcctggtttgccagcttgagataagaaaatgttcactgataaaattgttgacatagaaagccatgtaactttcatggtgtaagcatatatggtgcaactgtttatgcctggtatgttagctttagcaaaatctttatgattgctctaattgctgcttgttgatttgcctcctgcattaaatttacttcatttcatgcagccttgttcacgcttatgcagttgctagagatatgcgtggagctctgtcttgcgttgaggaaatgaaatctgagggtcttgagctgacaattgttacctacagtatccttatttcaggattcgccaaaattaatgattcccagtgagtattttctgctcattgactagagcctgttctacgtactactctcacatgctttgttcagaatgaatgatagatctgttatagctcttttatgcgtagcatattctcattcagttttaaacatttctctgtgcatttggccacttaaacattctctcgtctttcttggcccaaggaccctgactttttgctaatatttttttatcttgtttgaaagatctgcagataacttgttcaaagaggctaagaccaagcttagcagtctcaatggaatcatatatagtaacatcatacatgctcactggttagtatttgtcagatttataaacctcttggaacttaacactgatatgagattgatttaacactaaagtacctgtacttgcagtcaatctggcaatatggaacgggctgaagaactggtgcgtgaaatggaagaggatgggatagatgctcctatagatgtatatcacagtatgatgcatggatataccatcattcagaacgaaaataaatgtctagttgtctttgaacggcttaaggtatagtggaaactgtcttctcatgggtaaccgatctggctttcttatatttctattaagtccagtttggtcctcaatccttcttgtggtctaattttcatttcatggccagcttcaagaccatttagtttacacaactaaaatgccaaaactggtacaaataaccccttgtattcaaatcatcgtgttattatcccattttactgtgacaaagacacattgacaacttgaattaccattgaggttggtgagtcagcacttttttttttttgagcaagggcgactgcccccatttctattacccgaaatggaacatagtagtttacagagtgcaaggaagaaagacatgaagaaacagcataagggctagaaaagacaacaaaaggaagattacaggtttctcattcaacaggaattccacaccaccgtgcatatgaccctccatcaaccgaagccgaaagcacaaaaacaacccctcaaccatagcaaaagctcttctgacatcagtatgctgggccaaaccaaaagaacatcaactttcttttgtgttcctgaagccatgtaccttcatccttccagtcttctcgtcctagtgtaccatccatacttcgagctgaaaacatcatttgctacctgccttattagcctggctcccagaagcaacttttcttgatttgcctccaacatctgcagcacagcccaagtttcaatccaatgacaagtcaagtaaactacatcaatgggatcttaaaacggatgggacctgcctgctgtcctgttctgtttttgctccttatctctccctccagatctggtaatcttatatctccaggatccaagtttctttcagattccgtcagttagctattgtaaccagtcccttggccagacctcacctctggttttatttggagcaaacgaaagtaccaactcaactcaaagatattttggaattcatggctggtaatcaaagaccgattcaagttaagaaattcatttctggattttccagatagtgagcaaaagaaacaatggggcacgacaattgcaggcccatggtaggaagcatagcagaagctgtagtagggccaggagcagtgaagtgagaagcttatctgccctgattctggcagcagcaacaaagtgccagaagtccaggagtgggtgagaaaggagaggtgggaagtgggaatttctggccatggtggtgctgctcagccagaaaccttagtggtgctgaccagcgatgaaagtatggaactaatgtgctttgtgatcatattatccatggaagctacaagaatgaaaccacaccctttcctctcattaatttctgtatgttccttttaaatatgcatatgcattgatgtttaggtgtatgagtatttttttgggaaaatgacctatctgcatatcactgcattgcatatctgtacagtatcggagtatctgggaaacacagatgatgaagttacttgatctgtggatacaactttgtatcatcgaggatggtgtcaaggaaatgaggaagagaaaaaataagcatatcgctgttatcgggccacaccaccctgtggactaaaatggaggcggttttagctcagggatgtaatttgcacctgttttgatatttggaagacctgtgataaatggttctaaagtttaagggtgaaatactgaaacgtaaaattagactacaagaggagttgagggaccagagatagatgtattcataatttttattttttctatctccccttctgatctgatttttcctgttttttgcaggagtgtggctttaaaccatcaataatctcttatgggtgccttcttaatttgtatgtcaaggtaaaagtaattctgttgcgtgctttcttgtcagttttcctgtaattttgtgtgttcccttagtagaaggaaacaaaaaattgtgcatcccagacaagtgtttttttccctcgtaaattatgatgtttaaacactcctttctgcaccattgatttctattcgttatatgactagtattctgaatatctaagagtccttggattcacctttttctgaaagcctaaggcaagggaagctttatgtcgagtttcttatacattgaacatgacaatcttcaactttgaaactcaaacctgcccctttattattaattgtaagataggttacttgagacaactcttaacagtgatcactgatgttgctctggtttcttttcttttctcttttcagataggtaaggttgccaaagcattatctattagcaaagaaatggagtcttgtggcatcaaacataataataaaacatactctatgcttatcaatggatttatccatttgcacgactttgcaaatgctttcgccatatttgaggaaatgctaagatcaggtctacaacctgatcgtgccatatacaatttgcttatagaggcattttgtaagatgggaaacatggatcgtgctatttgcattttggaaaaaatgcagaaggaacgaatgcaaccatcaaatagagcattcaggcctatcatagagggatatgcagttgctggtgatatgaaaagtgctttggatactcttgatctgatgcggcgaagtggttgtgttcccactgtaatgacttacaatgctctcattcacgggctagttagaaagcacaaggtatttttcaagtacatgctagtttcttcaaatctaatcctgtcatgtggcatttactttaaatttgtgtttataggttcaaagagctgtctctgtgcttgataagatgtccatcgctggcattacaccaaatgagcatacatacacaatcattatgagaggttatgctgccagtggagatattgggaaggcttttgaatacttcaccaaaataaaagagagtggtctaaaactcgatgtgtacatttatgaaacattgctcagagcctgttgcaaatcagggaggatgcagagtgccttagcagtcactcgtgagatgagcttccaaaagataccaaggaatacatttatatataatattttgattgatgggtaggtgttctagataagctctttagccaatgtttttactgactagtaacgatctttttaccgactcagtactcagggacgcttgtgaccatttatttatgtgttgactgcatcgaactacttagtcaactgctgtactgactcagggatacaagaaagtattatggaaaaaaataatatagggggtagagaacaacccctcaatatttttagtagaaggttgtggttgaacctgtggagggctagcacagcgaactgtgctgttagccagtaggtcctaatagtctcctcacatgaaactattatgatatttcattggattagtcatacattagttttgaaaatttgtattatatactgagttcatgttttatttgagtcttgctgtaatttatgaagttttataaaagcggtatattttcctttttgcctgtttcgtcacaaatccttttgtgtagatgggctcggagaggtgatgtttgggaagcagaggacttgatgaagcagatgaaagaagatggtgtccctcctaacatccatacttatacctcctatataaatgcatgctgcaaggcaggagacatgcaggtacgagaattttgcattggaatacttagtttcttacttattgtgagttgtaaccgtgtagtggagatagcctgattttgataggatatgtgcacatgttttaaggtagctgaccaaaatattttacaatgccatgactatatgcccgaattatttcagcactacagatttacctaggtggctacatattcaaatttggcacttgtgaatggagaagtattctcttggggccttcttgtaatctatccaattatttttttttataaaatgatttgtttgtagagagcagaaaaggtgattgaagaaatggtagatgttggactaaaacctaatgtcaagacatatactaccttgattaaaggttgggcaagagtgtcacttccagacagggcattgaaatgctttgaggagatgaaacttgctgggttgaaacctgatgaggcttcttatcattgcttggtgacttcacttctgtcaagggcaactgtaatggagggaagtacctacacaggaatcattagtgtctgtagagaaatgtctgagaatgatttgactgttgatcttcgcactgctgttcactggtctagatggcttcacaagattgagaggactggaggggcactaacagaagcgcttcagagaatatttcctcctgattggaattcattagaatttttaggagagccatccagttctataagcatgggggagtctgatgattacagtgattcagattttagcggtgatgaagatgaggatcataatattgatgatagctgaaaaactctagattccagagcctgtttttcttgttctgtgccctcactttttgtcctttggttctgccagagtggatgaccgaacaaggtattatgtgttgaactgttaatatgtgtttaatatgccatttccttttggtgatgtttctaaaaagcacacataataattcttgaaaaggagtctgccaacaatcatttgtcattactcattgccactttttggagttcctggaaattgcattgaactaacactctttgtttccatggcagcaatgtctttgatcaaactgtgccctcacattcagacaccagtggcttgtggactatccaagagcgtttggaatcttatagtgcaataagcgtgagctggctggcctctgctgcgtttcttcaagagcaacagtcagtaacagttctactgggactgaagacacaggctgtcaatgcaacagacgaagcttactcagttatgcgtgtagctgtacatatcaatggctggcacaggtaaatattcttgagatattgacagattcaattgttgtttctctccatcctttcagtatagtccaacttgatataaaatccaattccatatatatgtgtataaatgcaagtaaagctataccacgttaccagttaccacccacaccccttcttggcttgccttttgtagtgtgccatgtgaaatgtaccgaccatgatagagcctgcgtgcccatttttcaacatccaaatgttaggagtggtaggagcgcttataggcatatgcttgaacaccactttgattggcagaattttgtaggggcagcacagtgtgcctacaaggtttggttttgtaaccacatccctggacaagccgttcgatgcttatttgaatactagtacgacaaaccaatctgtgtcgtggtgctcgtaaaagctgagatcatttaaacttgtaagtagaaagttggacgagcttttttctcttcgagagaatgcacaggccctcatgttctttgttttgatgatcttaaaaaaaccatagtcaaggtaaataggagcaaagattggtatcttgcacattattgcgggttgggcttattcaatgggggaattccctattgaaactgaagtacaagtccaatcaagtgctagatgatgactgttttctcatttaaggtttggcatcttccagtacagcagcttcaatcaaatgggccttaacgtagctcagcccgattcaatattacttggaattgcacgcctctgtccaagctgaaagcttttactagtaggacacttgaatgcctgcacaagacggcattaatgctgtgcttatgagcccgatttcttgagactggtgttgagtttgtgcgtatgtgtgtgctatgagctgcgaatcttagctggccggtatctttcattgaatcgaaagtggcctccccattcaagtcttgcccacaagataaaacagtgcttcatttatgcctgttatttaattttgcttagctgcatctcgcttctccattcatacaccataaattctttcaaagaaatcttgattgtattagtgttgtattaggcctttgttcggagagaaaatttcatagtaccaattaccccctccatcccaaaatataataacttctatcactaagagtttgttccaaaataaaataacttatccaccaacattctcttcctaactaatcataaccctgcaccatttaatttttccatctacctccacttctcaaccaatcacaatatcatcat

SEQ ID NO: 8838 - DNA, 100284 bp, Oryza sativa
  unsure (1)..(100284): unsure at all n locations
tttttacctccttcctaaacaccacctaaaattagaagtttggttgaaatcagaacgatgtgatggaaaagttggaaatttatgtgtgtagaaaagtttttaatgtgatggaaaagttataagtttgaaaaaaaagtttgcaactactgcgtaaacacggtgtgagttccgatgatcaacacgtagtaccgtgcagtgcctaggctaggtctggatggacctgactagcagctaagagcaaggataattaagagtgtaattaaggtgactgtaacatgtagagtataggagtactggagtatctcttaattgtttgtgttgaattaactatgttgctttctattcagttatttatttatgaagatattactcacgttatgaaaagaccattatatacgcagcgggttatttgtgccggtcgatatatacatgaacattaatttatgccgccaagactgtgcgtaggtcgggtgagagcctcagatcgagcgtgtgcctgctatgtatggcccgttgccaatctctacactcttgtttttgtccagctcactcgtgtagtactctagaaaagaaaataccacaagtcgcaaattaatgctactcgtatatccgacctgtcaaatgaggggaattcatgcatgattgtagccagcgtaattaaggagtgatctgcactgtttatcgcatgtgttgatgcatgatcaaactgacactcgagtaccaaggtccaatccatcaaccagtcaatcaacctaccctactcgtatgcagtcatctgcagagtagtactgtagcaggcgatttgaggctaacatcatcatagtgacacgatcacgctctgcagtacaatatcacaaccaccaattcaagtgcgagatagtaccctttgttgctagtctatcgcctcttcctaagggctgcaaacaacccaacccggaacctcgtctaaaatattggtgcaaatacacacatttccacagtgcaaatacactcttttatgtggcttaactggttgaatgtactgtaggagtaaactgagcccacagtggacatgacctcacgcgtggacacgggggagtgggacggaattcatttccccacctatcctcagcgagacatcacttctcctagccctcccctccgtcgctctcggcgacggacttctcgaggccgtgtaggcgcgcaccctcgccatggctgccttcctctcctcctcctcctcctcctcctccccctcctcctcgctacagtagtccacgaaggaggtggccacggccgtagcggagaagcgacccgtgtgggggggaggggagggagaggaggcaaggcggcagcaagcgacctgccatggatttctgttcttgattgttctttcaagatggatgttttttcgatctggaattactagcatgtctgatgtcgtggggattatggagggcgatttggggaggtcacggggcagtgaagaaatgctacccacagtgggcgtttctcggttttccccgtccgctcgcgcccttgccgccccgaagttttgcgccgctcagacaagggacgagaaacctagctgaggcacgggcgtttgctccacgtcgacccgaatccgagctggcgcaacaagatcacgcgctagctcggtgcactgtgaaaggcctaaggccgtgaactcatggatggctaggcaaaataggacaaaatggcatcatcaggcaaaaaaccgacctggaggtctaagggcccctttgaatcacatgattaaaaaaatataggaataggaaaaacgtaggattttaatatgagtgcaagtgtaaaacagaggattacaaaactcaggaaaaacacaggaatggctgtttgattggaccgcaggaaaaacgcaggaattaagggcccatttgatttggaggaaaaacataggaattttagaggatttcaatcctatagaaaaatttcctatgaagccctctgaaataaaggattgaatcctatctaatcctttgaaattcctatggaatggacaatcctatagagattttggaggaaatttagcaagagcttcaacctcttgctaacttttcttcgagtctatctttctcatccaattcctgtgtttttcctatggttcaatcaaacaatcattcctgtgtttttcctgcgttttgcaatcctccattttatacttacattcctatcaaaatcctacgtttttcatattcctacgttttctcaatcctgcgattcaaagggggcctaaaggagatatgaagggcccctttgaattggaggattatcatacgaattttggaggatttaatttcctaaggaatttttcctatgaaaccctttgattcataggaaagtataggaaattttccttatgattgtattcctgtagctcaatttcataggaaaataagcaagaggttcaacctcttagaaactatcttttgctttgtttgtttcctatggtgctatcaaagggaccctcttcatatttcctgtgtttttcattcctgtaggattaggaaaacataccaatttaattcctacatttttcctattcccgtgtttttcctatcctgtgtttcaaaggggcctgaagactcataggaaagtttccatgaggtagaacctcatgctagattttctctaaaacttgcatgtgtttaggcattccataggaatttcacaggattttataggattcattcatttgattcaaagagctatatagaaaatttttttatagaaatagaatcctctaaaattcctatgaatttcatttgaatcaaagtgggcctaaatcagaaaaacttgatcgtggaggtgaagggtgatgtacaagtgggaaagagacaaaagaggattgcatgttttaattgacgacagcgatgggatatgcacgcccccttaatttcgaaaactggatcattagcaattaagtactcctcctcattagagtagggtcgtctcatctggacgcatatgcaacgctgaagcttttgtcagaaagctgtgtactactagtagtagtgtatagtacggtactacagtggtggatccaaattgtatgaaatcccgaggcatgcagatgagacgtggattgatccttgctgtgctgtgctgtgttccctttcctttcctactagccgcgcgtagcaatgcaggatgcagtagctgcacaatgcaggagtactacgctggggcttctgtgcagtgcagtggtactgcatcttcacgtttgattcggctgcttgcgttgggctcggcactactagagctatatttccttcgtcacattttaaacgtagagataagttttcgtgtttaaatttaattatttgttttatttaaaataaaaaaacatattttgtaaaaaataaaaaaaccataagtcgcacatatattattatttatttttattacctaataacaataaaatactactccctccgtattttaatgtatgacgccgttgattttttaactaacgtttgaccattcgtcttaatcaaattttttatgcaaatataaaaatatttatgtcatacttaaagaatatttgatgatagatcaagtcacaataaaataaatgataattacataattttttttgaataagatgaaaggtcaaacgtttatcaaaaagttaacggcatcatacattaaaatacggatagagtaattataaaaaacttgaaaataaagcgaacgatcaaatctggcgacggaaactcatggctacactgagtacctagcaatttttagcatagtgctactcccttgtctcatattataaaagattttggatggacaccttatctcaatcaatcacaccaatttttatttaatttattcacctattttcttttttctcaaacaaaaaagtattttttttcaattactttcatctacttttttaactacctgtgctcattaaaaaatgattatgctttaggatggaagagctaagattttagcgatcaaatgctacccatcgttggtaggagtaccatatgagaaaaacttagaggttttttgactggccccacaaggtggtggtgggttcaaagcctgcggcagatgcagcaaaatccccccttccgtttcccgttccaggcgatcgagtcgagctgccgaggcgcgccaagagggagggagagatagagagattaaaaaagaaaaaaaaaagagccggtggggccgggccgacagagctggacaaatgcagacggaatgggggaaggccggggcccactaggttttgccatgtcccaggaatcagtgggcccgttggtctgacgccgacgttaagttcgtccacacacccatcgaacccgaacaaaagcagttcatctcaaacttgaaactgaaagcagcaagcaagcaagaattcgttcgtgtgtgcgcatgcagatgcaggcacctccgcatcatgatgcattcatgtaacgctttctttctccaccccacacggccacgtcgctctctcctcgatctctataactcttttctatatctgcacctgcgcgtgtgccaatggaccgatatcaacttttccgttccattgccgtcgtagcagtattatattttgccttttgcaattgtgtgcaggtaggtaggcgtgattagcttcttttcttttgtttgtttggcacacattaaagctaaagaaaaccaagcttaaaagcgatcgactttgtttcttcttcacaagagaagagaatggattatgtgtgcctgctactgctctgcactgcatgccttgttgcttgtgacattttcggttaattttcgatcagcgccaattcaaaggcagagcgcgtagtagtgacatccgctcattccaaagtcagatttactgcgttccaaaaaagaaaaaaaaagggtcagatttactgagcttttgctttggagagaaggaaagcctcgagtttgttcatgttgtgccttgacaggattgcagttaatctgagaatccgtcggtcgtcttccttcctccgagtccgacgacgagagaagaagcaaattcgaggagagagcggagggaggctgtcctcctctttatttattgaaggaaagaggcagcagaagcactccctgcacgaccccactccctctccactccaccacctcctcctcctccactccccacctcgccgccgcaagcgcccggccgccaccaccaccgccgccgccctcttcgtctctctatcttcaatcttcgcctaccttgtctcctccattcttcaaccttggcttccttccatttcggcgccactattctttctttttcttttcttttcctttcttttctgagtcgctgtgttggaagccagccttggaggcattcatgagcgcccgacgaccagctccatgatgaccggaggccgccgatggaatggcagatcccgtcgatatcgacaaggtactctccctctccctctccctccctccctgcacccgccgctgcctccatctcttcgcgccttttaccacctttctttctcccccatcttataccttgcgtgctgctaaatgccggcaactatcattgattgctgcaaccaaagctctagcctttccttcgctccgacaatctctgtcgttgtagccttcttgctggtgttgttgtagattcaccgcggattattgaggaacacgcacttttgacttttaattcaatgccaacaatcacaacgtgggttgcatgaatgtagccaatgctgcccctgctctctcaaatgttggcctgcctatttgcatttggagatccttccagggttatgcttactgcaatgcccaattttgggaggggaaaaaaatctgttcttttatttttttaaaaaaaaacataaatggaaggggaaattgggaacgaacaaaagaaaggtttgtcaagttccactccacatacttcgaaattttcgatgtgcaattgcaaaccgccgattgagctgtgctgaattcaattattagtcggatggaggattgttactttcactggagaatgctgtggcttatcgagtttgaggcttttttttttgtttaccgaaagagtttcaggccttgttccccctgctcgaattatcttgtgctatgcacagatatagaaaggaggagaagctggtgcattagattagtttctatatatcaagttgaattgatgcttatcgtttctagttgccattcctttcttttttatgggatcctattcttatggggtctctgatgttttgattttactcttattactccttttttttaaaaaaaaaatcgttactctctctggataatgaaaacgacagaatccctgccttcttgctaaaaagaatcatgaagttgaatttcagggtcttgtttacctacttggttcagtgcttaagataaataatgtgtgccatttgtgtgagagacatacaactagtgatgaactcagttttgtcttcttctttttttttgttaggagttagcactatctcacaaatctcatcatttaaagcatcactatctgggcaggttgtgtgattgtgtcctagaaatcttgacgatcaggaaaaagattttgagtaatcttgattatatgtatatgactgcgatgtctgctttccttcagatagatcctactcttgttttggaatctggataactgggttcttggagctaaccaaaatatcaaaatcaaaattttaacaatgtcaaaatgcaatggagaaaacaaagggacaggcagacacttccattagttacttttgttttgagggaatagacaagaagacacttggaattttcccattagcattgatgctatcgaagttttaattgtcaattacatttccaagaaaatgttctaaactctagtgatctgttattgaagttttttgctaatgttttaccaatgttctgcaccagttactctgcttcataattctgttcgtcctaatgcatctggcaggcacttattgctttaaagaaaggcacccaactgcttaaatatggtcgcaaggggaagccaaaatttactcccttcagactatcaaatgtaagtttactgtcttgtgcaaccttttttgataaaggtgatctcaaagtacggttttgaattccacagttccagcctgaaatgtggatgggatttctttttttttaaaaaaaatatctaggtccatattatgttgtttatggtgctacttacccaagagtacaaccattggagcagaaaccacttaaattattgacagctagaaaatttatgacatattaatatgaaactgagagcaatgcaacttccatttgtagttattatatgtacttacgcaactttctttttcatgctccacaggatgaatcaacactaatttgggtctcaaataacaaagagaaaagtttgaagctatcatctgtgtctagagttctctcgggacaaagaacagtaaggacttactttttaactatatggcaatttgtttcatgcatttgatcttcaacctgtttcttttcagttggtttttcaacgttttctgctccctgagaaggaccatttatccttctcactcatatataatgatggcaagcggtctcttgatctggtattacaacaaggatcaattgaactttatttcttctctttcatttctgaatgaatttcatctaatgagccctaatcttgtttcaaagatctgcaaggataaagttgaggcagaagtatggtttgcaggccttaatgtattgatatctcctggacagcatggatcccaacaccaacacattgatggaatacgcaacggtgccctgtcttttgaggtaaactctcttcaacacagaccactttgtgaatatatcattgtttgagtcatgatttcacatcatcattacagcttttttttttaagaaaaaagaaaaatctttgggcagaacgctatcagtatttctagcaacctcagttcaaagtttctgtctgtacactgtgttcaactcttgggtcattatccaccacctatgctctagtagctagtacaagttattgttgttgacgaaattcccacatgcattgctagtagtaatacgcattatccatcatgttctgagaactagcctagcatctaggaacatctcatagaagcagaaccacagttttgattattctatccaattgagcttcttgtttgattaccaactttttgtttggtgcacttttggcctaagctatagggttacatgcatatttatattattgttttacctagttcattcaacatgttcttttactttatcttgttcattcaacatattttttatacatcatattatcttgtactgctgcttgtatgttaaataaccaataatgcattcctgtggtttattaactgtcaagaacatgctccatatctattttcaaccgaatgatctttcaattgttaatcccatgtaaaatagatgaacctcacagttacatcatggcatgctatgcttctgatttgttttttgtttaaattgcttacagtgtggcagagatagtagcctaagcagtagctctgcttatacaacggattcctttgagaataagttgagctcagcgaattctgccaaggatcgttcttcaggagaatttacatattcagaaaggacagatgtgtcagatatgcaagtgaaaggtgcttcttcagacattcgaatcagtgtttccagtgctctcagcacatccagccatggttctggagatgattctgaatcttttggagatgtttatgtatggggggaagtcatgtgtgacactacttgtaggcaaggatctgacagtaatgcttactctgctactgcagctactgatattcttgtaccgaagcccttagagtcaaatgtaatgcttgatgtcagttatgtggcttgtggtgtgaagcacgcggcactggttactcgacaggcagaggtatttacatggggagaagaatgcagtggccgtcttggtcatggggccggcacaagcatttttcaaccacgtcttgttgagtcattgtctatctgcaatgtcgaaacaattgcctgtggtgaattccatacttgtgctatcactgcaactggtgacctttacacctggggagatggtacccacaacgctggactccttggtcatggaagtaacgtgagccactggattccaaaaagagtttcaggtcctttggagggccttcaggtgtcagctgtttcttgtggcacatggcatactgctttgataaccagttctggaaaattgtacacgtttggtgatggcacatttggagtcttaggtcatggaaatagagaaactatttcatacccgaaagaagtggagtcattgaagggtttgaggacaatttctgtttcatgtggggtgtggcatactgctgctgttgttgaggttatcatggcacagtcaaatacttcatctggaaagctatttacatggggtgatggagataaatatcgccttgggcatggtgacaggtcttcaaaactgaaaccaacctgtgtgccttcattaatagattacaatttccataaggctgtgtgtggtcatactctaacaattggattgactacttcaggccatatatttactgctgggagctctgtgtatggacagcttggcaatcccaataatgatggaaggtatccacgcctagttgaagagaagcttggtggtggtggtgttgtggaagttgcgtgtggagcttatcatgttgcggtattgacacagagcggtgaagtctacacatggggtaagggtgcaaatggaagattgggtcatggtgatattgcagatcgtaagacacctacatttgttgaggctttaagggataggtctgtaaaacgcatcgcttgtggatcaggcttcacagctgcaatttgtcaacataaatcggtgtctgggatggagcagtctcagtgctcatcatgcagacagccatttgggttcacccgaaagaggcacaactgttataactgtggattagtacactgccattcctgcagttcaaaaaaggctctaagagcagcattgtcccctaatcctggaaagccatatcgcgtatgtgattcatgttacctgaaactaagtaaagttttggattctggaatcggtcataacaagaacaatacgcctcgcataccaggtgattccaaggctgataaaatggactcaaagggaaacagagttgcatccgctaatagctcagatatgatcaagaacttggatgtgaaggcagcaaagcagacaaagaagtatgactatccaccacagttccctgcgattttgcagctgaaggacatccctttcattggggctgctgaccagcaacctaatgactccacatatagttcacctttgttgaggctgccaaatctgaattcttctagttccttgtcctcagaaagctttgatattcttagagatgcaaatgaacttctgaagcaagaggttcaaaaactaaaagaagaggtattctatattctaattttttgtggtaataactaaaatatccggggaatgcgtccttatgcttatctattatgcaggttaacagcttgaggcagcaacgtgaacagcaagatgcagatttgcagaaatcagaggcaaaagctcatgaggccatgaccctggcctctgaagaagcatccaaatcgaaggctgcaaaggatgttattaaatcactaacagcacaggtgattttccgaatttattattgcacgtcttaatgttaaattggctctagctgcatattatctgccagtttcttcacttaccttatttttacttttatttttgcattgctcattcattgaaacaaaacgttggtaagcttaatttgtgacatggacagttaaaatggcactaatttcagttcttatcaacagcaaccttgtctcttatatgtgccttttgctccatgcacccacacgtgcttggaggtgcattcagcccctataaaatgattgcatattcagttgatatggatgtttctgctcatctcattgttgatcctagttgcaccttgctagtagtcatagatactaggggtgaataaaccaaggtaaacctgatttgttctttttctactgctactgcctagctgtgctttcttcagtggaacagtgacaactgtgcttgtagataattgcatatagataattatataaatcacatatagatagttgcatgttctggacttgttatatccccaactggataatatagaaattaaaaacactccccatttttgcagctaaaagaaatggctgaaaggcttcctccagcatcatgtgacacgaagcaaacacggcagccttatctacctggtggtgcagtttctcctgatacagggagagaaaaccaaaagagatatgagccaggcagcttccagtacccacaaacacctacttctgttgcatcggcccggtttaatgggttccttgctcaagcccatcaaataagtgaacccaatggtaacacgatggttccacatgacagcaggcatgaaaacaatggcaacactaaggagttcccagttgcgcagcagatgaccaatggtgggatgacggggtatcgcccaagaacagaagatcatgatcggcgggaaacagaaaggttccaaataaacctccatggtttcaacatgagaggttctagctcacccagcaaccaagtcgaagctgaatggatagaacaatacgaaccaggggtatacttaacactagtttctcttcgtgatggaaccaaggagctgaaaagagtgcggttcaggtaaccaagattcgctactcctaaagaacatattttattttgttttctctaagctctaacttgtgaaatgcgtgccctgaataagagtagcctgacatggaggtcgaattgtttacagccggagaagatttggagagcatcaggcggaatcatggtggaatgacaaccgtgaaaaagtgtacgacaaatacaacgtgcggggaactgatcggatttcttcagtgatgacagcgtagtgtgataataccagctagaagctaaattctcaaactgattcagatctcagaagagatctttttttccctcgcctaaatgtatttgatgatgctctcttcctgactatcttctcctgtactattgttgtatagaaggaatcagaattgatgatgtgtcgtatgaatagggtaatacagtgcagtgaggttgctctgttgaccatgatacgaggctgtgtatgtctgtatgtatattcgtgggagttagtggacgagtcttgagcaaaagctccttcatttacatgaatgaaacggaatgctcttggaagtggacgatgggtttcttgatctcaaatgtgtgctaccatacgtctgaaatgagtatgaggaactgaaagattatcatgaaatgctgcttttgtctgaactctgaagcgccgaaatgtcggttctagttggtactaatgcactgcccaaggattccgtttgtggacgtgaatatcacaaagaagggaggaattcaattaagcaatggcaccacaataaatgtgtagatgcatttggtgttaattgcaagtgaagtttggcgtcgtggaaatgtaatctgataaggttggaatttgccttttagcaagagaggtcggcgaaagggtgacgcggctccatctcagactgatgagagcagctatacaagtatgcatgcgatgcgatgtcaattttcatcatccaaaacagaaaggcctatatatatgctcccgtaaagtagattatggatcaggtaaggatgacgacgcaagctcgattccttaattggatagatcctgcagctatatactagtagtagaactagattgattcataaagattggttatctgcagtgctggacttcaccgaaaattcgattctattcgatggctggtgatggaaggaacgcacctgctagtagcttgtttcactagcagagaaaactgagcttgactattgctgtgcatcagtcagccaagcaggcagcctaatggcaaggctcctttctctgaaatgaaatgaaatgcttgctcagtcgtcgttctctgtccacaccggtgcagaatgtccactggccgccggccaccgcactgatcttgtttgctggcaacgacgacgacagccgatcgaggtttcgaggagatgcatagcacagcagcaagcaagtcgtcctctccccaagaaatgaacccaaaggtgcagtgcaggttccatcccaacattccagggcaagcctgcctattctgccagtccagtcccctgactgccagcccagcagccaaaatgaactgaaccgtcggcacggcacggaaacattgagcaacagtcaatcgattggcctttttcttccttgtcatccatcgccgttggcactccatcctcgtgaaacatcgcctcacacctggcccccagaccgatcgacctatacgcagccaagcacaaagatttcactccaatcagcacaaagctcgtactactcctgcctagtagtgcctctacccatggtgaggtagaggcagactggaaatttaaagggaggaagtcccatcgatcgattggaactgatctgacaattactccagaaatccacactacctacccgactcatgacacgcacttgcacagtactggctgatagtattattcacttggaggcttgcattgcagcggcaggtcacgtcgtctcaaaaggaaataaagattgtggccatatactatcccgtccctgctgaattctcaccaattaaagacagtttttcactcaccaaatcactccaagctgcctggcacacaacactcgccaccacgatggtactacaaatcaaacacataaaaataattgaaggtacctgcattgcatttcatgacctatcagttgtcagttctactgctactgcaaatactctttggcaaccaaaacagcacgagtaatatttctttttccgattgcgggcagcatcgattgtagtacgacacacttgccctcgctgagggccactttgattcaaagtaaatttatagaaattttaaaggattttattcatatatgaatttttttctgtatacccctttgaatcaaaggaatggatcatatgaaatcctatgaaattcctatggaatatctcttctcatgtaaattttggaggaaatttaacatgagttagaacctcatggaaagaatactttgagtctttatctctccataaattcctatgtttttcctgtggcccaatcaaacaagcattcctatattttttctgtgttttacgatcctctgttttacacttgcattcatgttaaaatcctatgtttatcatattcctctgtttttttattcctgtgattcaagggggcactgaatagtgaatccgtcgtgtaaccgaagaaaatagagttgaccttatagtaggtactgacttgctctcatcataacacaaaagctagtactacgagtagtagtagcagctgtttcagactttcagcaccgagacgggatgttcaacaatgctcagcaggggtacgtcggtgaatccggtcaagaagggtttgtcctactcctaccgaaaaggtccctctggagctaatgatttcatttcgacaggaacaattcggcaacgtttttcttcttctcaagattgatcatgacgaatgcttgaatgcttgtttatagtactaccgatatttcattcttgattccactgtgtaattttaaccggtgtaccgatacaaagcaagcgaatgctgtacacagttaatccgaatggtgtacctgcaggttgaaacgcagggcccaaaaggtgtgcaggctgatcgaacagcacaacacagcagtacatggagtacatatcctgtttaggactagctgctcaccaatgaattccccacttttcaactgttcaacattctgttaggattccgcgtgcagtgcttacttcattcacgccatacttaattactctaattaattagtctactccttgcgataagctagcaccctttttatcctctccaggatcagattatccagattcttgcacacgcatgcttggtactactttctcattcttctgaatttttacctcacgttccagaccacacatctctctcgtcccatcaagctagccgccgtacgagtatggcgacttcaccctcaccttcgcctcctctctctgtagacttgcagcatatatatggcaccattgtcatcttgctcacgcatactctgcacttccccttccattccttcccaaaccagctcttgcaacctcatctgcatcagcctttcaaactgtgcagtcccaaactatcaaaaagatactatcatcaatcaatggctcagctgcgcagatgcatagccatcgcgctcctcttcctcctcgccgccacattcgtcgcaagctgcgtcgacggtgcaagaaccatgcaggcgagctacatcaacaggacgccttccacggcgccgacggcgatgatgaggtcggggaggctcttcggctacctgccgcgggccaagctgatcccgccgtccggcccgtcggagcggcacaacgccattggaccggagaatggtgatggggatgagctgatcagcaagccatgatggcagagactcaaggtaacctagccacttgtggagaacgtggtcatgatcagagtctgtcatatgatagtaagtaactagctagcagcatgtatgtatgtatgtattggcctgtcagacatatggtttttgcatgtctctgtcattaacatttttctcttttggggttctaactatacattcctcggtccacaactctaacagttgaggtttcagttactattatgtcatctttactttgctttgcttctttggttaaaggaaaagggaaagtgcttatgcgtcatccttgttttgcctactatgtatatttatcattagctgaatgataatgtcagtcccagagaaagggcaaagggaagcaccagttctgatttctgaaggtctggtgcagcaaaaatttggcagaatgattgttcaggcattttgtcatgttacaaccttcattcatattgctgccttactgtttggacctttgatttgatttcatcatatacaccaagcaaattgccatcccaagcacagtaaggccgtatactaaacagtttattcaagaaattgtcaatgaaccaccagtatcaaatctatcctggctctttcattctttttagctacttcgttcatcagcttatttgctccacgtctctaaaagtatgttatcttggcgaaaaaaaaaatccttctactccattgcttaaaccattgttctaaacaatttattgactttattttctaaaatatctaatctaccccataaatgagtagataatcatgtcaataatccaatgaaggagcttgggagatatggaacgaaagaaatcgcagaaccttccaacaaaaggagcttttagctacctcccttttagccaagatcaaggaagagaccaaaactctgggccttagcaggagcgagaagtcttaatagctggctttctttcagttagctcggaccaaaggtcctagctcctttttttttttcctttcgctttgtaaagttctccttctatattcaatgaaattggcgcccgttgattcgttcaaaaaaaatccaatgaagaatccatttcaaacgagttattaaatactatctctatttttaatagaaaaatagatgacgctatgaacttttggacaccatttatttattcgttctatttaaaaaatttacgtaattgtcatttattttgttgtgagttgtttcatcgctaaaaattattttaatcatgatttatatcttaatacatttataaaaaaataaaataagagaaatagtcaaatatccaaaagtcaatggagttatttattaaaaaacggaagaagtaaaaacaatccgtgataggcgaggataacaaatttaaataagtgtacatgtgcgttactttgttttcgctagaaaaatatggacgtgcaaatggcggcaggcagggagcactgtagggtacatcagggctggcttttccttgcttgactagagaacagccagtactacaaggaaaacattaatactgtatactataggtgtactagggctacacaaatcaaacgagtggagataaagaggatgtgatgtatggttgtgaacttgtgaattgcgatggacggagaggagagatgcaggggggaggggtgaaaaagtgacgggtcacttgagaaatgacttgtggtaaggtagatgaagtatttatataatcacagcttgagcttgtagctgcagcagtgcagtgcccatcgtgcactgcactaccacagatcgagaagaagaggaaggaagccaagcccagcagcattcagatttcagaatttggatggtgcgtacaggtgcagggcgacaattgatcgtgcttgcatgtctccaaacctcgtacgatttccctttgtttaaagctactactactgccctgcctgatcaaatggcccatgccttgccgccttcttcaattcacccgatcgtgtgctaagcctcagtgaccttaaaatttttcaagtaaaatgaaccgtacaatgatcaaattcaggtgaatatattttattgtcatgttgaagtacattagaaaagttagagcttcccctgaaagagaaaaaaagaagagcttacttgacgttgtagtcaaatcaggagaaacaccgaggggttttccagctaacttcacaagatggtgggctagacgatctggattctaagcctcaccccttttaattatttgatattaggtcattccctaatattcgtgttgttgtagtcaagtcataagttatgatttgggcgaatggatcatgcgagttttcgtccgatcgatttgtactgtaacaaccgaattagtacgacaaccaagcctgagatcctcggtcttaataaaccctgcaattcaggggctactatacaacggaatcctgttgggacagaatgataccggttaggtatcaggtcctgatacgatatttgcaaggtatcaggtgatacctataagatatcaggcgattcctaccatgtatcatgtgatacttgcgaagtatcaggtgaaacatgttaggtatcaggtgatttctcccgcgtatgaggtgatacttacgaagtatcaggtgaaacctgtcaggtaataggcgattcctaccacgtatcaggtgatacttgcaaagtatcagatgaaacatgtcaggtgtcaggcaattcctaccacgtatcacgtatcaggtgatacttgcgaagtatcaagtgaaacctgtcaggtatcaggcgattcctaccacgtatcaggagatacttgcgaagtatcaggtgaaatctgtcaggtatcaggcgattcctaccacatatcaggtgatacttgcgaagtatcaggtaatacctgtcaggtaaggcgattcctaccatatattaggtgacacttgcaaggtatcaggtgatattaaaagagcctctctctccctaatcctgccaaaatcagcctccgcaaaaaaagccccaacatatctcattaccaaggagttaactatgttccttctccactaactctgaaccctagaaaatcaaagacaatcccaactgctattggttatcactgatcggaatagcagccactgaataaatcgtaaacatgcacacaaaccctagaagaagaacctggagtgcactatgggaagaaaaaaatgaccacatgcgtcggcgccggcgctgtcgttgttgacgcaggattcgccgattccttcatccacgccagccttgtctttccttcccaagcctgccttagttttgtctgaaataaaaaaaaaatcccaaaaacaacagtgtcttaaataagatagatgcgaatcggtgcatagctggaaccaaaaatggtttcccgtcgagacggaataccggtaagtagcgtttccgattcggaaaggaaaataaacaactagtaacaaacaatgatgaactaccaaattgatgagagcagagcacgcgtatgtctagtctgtttggttgaaagttttgaaacataatggaagaactgcaagaaaagtagcaatagtaataccctaggctgttgccgttatcgctggcttaatctgcgagggcccggctagagggagacgagcaccaactgccggcgatgggcgatggcggcgtcggcggcggagggttccatccggatacgagaggccgagtcgcgacctttgtctgggcttggctcgtttaaagcccggcccgctaacagttacgtgggctatggtccagtaatattggcagcacgtacgttgccttactgttccggcccaacaactgtttagaccgaaatatatgtgggccgcaaagagttcgtccgggctttctcaactgtattggaccgaatgtctatttcggcgtaaatttacatgggcttcgcatctacaaccatcttggcccaaataaataacatatgaaatcgatggtgtattcctttccaaaaaaaaaaaaaaaaaacgggaagactaaatggctgtcgaatgttttttcatagctaaatcattcatgttcaatatatttagaatctttgtttcatgcattatagaaaaatgtttcattaggtaatttgattgtatttcagtttttaaaaagattgaaactttttcgatctacttggtgaaacattttcggtctacttggtgaaacagcgcccgattggtgtatgatggaagctaaaaaatcatgggaatcccatagactttttctcaatgtactcggatttgtttcatgtttcaatatatttagaagcgttatttcatacgttgtagtaaaatgttttcatggggtgatttgattgtattacagctttttaaaaagattgaaacattttcgatctattcagtgaaatattttcgatctactcggtgaaacactgtatgatggaagtctaaaaaatcatacgaatcctatatagataaccccaaaaacttcaaaagaaaaaaaagaaaaagaagtcgaggaggagacattggtccttcaaattcacggatgaaccggatcggtcagagatttcagcgaatggacagcaacagtttcgctcgatcgattcgtcaacaaccaaacatgcataatttatgcgaccacaagtagcggagcggaccacgccggtttgtctacctgatcattccaatcggatcgctgcagatcagaggagaaatccgatcgatatcgaactatccaattcgctgatcatgttgtatgatctgagccatccaagttctcattaattttccgactctccccatcccgtgccagcaccacctacctatcccaattccaaaccgatactgttcatacatacattcgctgcaatagtccacccgttttttttttcaatgcgtgtcagatttgcaaaatccagctttgattcaacatgtctgcataccagaacaaaagtcgcatcggttctgaatatccttagattcaacagttctgaatgacagaacacaatttcatccttatacttccagggcacagcacagcacattgtatggccgatcgatcaatcttaatttacgcgcacgcaaacgtacgtgttgatgagcgttccactatatttcgttcaaaaaagcattccactatatttattagctaagccagtacaactgaacaagggaagcgatttagtcagagataagctatgtacgtgacgattagtttaactgataaaagtcagacagtcgcaagaagattaggagaagaacagtgcattcgtcggcgtcaacaccaccccatatcgcgttttcagtcaaaatcaagaaagatcaaaaggaaagttcacttctttctcgctgcaagaagacgatgtcggcactatgcatgcgtgctccatcttaataattaatcgcatgattttagacttaattggtgaacccattcttctacttgcttatcagttatcacgtggtgtagaatacggattctctatatcatcctaatgttcttgttagatactccaatattcagttagcacaaatttaaattctctctgaatatcactgcacatttcttggaacgatctggaaaacgattgttgaacttgttgaagatatatacatgaatcacttgcagacaaacacagtggtaagcgaatgttagtcttggtcagattcgtaagcaaacaagtagcaaataccggtgaaatttctatggcgcaactagtcaaatggaagaaacaaaagttcttctcataggatgcttaattagctaatactagtaaccattgccatcacatcgatcgatgaagtatcaataggattacatctagccatgcatctaccgatctacgtgtatagtctcctcgttgctccaaaatttctatcattttcccgtttgtcttagcgtgtactcacgttcgggcggtttgacagagacagcgacctcacgcagcatttcgtctcattctcgatcgcaagtcaaattcacaggattaatcaaccaaaactagcaacttagcgaccattagttaagtgattagccgcagattaattgcaaatccagcactgtacacctcagaccgaggcctaccgtttaccaaagttttggcctttctcatgtcctcatcactagtctttaccctggatttctctttggaatgcatcatgtcctgttcatttgacgctattctttctctgaattttgctcctaacgtttcagctagccgcatacatggacgtaaattaaagtatcgcattcaattcagatgaaaatgaataacaacttaacaagagtctgattattcactaaaaacagtgtgctgaaggcctaaaacatcgccttaatcaagcgttacagatgacaagccgccatcatccgtatcgaataattataattatattccataaactgccccgtgataatgaaatgatctatagtttgggtcagatcagacagatctggagtcggtagaggagattataatctatcagttcagttcacctagagcaagaaaacaatgagcacactgtatcagaaaaaagaagaaacaacaaacaaatgcttagtcttttacttgccacatgcaaaccttccttaattccaagtccaactgtacttgtaaacaattggagggatgagctgcataattaacaagtgtggtcaaagatgccctgctggtcattagaggtcgcctaggcaaatttctcgtttatatctgcctagtaattcacctagacaaatcttacgtctccaacaagaggtgcaggccaaaacattgagaaatccactgtaaattaagcaaattaagtaatagaggagcagcggcctcctaggcgttggagacctcacgtcactggccatttttctctcgataatccaattgttttatctcacctcgtcaactcttttctgcttcatctcactcgcttcacctctagcatcgcgcgcgcacgaactgaaacaaacttatcttataatttggtgcaagctagtttttttttaatttaaaagggtatcatgcaatgctcgtggcctattatgtgcagtactataatcttgatattattcacgaatggagatcttcatctcatttactacaaaagcactatctgcttaggcaaatcacttggatcgaagataatgtttgattttttttcttgttttctgaagattttatttacaaaatcaaccaacaaaatattttcaagttactataaatatttttgacaatgatatgataactccaatatatgtctatggcaatacgatacttcgttatggcatggctagtcaacaacagtggcctggacaaaggatttattagtattgaaaatgaggcatgaggagtgttttttttttacaaaaacaagaaaaagattctgaaaataaaaaaaaatcagttagtgctattactccctccggtttcattttaattgacgctttggacaatgacacgttctacaagatatacatttgagcttattttttattataatatatacaataaataaatgcatgtttatttttattatagtgttttgaaagacaaatctatatatgtttttctagtttctttaaactaaatatttttaaagttattgatggttaaagttataaaagtttaacctcaatcttatccaaaacgataattagtatagaaccagagggagggagtaaagaaaaagtttggggcggtgacaagagagaatcaagttgtaagattaatcaactgaggcgtcaccttcatggaaggctagcaacaaccaaagagctagctagctaccttgaccgaccgaattctttaatattcgggcagctcatgctcgtgctctcgctcatgcgtgtggactttgaatccatccacctcatcctcctcccgcgtactccataaaactactcggattcgatctcttcctccagtactccccatctcccatccaccattgctgccatctccaccacatacaatacaacaactactactcagctcaccatcaccggagcaagagccaagaagacgacgacgacgacgagctagcagcagcattgcaaccgacggcaatggaggagcagcagcaggtggaggtggaggtggaggtgccgtcctacttcgtgtgccccatctcgctgcagatcatgcgcgacccggtgacgctccccaccggcatcacctacgaccgcgacggcatcgagcgatggctcctcaccgccggcacctgcccgctcaccaagcagcccgtgccgcccgactgcgaccccacgcccaaccacaccctgcgccgcctcatccagtcgtggtgcgccctccacgccgaccatggcgtcgacctcgtccccacccccaagccccccgccgaccgcgcccgcgtcgccgacctcgtctcccgcctccgcgccgccacgagctccgctgccctcctcgacgcgctgcgcgagctcagggacgttgccgccgagagcgagcgtaacaggaagctcctcgccgccgtccccggcgcggtggatgttctggccgccgtcgtcgtcgcgtcgtgtcgagacgccaaggccgcgtgcgacgaggccctcgagatcgtctgctcgctggagctctcggagcggtgcctggcgcggctcgtcgagaggaacgaggagctcgtcgacgcgctcgtcgccacgctgcagcggacgaacaccacgtcccgggcgcacgcggcgctgctcctggaggccgtgacggcggtcatgccgtcgaacaggctggtgtccctcccggaggaggtgttcggtgaggcggtgcagctgctccgcgacagggtatcgagcccggcgacgagggcggcgctgcacgtgctggtcggcacgacgtcgtggggccgcaaccgcgtgaaggcggtggacgccggcgcggtggcggtgctggtcgacatgctcctggacgggccagtcgagcggcgcgggtgcgagctggccctggcggcgctggaccggatgtgcgggtgcgcggaggggcgggcggcgctggtgtcgcacggcgcgggcgtggcggtggtggggaggaaggtgctgagggtgtcggaggtggcgagcgagaaggcggtgcgggtgctgcggtcggtggcgaggcacgcggcgacggcggcggtggtgcaggagatggggcagacgggggcggtggagaagctgtgcgtggtggcgcagtcggagcagtgcggggagaggacgcgggagcgggcgcgggagacgctgcggctgcacgccagagcgtggaggaactcgccctgcttgcagcctcacctccaggccctctacccttcttgctgatcgaattctgattcatgatcaccggcctcatcactagctagctaccaacatacagcacagagagaattgaacacttgttcgattcttcctttcgctcgattaattttattgagttgagatcgttcgatgtagtcctatgaatcaaagtgtacagatcgacgcaatagatgaactaaatcatgcgcgagctttttttgtttgggtctcgaaatatctccttataatcgtctactgtcaaattattcttaatttcgatcttggaagctgagttctgtacataaaatttagaactatatatagctagtttttccaccatcatcgatcgatcatagacgaccagagtgctggtcaattgacatgcagaaacgcccagaggtctttcagctagctacataaggtggtgggctagccgacctggattaaagtctcgctccttttatttatttgatataaggttattttttaatattcgtattttttttctagtaaatcgacatgcaataatgtttttgtacatcggagattcattcatcgagagctagatcgatcgatcgatcgatcgatgaggataatccagccctgtccgtctgggccttgaactcgcggaacacactgcttgtcctcctccgtgaagcactcaagcatgcaggcatctgcatccatttggtccaccttcatgtcgaggaacaatctcataaatgtaggccaaacgggaaacttaagcccatgaagggcccagtacttctaatctcgagggccatcttaggcttggcatcatttcggcacacagcatttgggcctagtggtactgtcccatgcagccaacatcgaagaaagtctactattcatctcaaatgatggtacacgttttatttgcgtctctcaaccataaaatcaggtacaaagcgtcccttaaattctaaaatcagtacaaatcaagttccttgacgctattaaggacggtttcaactgacgtgacgcctataggacggttctatagtttcgtgggccctaggcgaactcaatgatatgggccttttaggctacttgtgttttggagagaaattactaaatatttttctatatcttaggtggtgttcttttctcctgaagatgaagataaagattaagttttttttatgtaaaacgaggtgttattaacgtataattgattgagttttaattattacaaacttggaaaatagagtaatatgatattttagaacaactttcatatagaaagtttttgcacaaaacgcaccgtttagcagtttgaaaagcgtgctacgaaaatctttatctttatccaactcttgttggagaaatgaacgggaagtgtgatgtacataaaatagttgtttgcatcattccgatagatacgattttcgtgagatcatcgttgataggagagaggaaggaggaaaaagagaaagaaaatgaagcgtacgtaggggaattgaagaaaaaaaaaagagattcaatttggttctggatccgcccctgcgtttgagttaagcacacgtatattactgtatatatttcgtgttgcacgtgtattggcttattagtttggttttccttagttggttaatttgacttaggggtgcggcatgcatatgtttatgcagcattcatggattgatatattctgttggcttgagctaattacatgcagcaaattaatcgtgacatcttcatgttaatcgtacatattggtagatagcttctactggtcgatagtagtctggcagcccaacatgtattatgtatacgtatatgtatatacattatacatcgagtgatctatctagtatagccacaagtgcaagcatatttctcttttttggttgattagcttgctgccgctctgccgtattagttaagcatataaatatacggtcgaataaacggcctacggatggccccctccttaccttctagcctgagccctagtcggtcgcatcacctgtctaggtgcctaagtcagcgctacctatgcggcttgttgacttagtctttatcccatataacttttaggtggcacatattagaagtaataataataaaaataataataaaagatagatcataaaagggactcacgtatcacatggtgccagtagaaaaatactaaaataaaatatgttgggcccacatgtcagtgggtgtctgtaaaaaaaaacactacacattagcaagggcttctatgattacagccaggtcatactaattgtggtactagtgctagctgagtatgttgaatttcaatgaagaggacatggcccctaaggagtcactatggattctcgataagtcactatgggcgctcgatgagcgctagtgcgagcaccacaaggttgcatgagacatcagcaacaagaggttgtgcttcaatgtcatcaagcaaagcatgcgtcacagctacgagttccaacaacccttcctaagctaggcataatctcttcggcagaggttgacatcgcatcccacaacctcgcatctttgacggcgagaagcactaaggcgggtctgtcgatgtggtcatgtgcaacgacctcccggtaaagttgattggcatgtcaactctcttaggacgaacaagttggtgtcattgtcggtgtagtagctcgtgtactgtgacacaaggagccatgcaatggtgagtagagagcgtcaactctcttaggacgaacaagttggtgtcattgtcggtgcaacagttcgtggactgcaatacgaggagtgcaacgcaactaggagatcagtgcatttttctacatcgagaacaatggcggtttggcgttggatgactaccctacatagtaagcaggatttctactagaaggtcacgagccccgtcatcacaatcgacgtccatgtacgagtggttatatacaaggagatcaagttgaaggaggcgtggcatcccgacccgtcatagtggaagtcaatgttggaagtcaatgccaattggagtgctgatgcccaaggcccttcaagcactacttatgtgtccggcaaaaaatattggattatgagaaactcataacacaaacgatagagagatgacggttacatgttgatgaaactacaagtgcacgtgatcaattgcatgatcaggagcgaatccaacatgggtgtgctgggggcccatgccccctatcctggtggatttctatatccaaacatgcatgcgtcatcacgaaaaattagcgcgatgacggacgaaaacgcagacaaaaagatgtgacgatcggaaagttacgcatttttaaattagttaagatatagggtgtgctaaattgtatccatcgtcacatattaatcattatcccatgttatgtaaagctgggacaaagccttttataaataaataaatcatcatcgtatattaattcgtatgtacataatacaataagcctgtcagctgctcgtggaaatgatattatatgtagagataatctaagaaatgctatcgacaagcttccaaatccaagaaatgtcattgataagtgtgagttccaagaaataccatcatacaaacgattttctcctcgttgttagggttccgttcattccgcgtcgttaaatacactgttcatcctatactccctccattcaaaagtttaagacctatttctttttacaccaagaccaatgagtaattaattcaccatcatatgacgaaaccaatgaacatgcaaccaataagtactaaaatgacttcttgggctctttcaaaaaatttaatatagcacatagtgactaaatatgatttagatttttggaaaaacttttggacttaataacacggaatgtacgcaaccctaacggtgatggcatttttgggataaaatcatttctacgatggtatttcttagaactgacacttgtcgatggtatttcttgtatttggacgtttgtcaatagcatctttggattatctcttatatgtgtggatttgctaaacatgaaaaatcaatggcacaatctgaaggcccatgttgggcttgtcggcatgggccactgatagcatttggcccatccatcttctcattcagcagcatgcagcaacatcattactgttccctgttctgcattcctgcatgctgttttcaaaacaaacaaatgctccctccgtcctctaatattagagattttgatattttacttatactgtttgaccactcgtattattaaaaaaattacgcaaatataaaaaacgaaaagttgtgcttaaaatactttagataataaagtaagtcacaaataaaataaataataattttaaaatttttgaataagacgaatgataaaatatcaaaatttcttatattagagtacggaggaagtatatgggcttggctacagatcagagttgagaagccaactcattgcaaggaaaagaaaatggcacacctacagccctacggtattaagaatactttagctcatcatcatgtattggaagaggacatgtatgatagcagggcatggaccacatgcacacaagatccacggaacaaactgcaataatcctcgagcatcgacctagctgccccttgtttatgcatgctctcttttcttctcttctcatctcatatcgtagcaccacattgactagtaatagaatgcatagtatatactactgcataacgaaggaatatagtaatagtgggagtatatacttttctgaacttgcacagaattgttgtcggtgtttataaacaaccgaagtctctctcactctctctctaattttcaaaaaataagcttactgaagtttatattgcacatacttctctgaacttctgcagaaattctgtctgtatttatagctaactgaagtttactactggtatagtatagtatatacttctctgaacttctgtagaaacgctgtctgaatttatagcttgtttcctgagcaaatttttgcagacacagagacggtgtggagaatccggcaaatgcagacgaaaaaatatcaaaaactgaatagaaatatatgtgtagggccaaaagtgatactactaattaagtagtgccacttgacaaccacatgcatagagatgatctgaacgaagaggagttcgtggtgggcttattcaatttcaatctacctatctgtgccaattgttggttagctctcgtgttaggggctgtttggtttccagcgacttattacaagtccctgtcacatcggatgtttggacattaatttggagtattaaacatacactaattataaaacccattccataagtttggactaattcgcgagacgaatcttttgagtctaattacgccatgattttgacaatgtgatgctacagtaaatttttgataattatggattaattaggcttaaaaaaatcgtctcgcggattagctctcatttatgaaattagtttttttattagtctatgtttaatatcctaaattagcgtccaaacatccgatgtgacatgggctaaaaagttttagccccatctaaacacccccttagactgtcagcataagaatatacttcctccgtttcacaatgtaagactttctagcattgcccacattcatttagatgttaatgaatctagacatatactttctagcattgcccacattcatttagatgttaatgaatctagacatatatatgtgtttagatttattaacatctatatgtatgtgaaaaatgctagaaagtcttccattgtgaaacggagggagtactatatatcagcatcagcatgacagcatgggaatataatggaatctcagctgttaaactatgcttatctcatttggataactcacgacgccaccgtggcagatcttgctaccagccagctgcttgctctgacaataccaactttaatgatgattaataatgccgatctttcaaaaaagaaaaatcagtactagcttggttaattaatggcagtcctaatactaatacgatttgaacacatgcttatactgcagtgctaattggagtactccattgtcgtttacactccatatacgtgctggatccattgtcgtttgttccacgtacgcgtacgacatgacacattttgtctgtgttcttcttcgtgggtcagataatgctcgcgtgtttcgtcttatgattgattgtcacatacaagtagcttatgcatcgatcgatcacactatcagcttgcagccgcactccaattgatcaattagccgattggttgacgttgattgattgatcagactggctaaatcctgtgcaaactttatgggtaattagtcactgaacctatgtcctcctagtcctagctagctaatcaattcgatcagtggctgacgatgaacagagatgagggagaggagaggagatgagtgtcggtggagcggcccgggcgtcaggacaccgacgacgcatatgcagtgcagcagatgctggccactggccagtggggacgacgaacagactggactaacgtacttgcggctcattcactccacccttaaattcatttcacccgacaaattaatcagagtctatggctttgcttaattactcctagatataatcaagtacgcactcacccgatccatgcagctttctttgacgagaccgactcttaattggttttgggggcacgttatagcaggtccaatagcatgctataagccagctgcaaacatattttaaggagataaataagaagagagaagagcagcgggctacagatttgtagccagctgtagcacgaactccaagacgcagtgtgtgtatgataggtgagaccagatattaatagtgtagtatataactattgtattaatgagctattatattggttataaatgaattggagctagtagttggctatactattgaacttgctcttactgattccggctgttctgaagactgatgagactgagagagagctggctgtaatcaagaacatttcagtgcaatgttagtaactgaccggaggtgtttcttcagctagctcgtacatccagcaagctgcgagctggctagcatgcgtgcttctgttgaaattttgctactagctagctcagatcttctagttaaactcatcgtactgataaacaattcaaggcgcggcgaagaaaatggaaggcaggccagttgtctcgttgtaagttcaacttcagtggcgtcaaccgtcaagtccgaaactctgaaagttaacttctgaatgcagattcatgcatgccatttactgaattgctacttcatacgccgagattactaaagaacttgatcacacagtgtcacactataaacatatactccaccaattaattcaggtggatctgcttgcatgagcagcatctgtttcctgttactttcacagcaaggagcttcatacgtactgtacgtacctgcagatatatagacagacaggtttcagtttcactggagatagcctgcatggtcagcgtaatcctagtacaaccgatccatctgattcggcaccccatgcatgtgttcttggagtgtagatgcaaattgctcaacagctagctacctagctagctgtattagcgtcttcctggaggcaaatctgcacactggattggaatatttgatcagtaacatgcatagaagcacatagggagagtattaacaatttagtaattgacatgagctagcagcaatatgctgtacaagtgcacaaatccagacaagtggagtacaattgtagcatagcagaatagataaatgggataactgaagcatgagcatgtgctagttcttttgactgtatatatgtatccatagtgcagtagtatggatacatgttgctttctctctttgacattttgcccggtagctgctcgacaacagattaacgctctccattcctcccttttctgcaacacaaagtcacaaagacatgcaagcgtgcctatctttgtcttttgcacaccgactgtatgagcgaacaattattcttttaactgtatatctttttctacctatctagtatttatctactactatgcatgatgatttctgcaccttcagaaaattcagactactcaaggattaacactttcatcttcagagaaattaaagaaatttgcagagaggctggtatgtttttcttttatgcattgcccagcagcagcaggaacatcatatattatacaattcccaggcagttttcagagaaaaggccggtgctgaagaacagaatcattgctccacatggtccttctccttccttggtagactgaatgctaatctgtcaagacaaggacacaaaaaacataagacacaggaaagcaaaaaactgcatgcatgctttgattgagtgatgaaaggaaggaaggaacatgcatggccatcactaccactaccagactaggactgctactatgtccatcactaaaagcctcaaaccccagccggtagtgaacaaagtgcaaacaagaacaaaaagtaaaccggaagcttcactgcaatgtggacttcagctccttgataagttggtatatactgtagctggtaatgccaaattttgtactgatgcaatgcactagtaaaaactgtctatttggagtaccaggttggtagatgagtgggttaggctacatacatttgtgaaaggagagaagcatatttagccgaataatcgtgcaaatagcaaaaactgaaccaaaaacatgtatatatgcagagatagcgaaaaccaatatgtatatggcactagaaatgaatgcaaattgttactctatagggggagggacaagaaggagatgatgccactttattaaggtggagtacatagctgtggaacattcagagccgcgagacgtgagatgtttgtcatcacgcacaatgtatgaagcacgatgaattgcaaacatcatcgacctagctacagtattggcgcaattagagcaaccataatagtaaagtaaggtactatctataaaacatgtacatctcaataatagactagattaatagtaaaccactttaatggtatgtctacatgagtatctatagctctctaatccattgcctcgtttttctctatagactatcttcagattagtagatagctttgctctttctcttcatttaatctctttcaagtagaaaaatacgctgacatagatcttttgtagagagcctataaataaccattgcgggtgcccttagcatgcacgatgcaatgtaattacaatcgtttaattaatctgtgggggaatcgaagaaacatggatgttgatgcgattaatatacttggtgctagctgttcccacgaaccgtaggtaattgcaccattccaagtataaacttggcgtttctttcttcgatgatgccatcaccactttcccaatatttgaccggctggcatgcacgcggtgtataattagaggagatttatactcctatctcacataagaggcaacaattaaatcaaggatttgatgccatggaattgaattgaatgagcataaaaaatatatatctgattcgatcgatattaggagtacaatatatatttactgttcctccgaaaagagaaagagagaaagatagtactactacagtgttgttgataaccgttggttggttggtccagacaagttaggaaggaaggggggaaatataatgtgggggagccaatcccggcgagtttccgggtgtcctctgttacacccgcaattccatcgatcaacaacaccacactgggggggtgtaaacctttgcattttattttcttttagtatttatttattgtcccaggctgccacgcgcattggcatgctacatcaagacttgcactgtaagttgcaattaatcacctggctggaaggaagaaaacaaaagatcatgatgtgaatattcacatgggagataagatagagaaaaacaaattcaaatgtaaagaaaacaagacaaaccaaaaaacacttcaattggcaagtttagttcaagtcctaaactttatacgagtgctcttattttttaattagtagacgacgcatccgtatttatgattaattattattttagtggtaggtgacgtaccattgaacaacgagatattcgtgatgacttcgttgatacgaagatataaatagagagtgtgtggacgcgttgtgagccccgtgtttgtactatgttactaataaaagcactaaaccctctttgattttgtaagcctttttttgtcattttttcttgaaagtacccctcttatattattgttgtttttaatacataatatatgatgtatttgatattttttaacaaatatttgaccatccgtcttattttttttcacatataaaaacataagtagtgtttaaagatcatttgactataaatcaaatcacaataaaataaaaatgagtattacataattacttttaataatgcgattggtgaaacgtatctaaaatatcaacatcgacatatataaaacacatggaatattgtagtagattttgttggttatttgaagtggtaatatgattccactattaaacttagatttaaaaacttagcaaagtttgataggcacgtcggtgctttaggagttggatctggagtggagttgtggtgttgtctatacccagtttcacctcctctagtacattttgtgagagagctttgtccagctccgcttctatgttagatggtgttgaaattgtttaactgagcccgagctcaagaagagatggagttgagctgaagttgtaccaaatataccctcgtaaaagcaccaacgtataaaagccaaaagataagcctaagctaaaacaaggagcaatctaatcttatcactgctaagattttttcttaaaaatggaaatcattaattaactaaaaatatattttttataaaactgaacaagtaaaacaaaaagaaaaagcaaaaagtaaaaagaagagcgacccagcaaccagcattcattcctccgccacaacaccacgctgaccacagtccaccgtccgtccgtcacccgctccccctgctgcgccggaaacaatgaaatcgccttcttttgtcccaaactcttcttctcctctcttccccccaaacacaactgaacccaacccaacaaaccaccaccacgctgaccgccctcaccggcgagccagcgagcgacggaaggaggccgcatgcttccacaactacaacctcctcctcctcctcctcccgtctccaatgccctccgcctccactagatggccgccctcttcctcctcctcctcctccacgtatcagacgccgccatcaacccgggcgacctgtccgtgctccacgacctgcgccgctcgctgaccaacgccgacgccgtcctcggctggggcgaccccaacgccgccgacccgtgcgccgcatggccgcacatctcctgcgaccgcgccggccgcgtcaacaacatcgacctcaagaacgccggcctcgccgggacgctcccctccaccttcgccgcgctcgacgcgctccaggacctcagcctccagaacaacaacctctccggcgacctcccgtccttccgcggcatggcctccctccgccacgccttcctcaacaacaactccttccgctccatccccgccgacttcttcagcggcctcacctccctcctcgtcatctccctcgaccagaacccgctcaacgtctcctccggggggtggacgatccccgccgacgtcgccgccgcgcagcagctgcagagcctcagcctcaacggatgcaacctcaccggcgccatcccggacttcctcggcgccatgaacagcctccaggagctcaagctcgcctacaacgccctctccggacccatcccctccaccttcaacgcctccgggttgcagacgctctggctcaacaaccagcacggcgtccccaagctctccggcacgctcgacctcatcgccaccatgcccaacctcgaacaggcatggctccacggcaacgacttctccggccccatcccggactccatcgccgactgcaagcgcctctccgacctctgcctcaacagcaaccagctcgtcggcctcgtcccaccggcgctcgagtccatggccggcctcaagtccgttcagctcgacaacaacaatctcttgggccccgtcccggcgatcaaggcgcccaagtacacctactcacagaacgggttctgcgccgacaagccgggggtcgcctgctcgcctcaggtgatggcattgcttcacttcctcgccgaggtcgattaccccaagaggctggtagctagttggtccgggaacaattcctgcgtggattggctgggaattagctgcgttgcagggaatgtgacgatgctcaatttgccggagtatggactcaatggcacaatcagcgacagtcttgggaatctgagtgaactctcggacatcaacctcatcggaaataaccttactgggcatgtgccggatagcctcacaagcctcaggttgctgcagaagctggacctgtccgggaacgacctgaccgggccgctgcccaccttcagcccgagtgtgaaggtgaatgtgaccggcaatctcaacttcaatgggacggcaccaggatcagcgccatccaaggatactcctgggtcttcgtcgtccagggcgccaaccttgcctggccagggcgtccttccggaaaataagaagaaaagatcagctgttgtgttggccaccaccatcccggttgcagtcagtgtggtggctctggcttcagtgtgtgccgtgctcatcttccgtaagaaaaggggatcagttccaccaaatgcagcttccgtcgtcgtccacccccgcgagaattctgacccagacaacttggtcaagattgtcatggtgaacaatgatggcaacagtagttcgacccaaggcaatacacttagcgggagcagcagccgcgctagtgatgttcacatgatcgatacgggcaatttcgtgattgctgtgcaggtcctccgtggcgcaaccaagaactttacccaggacaatgtgcttggccgtgggggctttggtgtcgtctacaagggtgagctgcatgacggcacgatgattgctgtgaagaggatggaggctgcagtgatcagcaacaaggccttggatgagttccaagccgagattaccattctaaccaaggtacggcaccgcaacctggtctcgatactgggttactcaattgaagggaatgagaggctgctggtctatgagtacatgtccaacggggctttgagcaagcatctgttccagtggaagcagtttgaattagaacccctctcatggaagaagaggctcaatattgcactggatgttgctcgtgggatggaatatctgcacaacctggcacatcagtgctacatccatagggatctcaagtcagcaaacattctcctcggcgacgatttccgagcaaaggtatcagactttgggctagttaaacatgcaccagatggaaacttctctgtggcaaccagactcgctggaacttttgggtacttggctcctgaatatgctggtaagaatcgctttctctggaagtatatggttgttgtgttaatttggatgcttaaattgtactagttctctttgttatgtgttacagcaattatcgttaacagatgacacatgaattagatttgaatctagttatattgtctacctgtcccagtgactaagggtcattccactgttgtagcccatgaaaatgcctttgaggagttaaggatgtgctagatacaactgaattcctgatgaactaatcattcttaaaaaaaacttgtcactactagcttgcaatacactacatctcgaaccacttgacgagatggtatcattgtttctcttccatggaactgtgagaacaaatgtgtgatatcatttgatggaggttgcattagtatttgtcctttccctgtttgttatgctgccttgctattatgactcctgaatttatggttgataagttgctttaatgaccattgcagtgactgggaaaatcacgacaaaagcagatgtcttcagctttggggtagtgctgatggagctgataactggaatgactgccattgatgagagccgtctggaggaggaaacccgttatctggcctcatggttctgtcagataaggaaggatgaagataggctcagagcagccattgatcctactctggatcaatctgatgagacttttgagagcatctccgtgatcgcagagcttgctggccactgcacatcccgggaacccacccagcgaccggacatgggccacgccgtgaacgtgctcgtcccgatggtagagaaatggaagcctgtgaacgacgagaccgaggactacatgggcattgatctgcaccagccgttgctccagatggtgaagggctggcaggacgcagaggccagcatgacagatggaagcatcctgagccttgaggacagcaagggcagcatcccagctcggcctgccgggtttgcagaatcgttcacctcggctgatggccggtgaagcatcatatatctacaatacaaataagtacatgtctcctctggacctctcctgtttccctatagtgttcttgtaggtaaaagagtgcattgtccatgtgcttatgcttctgtagatagacatccatttttctttcttttcttttttggtaggattgctttcctattattccaatcttgagactgaagtttctgcctttttctagtcatcggggtcatataatgcttctttagtttactgtacttgaaaatttttgcaatggcatctggtggcatcaatgatccatatcatgagtcttgtactgtttagggagcaattagtaccaatccaggcttgcatttggcacttttctgaaactctacacaggttgcatcatgccttgataattatcaatgttctatatgatctaagcagatgctagattatctaacaattactagagcacaggtaaaatggtgagcttgcagagataggccaaagtgtgagcttcctcctgaattttgtttgcagttgcagcatgctagtactattcattttcttagtggttgtgctccactgatttggtgatctggtaacgccaatagagtctgtacaaatgtagaattggtgtaaaactagtgatggttagtgtggttagttgtgacacctaaaccctgtgttctctagatttttggcttgacaatgactgcaaagactccatcgagataatgggtgtcattctttcttgaggactcaccgttgatatcaatcgatttgttgtttaatgatgtgtcgctatggccagctagcatgcattaactttgtggccgacggagtagatgtgtcggtgtttgagtgaggttactacatctgtatacatacatgatacatggcttcttgcttcattgcttgattgtatctactgtacgggcatatcattgcaaaattttcgtcgcagtatggggactacttactactatgcacaagtatatgctgtacacccatgtgtaattgttcagtacatcgtgagaaataaatagtacttatgtgggataatcttctgaagaattttttgaagaggaacttgttgctctatgtgatttggtatcggacagtccgtaatctgtgaccaagagctctcacgctcttgtcgtgagccggtgaatggccaccacggcctcatcacgggggtaaggtaggcagcacatctgcatcacgtagagaaggcctaggagcaaaatactcaaacgccaccggtacgattggcattacacgattgcttatccctttatcagcagctgcctgagctaaacttagtttctggtccaaaccaaagcaggtgtcaagtcactgctagctagtgcatacatacagacatgtaaagaagcgtctgtgtatgtagacgacactgcagaggaatagataacatgccatttccccaactcggtgttaataaaagaagcggtaaggacaagatcacaagagggggcaggcagatgagatggaataacacaagtgtgagcttgggcacgaggctttgcatgtgaagagcagcatgaacgccatgtggtggcacagggagttctcgcctgtgtcttctctactcctctttggggcagcagcggcagtggcacggcaattattgaagagcacagccccaccagctaggctgcttaactccctctctgcccggccattgccattggcattgccttccacatggaagatttgccacttgttccagacaagaatggcctcttgttccagccaagagaaaatggcgcccatttgcattttgcatcgccgttcaatctaggccggtcagatgaggtcgttgtgggggtgtgtgtgatgcatgggtccctgataatactccatctctggtcccagattgttcagttactccactcctactatgttagtactagtatccatgattaagcattgaagatacccaaataatccatcttcagggtgtaaatacaagtagtacaatactctacttttgtgttcagttcagttattctgtctaaacaccacagcagttaaatggttcacgaaagaaaaggggtggaagttagtaaggtactagtacactactactagcaggcatcaagcctgcgcaagttcatgagggaaaagaagcagacacacatgaaataaagcagttcatgagggactagtaaattcagtcgacttgctttcctcaccaatgctcgaggtcaacctttattggcatttaagaatccccacacttcatgctgctactggtactccaaatcttgtacaatcagagccacatctggaggtggaggagcaagcaatacatcttcctaaccacatttccttttctctataggggacaatatcatgacacagtacaaagcataaagggcagtttgtcctcgcacaacaaaagccacagcaaccttcatgccttgatatttgttgtcaaagaaactctctggtccttttctaagaattccatactgagaggatgttggaggtagaaatacggtacggagtaaagtaacaagataattattgtatcagtttgcacacttcgatccaatgttgggataataattgtcaggataatgccaagtattcaaagatactagcatccgttaattcatactaataaattattgtggatctatggcaacatgagagcgctctatataaagaacttcaggaaattcgttgcagctatgatgaagttgtagttgctggatctgactgtagatatggggcaaagtgtttcagggctgcctcatatactggttttttgaattcaactgcctgctcaatatgaaattatatcagatactacagaagcagggaatcagaaaaacattgagctggtaaacagacccaccttttcaataacttgctgaggtgtcatccatgtccattcacaaaactccggcctctcagatccgtcaccattaaggttaacctcatcttccttcccagtaaatctaaatagaaacctgtttatttgcacccatatgttcacaagttacttgtggatcacaaagacaagtgggtattatcctttttctattggcatttcaatggtgcacattgcattaacataatcaaaccatgtcttagaaagttgtgatcttgtgatttagtcaagtctatcctaggcctaaataacaagtatgagcccaggcccaacccctggcctaagtgaatgagtgtgaaagatgtaaagtgatggcataaatgggccacaatccttcataaatggttcacaagtcactttggaatcatgaagtgttgaagacatgtgagtaatagtttatagcttacagacacactattagtatttgaatgctgcgcatgggcattacacaaacatacttacctgacaaatttggtgggcttttcacttattaatgtctaggataggacaaaatgatatgtctgggcccaggcctatccttggcgtaaaagtaagagtgtgagatatgtgaagttgataccatacaaactaccagccaccaatttatatcagtaatttgagcttttaggacaggtatctactggaggctaccaaaattatcagattttatccagagatcacacagaaaacacttatataagagttacagccaatctatctgagggatcacgaaccataacaaacactgaactgaaggaccttttccacacttccactaagtatgggactatctagctgtctgagactgtatggtatgctacatatcatggacaaaaataaaaaagaagcttcctaccaaaggatgcaacacagaaacattggctcagcacaagtatgatcctttggagcgagtgtaaacggggtagatagatttggctgtccatctctcacagtttagtggctcttctgatttctgtacccagcccctctccaagaagctttctatttgaatttttgcccctgatagattgaagcttcctatttgaagctgtaagcactctagatagattgaaactttccaatgcgctacagctggagaactggacaatcacatgtgtgtgcacactgtgcaatacaagcgtgtcaagtgtaacatatactgatacacacacatatgggcgcagccaggaaaatatgattcattggcagctcaaggttcaatctatataaacattctaagagcactaggtttaaggtgctggcataggcttccgacaggtatagtatcatttctaggaaagtgaggtgtaacatgtatgctgcagctgtggcatagatgattttccacattttacatatactatttatagtagttatggtgcttataacttaatcaatatcatatttagcacgaaaatcgctaaaccggtacacttcgtggacaagacagtgtttctctagcacagagacttagaacaagagcaatctggcactctttagtcataactgtgagtttctgcctggcaattaccatactatcttaaccatatggctgtttatcagataattcttgtcagactattcttgcaggtctaaacagataccacacaaatgttggttactagcatcattgttggcccaaggaaatgagaaggctaaccatttctgagcctgtcctttccagttcgttcctccccacctagcattcagcttttctttcacatcaacagggaaatcatacgttaaccaaacggggacctacatgaacatatacatgcaactcagtcagcaaaactagttacgagactgattatgacaaacaagtatcataaacacgcagtattaggagagacgctgcaggtttgcaagcaattagcagccgtttgcgtgaaacagaagaagtttgggagtgggcgaaaggccaatagctgacctcagccaccatttctgcagatgtaacacccgtttcctccctcaattctctgaaagcagcttccctcggatcctctcccgcatcaataccaccctgtggcgaacatcgcacttgcggattaacactcaacaacctctcgagacaaaacataggagcagttgttcatcacctcacctgaggcatctgccatgtgttggcgatgtcgatcctggacgcggtgaaaatctggggacagaggagagagcacacggaaaaaattggtcagttgaagcaccgacgaagaggaggggttaggtcgcgggagtggagtcgggagcgccgcttgccttggtgagggaggggtcggcgaggcagatgccgacgttggtgcggtagttctccggcggcgtctccatggaggctacgacggcgagcggcgacgcggagcaggaggaggagagcgggcgggtgaggcggagcgcggaggaggggaggagacggcggcgagtagcggtggtgcggaatcggatagggctcacgaggattggggggaggcgtgcgacggacaccaccaccatcactccgccccgcggctatggatcgccggggaagaatctctctctccccgatttgccctgcagcttcgctgacaggtgggcccgtcaagagttgggccaggcccacactattttgccacgcgtttcggcctgcaggcctaacagggagacccgggccaatataccgtcgcctgagactttgtttttttctttttctttttgcgaaactttttttaaagggaactttttgcgaaactttgtttcttttacttcatccaatcaataatattttttgtttatgataatatttaatcaaattttcgtcatcaacaatttcttagtttaaaactaaaaatgatatatacatagacttatctcgaaagtgctatagtaatatcgtaaacttattagattttataaatgttaaaagtttgaatacatatttttttgtcctacatggcaaatactcttttaatcagaggaatatttgcctaattgctcgtgcgtgtgattcgtttctctccaagataggggatgatgcaagcatggagcaactaaggtttgagtcttaggcttacctcaaaaatcatgtataaattatcttaaatgataaatcaccatgtacttataatgaaaaataataattcattagttgagtcttaagctagccctggtatttagtctttggtaattttttggctctgtcattgtttaaaaaagaaaataaaatacactgattttttttaactggacccaaaccccgccgctaagcaagtacggagcactcaactgtgttgtgctcccgttttgcttggtactacctgtcaacttgccgctccaacctccaagaagtttccactgttgtgcttgtagcgaagctttaagcacggtcaaacggggcagccaaccaggtggtttaggttaggctccgttcaaacaatttgagaaatttcgtcgaagtattcggcgaaacttgtactgatctaattcggatactggactaaaattgtttcacacaaggaaagggaagggcaggtcggttcattccagaaaagacaagcaaaggggcttaaacagacaaatattgttgggccacactatcatacagtacgttgataggagtgacggcccattgttttatatcctggaggaaaagaaaggaaaaaggtagcccagcccagtcaaagggccccccataacttgctgcgacggccatatgaatccgtccgttatgatatcctttctcctgcgcgtactctctgcttggtttgtattgtctgttggagtccataaacgttttatcacatgtgcatctattttgccatgttttaacccgtttttaaggagtagcacggtaataaataaaatgaaatgaatgcctatttattctaattaaatctttggtagtacggtgtttaacttgcgtactgtacaattgtacatgtattgtcaggatctgctttattaatgttgctggaatttatagtaggatttgaccatagtaaattaatttggaggaattgttttccgattttagatatatatatagacacattgttccactggtctgtatagatagagaaaattaactaggatagggacggataaaaacagccggaatttaaaagtagagtatttacacgcttttttaaccttgtgcgggcatacataagcagaaataaaaaaaaagaatacatctaagctgctattgctacggaggaaggcggaaacggtccgtgtatatagccgccgccttcaacgcgtttatcacgccgaatccatggcggcttcacgtggaccgcggccatcatcatcaggctgcagctgcagggacccgacccgaaccgaaccgagccgagccgagcaggccagccaaacaacgagaacgcgaggcggtcttccgtttcaccgttggcgcacaggtgtcaccgccttggccgaccacgcctcgcgcgtacggaacggaaaccggcaggaaaaatctggtactcgcaaccgtggcggccacgccggcgattgcacccgcgggcaagtaagcgcgcgcctgacgtggcacgccgatcagccagtcaccgcgtgggaccacctcgcccctcactgccgcgtggggcctcaagtaccttggcctgccttggttcccaaggaaagcgaccacttcaggtccgcccgcaccgtcctccccaaattatcatccccacccctcaaccccaaaccgccttatctcccctctataaaacctccccctccgtcccccactccccagatttctttcacagattcacgaattccacccgtttcgattcgattcgattcgattcgatgcttgtgccctccgccccgggagagactcgccggaattcgattgcttcttgctggtagggggagccatgggagagctggcttcctcgccgccgcccgcggcggtgctgcccgtcgtcttcgtcgacggcgaccagaccgtcgacctcggcaccgtcaccgtccagccctccctcggcgtccgcaagctgcaggccgtcgtcgccgacagggtggggctcgcgccgcagcagatcctggcctcgctcgcgcgcccccgccgcgcgcgccgcgtgcccctcgaggaggggaccgacctcgccgccgccgtcgcgcgcgagggctccggctgctacgtcctcgccgccctccgccgctcccgccgcgagcgccgcggcggccgctcccgccgcgagaagaaggcggcggccgcggccgcggcggcgggggccgcgcccgctgcgccgacgcaggagaggactatcctcaagcgcctccccgcgatggatctggcctccctggcctcgaccccctcgccggcggcggcggccatgttcggcgtctgggactacgaggcgcagctccaggagctgcagcggcagcgcgagtggtacctcatgcacacggcggcggcggatccgtacttcccgctggcgccggagcgcgaggacccgcccttctggtcagcgcagccgctgctgcggcaggggacgccctcgtcgtgccccgagtgcgaggcggcggcggcgatgatgcgggagccggggttccactggtgcgtgcgcgacgcggtcaccgtcggattccgctcactggtggggccaatcgagcgcccggcgaagaaatccccctcgccgtcgccctcgccgcctcccctgccgccgacccccggccgactcccgccgtcgttcgtcgggatgatgcccgtttactagccgtcgattcgattagaagaaaaaagaaatgtaaaaaaaaaagaggagaaaaaactggaattggggaggcttgcgtgtggaattggtgcaccagcgcagaagaggagttttttttttttttttttttgttatggaggaggaagcggccaagtgcgaacgagtccagaggcgctggacacgttggagcctgcaactagcttagctgttacgaagaaattttcttttttttttcttggggtggttactgcttgctgctagtgctatgtgacaggtggtatgaggtggtacgagcctgaccaatgtggctcggtcgaatccagagatttggaccaacatctctggaaccctctgttttttcttttttagtttttctgagagagcgggagagagagagagagatgcctgctggatgattggcatttgttcctggtatatcaaagtggtatatgcagaacaacattttagtacctacttgagtatgtgctgaattttgtctccagatcagtttttcttccttttctgaattctgatgtgtgtggtggaaaccgtgaaagagctgtatcgaaacgaagaagggtgagagaaaaacgacgagttcaatcggttcccgcaacgaaaccaaccaacaaaccattcgagatttttgggtggtttttgggctggatgcgtgaatggaaaaaaggtggcgaaaattcatccacaagattggccgttccaagtcgtgttttctcgacgccggatattccatagtcctctcgcacgtacgcacgtacgctcgacgacgacgtgaagcgctgtcagctagtacgtatcatccaccacgtcatggatggagccctcaattccatggaaaaatattgctgctgctcctcctcctacatggaactcaattccatggaaaaatattgctgctcctcctcctcctacatggaacggatggataatcatccatctcgtccagccatggaagcagacgattggaggccaggggtacaggacagaggtacgcgtaacgctaaaacgtgcgattttaattgtggcgtgtgcgttaatactaatccattatttaaatgccaattaacactgtagccgccaatgtctcccccaaatttagggctggtttgatttgaggcttaaattaagcttaccaatattttgcaatttcaatagtatttagtgtctatttggtttgaaaccaaattttggcatgcctaagaaaaagactattttaatagtgaacttaggctattttggcttcaatccaaacacaactttaccttaccaaaattagtcataccaaaaattgtcaaaatctggaactgctaaaatttgaaatttggtaagacctatataggccacaaaccaaaccaacccttattgtcaacccgtctcttctctctcgcaaccaaccgaacaagccaatggcagctaccatagcatagcataggcaattaggcatatactagcacggtcatggtccaaaacaatgggcagctgctacttgtttcaggggaggggaacgtatcacgtaggagtatgcatgatcgatgagtgcctgaccgggtcttcgtggccattagcgacctaatcacacaattattagcgaaatcatgtgccatctgtcacgacctgctcctccaaccgtttcaaatatatggctctaatcgaatactactacatttgtcgagatcacggtacgtagagcggatgatgtgattctcctcccttcaggtgacaagtcaaactcgattcctggatttttcaacaacagtggatcaattgattaattaaacttcgtcgagttgttttttttttaacgctgcgataacgtcaatgataaacaaattcaacactgcagtacttttctcaaattccccacgctgttgttttggatcataccaaagacccggttattgctagcaggtcgattgatgttttttccagtatacaaaacagaagctgtcaaaaaccagtcaacctcgccaacaacgacctctagagctggaagcgtcgtacttatatttattatattatgttctgtaattttatatttcttgtttacacgtacttttgtggactgccaaaatctgctaggaatgtaccaatgcctgtctaaaaacgtttccagccatggttttttcaaacatacagagattgctggtatatctaaacaaacatttacaggagcaaaaatttatatacgtaggagaaaacaagagttgatggaagacagaaggtaaagggagttaatttcgtgtttttgattggaaaaaatcactcttattttcctttattacttcagggatgacgcatgaataaaatgtgtaattatatattgttataaatacatgcaacaaaaagaatgcaatttctctaattgggtagttgtgcttagagcaagtttaatactacagcccactaatagctccaattcaaatatagccaatctaatagtcaatttatacaatagttgtttgctatactattagtatatagtcccaactgtcatgctcttctctctcatcttttatctcattaaaatatgtttatagctggttaatagtttgctattatacctgctattataggaccaaactatcaaacgtggattgttgatagacaaaataatggatgcactcaagttgaggagttacctttctctttcttctcttcacccatatttgttcctccactttccttgaaaaaacaagatatttccctctacagaaatacccaatcacatcactctcacgcacacgcacacgcaccaattggtctctctttatgtatgtctcccattcacgtaggcgtgttatccaaacgataaagtttctaaaataaagggttatttgttatcaaatattttaaatactcaaaatacatagtatttaatttacatgattttttttctaaccttagactgctaaaatcctacgttttaagtaaatatcgagggttgtttttgaaagcagaaaacttactgtactttattagcagaaaacttattgttttttgaaagcagaaaacattactaacattgtgtttcataggtcctctgctataaagaagaatgaaaagttggtagagttgaagaagagcaatggacattagggtttttctgatcgttcttgaaacttttttagttttaaatgtaaaggctcgtaaaacttatttctaatttgattcttttagccatgccactacacgcggtagactaatattattgtttcgccaagcagctagatcggcgtggctaaaagattcggaaataagtttttttaggtttatttttaaaattagaaattgtaaaaagcttcaatatttttatattataagaaaaaaaagaaaaaaaatcacattaggggagaggaaatgcagaattgatccatgtgctactacctgcaaagtaccagtaccagtataggacccacccagcagcaagcaagcggtccatggctggactggactggacaatcccgcgtctggcggcccacgcgacagacacttgcacttgctctccgctgccgttccccttcccccctcttcactttccttcccagctgcgctaagcaatccccacccaccaccgctgcagctgcagttgcttcctctcctcccctctcttctcgccgtcggtggggtcctcctccaccctgtctctctcctcccccccagatccacccctcccccttcccgaaccttctggaaccatctggaggaggaagcaaccgcccaagctgtagcggcagcggcggccggcgggggaggagcgatggagacccttgcgcagcgcgcggcgttgctgcgggagtcgctgcagaagagccagtccgtgaccgacgccgtcgtctccatcctcggctccttcgacagccgcctctccgcgctcgacgccgccatgcgccccatccaggtacacctgctctctgctctgctcgctcctcgcccccccccctcctccctcctagggttcttcgccgtttgattccttctaggctgctgttctgatgccgctgcctctcctctgctgctgtgtgcatatgtgtgtgcaggtgaggacgcacgccgtgcggacggcccacgagaacatcgaccggacgctgcgctccgccgatgtcatcctcacgcagttcgatcgaactcgagaggtgctccatcgcttcaaccccagatttccctacttcttactagtactacatatgctattaacaatatgtgtgccccgcccgcttgtggttggttggaacttggaattgtaactgcttgttccgtggctgatgaatgcggggaacgggtagttggtgtgactgtgatcagtccattttctgatctgcatctcctggcactgggcgtatgcttagttgcaagcttgcacggtggattagcccttcattttttaagtttctaaaatgcatctttgctcccgaatatgaaccagcagtgctcaggagtgctgtggagcatgcccaatccttctcattttctcgaaggagcttcactcccctttgtcctttctctggatggtctttgatgtttcgcctgcatgttggtgggggcaattatagcttgaattatagtttgtatacatcactgtgaggcagcgtattgttggtttggtaccacatggtccacatgtatttgttatagatacattaggaaggagaattctccattgcatgtggcggtatgcatataaattgttttcttcaacatgaattacagtaagtatttgtatttcaatatgtgccttgatggctgcccatattgggtttggcaactaaatggttggacatggattttccttttgaccgatttttgaagaccttgaatccaaaaaatgtacctagctatttttcagtgttggattactttggagaaaggtccgatttcagttattgacttattgtcatctgtgcaggcagagcgtgaaatacagaaggggccacatgaaaatcttcaaggttttctagatgcagttgatcggttgagaagtattgagcgtttctttagctcaaataggagctaccgaagcagtgatggtgtgctcaaccatgtgaatgccctcctttctaaggcccttgtgaagatggaagatgaattccagaagcaattgactcagcgcaggttgtgtctcattattagtttaaatgtttttaaccccaacatcatctaacttgcattttgcaccctcctgactgattccagcaaacctatcgagcctgatcgtctttttgattgccttccaagtacgcttcgaccatcatctgaatctcatcctgaaggtggaaaaaaccaatcacattctgaaaatcagcaaaactcggaagcagctgtatacagcccccctgctcttattgagccaaggttcattccttttctggctaaattagcacaacagttggtacaagcgggatgccaacaacaatgctcagaaatatacaggtaaaaggaagataaatattttcaggctatatatctattcatcacttcatggatactagacactaaatttgttgtaatatctggaaattttttgttctgtttgtccttttgatgctcacatgaataatgaaacgggttgaaaatacatatgtttgtctagattgattgattgaagatagaagcaaggctaggcgagctattttcatacttgtcaatttgagtatatttataaacttttttggcctttgtgaaaaccatgaaaaatgatttttttagtttggactgccagttccagctgaaaggaaaaacaaaatgttctccctgtgaataagtttaaagcacttgtctcctgcattcctttatatatttttcttgtttatatggcctatgtgctaactacctcctatgcggcaaaatactcaagcactttctcctcttgtgcacagcgaagcccgtgcctctgctttagagtcaagtttgaagagcttgggtgttgaaaaactgagcaaagatgaagtgcagaaaatgccatgggaaattttggagtctaaaatagggaattggattcacttcatgcgaattgctgtaaggatttttctcttatctactgtatggtgcaacatgcctctggtgacaccttttgctttaaacaggttaaacttctttttgccgcggaacgtcagctttgtgaccaggtttttgagtgcagtcaatctttgagggataagtgctttgctcaaataactaggaatagtttggctacactactcagctttggagaggcaattgctatgagtaaaagatcaccagagaagctgtttgtgctgctagacatgtatgaaataatgtgtgaacttcaagcagatgtaagtttctgattcataccatagctatctattaattgtttcattggccagccacaacccttttgtgcagaactgcgaaatgataagtgtgtgcatgctgagttaagatctgtttttaagtttctaaaaattttgagctccttatgccatcggaccaatttatggttgacgtaatcctgcagtactgatctcaacagcttgatatttttgggttgataaaattgcaaaagaaacatatgattaaatgatattgtgaatgctttgtgaaaaaaggggcaaaatgccaaacttctcactgcagatttcaaagtatgagaagtgcatggggcattatcatacttatatgacacagtgtggtgccatatttccaaaatttctctgttggtccatctatattgaagttcgccgttttaccagaaatcaattttcaccaaggtctttggaacttggactttcttgtttgcatattctttaatgaaaaacgacttcactagacaaatgttatagtaactaactaactatggagaatttagactgtcaactgaatgtaaatttattttagatatggtgctattttcttgacacggaaataagtaatatctacattttttatggattgtgtagattgacaccatctttgttggagaatcatgctctcaaatgcgtgagtctgcattgagtttgacaaaatgcttagcacaaactgcacagaagactttcagtgactttgaagaagctgttgaaaaggacgcaacaaagaatattcatattgatgggacagtgcatcctttgacgagctacgtgattaactatgtcaaatttttatttgagtaagtatatgatcatgtgcacttaatctttcctgtaatttgatagttgcattgctatactttcttgcatttcttcttcaatcctatccaccagtatgctgatatttgtgttttgcaatcgttgctgctgtatctcttctattggatagccttctaattcaccaagaccagattatttttccccagctgtatacgacaacaaatagatcactccaatgtagctgaacttcttttgtaccgttcttgcaaacattatctatatccaattttgtacctattaaatgctctttcagaatgtcttgttttgtcaagctgcaactggctatagctttgcaaaaaaaatgacaacatttaatctttcgcagctaccagtcaactctaaaacagctcttccaggagttcaaaagggaagatggaacaggttctgagttggccactgtaaccatgagtatcatgcaggctttacagaataatctggatgcaaaagcaaaacaatacaaggatccagctttgatgcacatatttttgatgaataacattcattatatcgtgaaatctgtccgcaggtatgttcttatgaagtaaggtataaacaaattcgcaatagccaataggttagtaactggatgagtgggtatagtttaatgctctcttttctttcttccagatcagaagccaaagatttattgggggatgactggattcaaaggcatcgaagaattgtacaacaaaatgcaaatcattatagaaggattgcttggtcaaaggtccatttgctagacatatttgaacaaaactcactgtttgtttctcttgcattttgttaccattgttgatgtttaataggaagagtgagcctaaagatctatgcattattccgattttacaggtcttgcaatgcctctctggtcaaggtttgacttcatcaggaggtagtggtcaagtaggaagtgagggaggcaatagcagtggagcttcaagagctgcggtcaaagagaggttggtcatgtacactaattattccagcttgcttttcgatgaatgatgttttaccatacaatttctgaaacagtgttttgcccactattttgtaaccagattcaggtctttcaatgtgctatttgaggagatttatcaaaagcagtgtggctggtctgttccagatacggagttgcgtgagtcactaagacttgcagttgctgaaatcctgttgcctgcatacagatctttcctaaagcgctttgggtatgtttctttgaaacttcattacatgtaaataatatattaatgcatggacaaggaccataactaatcctttattttctattcaaactctcctgctcatgtttttgtttctggcagtttgtcaaatgtgagttggtgcattttcttgtttgtgccagttatattatttaattaggtttaaaaaaaccatgaagattatatttacctaccaatttggtgctttatgaattcaaaattatttactagcattacaaatttacaatataaattgcaaaggcgttatccctagaaggctagaacctgatacacttcacggctgtttaggagacactccttattctccttttgatttctatctagacctgaatcctgactgtttaggctggcacttaattatgagtttgttagtagaaataacagcagcccctgactaagatcttagtcagtagtaggaattagagtgttccgggtgctttcaccaggcccagctttggtgcataccacatgccactgatatcagacctggacctgaccgactgtccctcggcaaaataattgttgcttgcatctcctctgctttgccgtttaagaaagagactttaacaaatttgcctgtcctaaaaccggcgtagccctggtccacagaattttgatgattgagcattgccatctgttcatttgtttaataccatgaattttccctcttttcttttatttctatgtttctatggatatgtatgttcactagactcaagagttcttgtccctggagcttatgagacttgtaatctataggcctctcatcgagaacagcaaggcacccggaaaatatgtcaagcacacaccagagcaagttgagctactgcttgccaatttgtttgaaggaaaacaagagcgtacttgattggggtatgtggctgcttaatatacaccagcgacgatgtgatgtcattctctgtaaattgggaccctggtagcattgcttttgtttgtgtagcgctgctgctcagaaccgttgctatgtgcacctttccttgctggggtgcatgatttgtatagatactgtcctagttgccatttattgtttttgttgatttggtaggtgctaggttcgttctgatatgttggaaactcgtgttagtgcattcattattcagtatcagcagtgtgcaataattgtccaatgttaatgcaacctctagtgcctccattttgcagttgcgggagtatagtcgcaactgtttcccacaaaggcaaacctgtattctccttgtttgtgagctttcagggtcaactcgattttttttttgacaaattagccattttcaaaaactgatgaaactagaccgtgaaaaaaaaaaaggccgtgggctccatgctcagacccctgccacatcggcgggggggaatggcttggccgccacgctggcaggtgcttagcgtcaagcgtttttttgctaacctcagcgccagaagcattggcgttgaggtcgcggtctatttgcttgaagtatttttttttcacggtctagtttcgaaataagttttataaaatgaccaatttgtcaaaaaaaaacaggagtcaactcttattagtgtcgttttcataaatattattatacatgcccttaatacggagcagtaaataataataagtctttatatttatgggtaattacttttttaacaaagcacatgggtgacttcggtaatatcaaaatatgccgtcagttttttttttacaggtgttcgtaagaaatattatacatgtgtgctttattttcttcttttctggaaaactcaaatgaaaattcactctactcctagttgttactatggaaaacagaagatatgaaccagttgttaggccctctttatttaggttagcttatatcttttataattcggtggatttaaaatcctaaattgaataaaagagacataccttcatcttacgtaagttaaaaatttttcttcaacacaacttttgacttaccgttgtaagagtgacttatagctttaaaaaaaccaaacaaaaaaactgcttcatcttacggaagttaaaaaattttcttcaacataacttttgacttaccgttgtaagagtgacttatagctttaaaaaaaccaaacaaaaaactgcttatttgtttagaattagactaaacaaagagcctataaacaaagatgatctaaatcctggtgtcttgaggactttgaacagatgcgatggatcgaacctggcgtagtggatatatgtccatggtggatacaaaagcgacccgatgttaacgtgcatggactagcgataagaatgtgtacgagagagatacggaaaaaaaaccagcgtcctttcgttcaaaagcgcccttcccttatctctgcatgcagatgcagacaccaccagaccccgcgagtataaagccgtcatttgttctattctgttttcctttcagttcttcttcaactgagagagcagtaggcagagaggggcagtgagatcgatggagcgagcagccgatgaggaggcggcggcggaggctctccgcgcgaagattgagctcctgcgacaggcgatgcagagcagcgaagctatgcaaaaggaggctgccgtgataggcactcgcttgaacaaccacatggtcgccattgacgaggccatgcgccctgcccatgtaagggattatgttcttcctgatctttaaatctatctatctatcaatctcagaatctcattgtgagcgatttgcatgcagaagaggacgtacaacgcgtgcagggttcatgacaacatcaggaggagcctcacggcggccggggcgatcgtgcgccacctcgaccttgtaagggaggtaatctaatgtagcttcaattcgttcctcgatcaggtgcagattagattagctgatgatgagagttcatatttgttcaccccctcctccgtcgatcgatcagtttgttactactacaagtttgaatttagccgatattggacgaggcctgtccgatgggccggcccctggcattgaagcggaggcccacgataaacagagttactagtctacagcccatccagcccataaaccacctcaggcccactaaacaaccccaatccgggcccaatattgcgccctcgatatgcggccggcggcgtgcagcctcctccggcgtggcgaccgccggaggaggggaatgggaggagggctagcaatgccggcggcgcctagcaagcgcgacggagccggcgcgccgcggtgaggcatctgccgtgcgccgccctcccgtactctcctccctttgcttcgcttggcttgtgcggtaaaattgcttgggttttgggcggagagcgattgcggttcccccggcgtggtctcgaatttcaatccgagctttgctgcgggtctacttctgtgcctagtctgttcaccaattctgctcctacttttctgcactgtgtacctacccgcctatttgatctgaggttttgggtcatagtcgcctatgatgtggagtagcaatcgaccggcattgttctcgctttcattccatgattcactttttacattagggcacccgcgggtagtaactaattctaatcactcgtttctgttgcttgatgatgcaaatttctctgataaatgcatgctaggacctagaatactctttggttgttgtcttcgtaaaaaaatctctagtccttttttatgggtgatcatgttagattgcttgatactttaccttttagaattgggttccttattactgacatttgattgattttccatgtgtacaggcagaacatgtgatattattggacagaccaaacgaggatcttaatgcctatcttgaggcgattgataagttgactagtgtcgaatacttttttacttccaagataagatgtagagttggtaatgatgttcacgaacgtgttaacgaattgctttctaaagcaatccatgggttggagaatgaattccacaggctgttaaccaaatgcaggttcggttatctgtttgtttagaccccatatctatttaggaatgttcagaaattaattacttcatcagaaacctctttactatctcattttccctatagcaaacctgtagatcttgagaatattttcaactgtctatcaagtcttaatcggcaattgtcaagtgaggaccttattggcccatcagccggtgattattctgaagcaccgctaaaacagtatgctgagtgcactcttcctacactcgttgatccctgttacttgactttgctctcaaagttagcacagaaatcaattcaacttgattgccatcagaagtttatggaaatatacaggtgcaatctacaaaagttctaaagtcttttctacttgcaatattttgcttctgagtttctgattttgcttgttcacattttccatcattcccacagagaaattcgtagttcaactttggaacggactcttaagcgcttgggagttgaatatgttacaaaagaagaaatgcagcaagttgaggctcagagcatggaagctaaaatcgccgagtggacacaattctcccgaattacagtgatgctcttgccttgactgcataaagtttaaaatgcaagatgttgtttggcagtaatatctgactatttattcgaacaggtaaagttgcttttcggcgctgaacgcattctgtgtgatcaagtatttgaaggaaagtatacatggaaagaccattgttttgctgaagtaacagctaaaagcctttcaattctactcagttttggagatgctgttgttcaatcccaaatattgccagacaaactatatatacttctagatatgtataaggcaacattggaacttcaatccaaggtgaaagaacaatgatatctgacctttgctgtgtacatagttacattttgtttgttcaaagggccaaaatatgagggaaagaagtaagtttcattctgactgagtatgccttctcatttcaaagaactaaccattattcttgggccggttatgttaggttgatgcaatctttgagggtaatgcatgctctgaaaaccagaaatctgcccttactttaactaaaagccttgcacagactgcgaaaaagacaataggtgatttcatggaatacattctgaatcactcggtgacgagtacgactgttgatggggctgtgcattatatgaccagctatgtcactgattatatcaagtttctttttgagtaagtgaaatctggggattgggagttttcttcatatgacctccaatagaatatggcctaataccgttagcaactatctgacttaacagctatcaaactgatgcagctatcaatcatcaataaagcagatctttggagatccctgtgttgaagatgaaaaagatactgatgtggtctctcaaattgttggtgcaatacatgctctggagaccaatctagctatgaaggcaaagcaatacaaggaccttgctctggggcacctctttttgatgaacaacatccattatattgtcaagtatattggcaggtcagtagatatcatataaggaccaaaaatctgattagctgaatgatataactattttcttattctcagatcagaattgaaggatttattaggtgctgattggattgaaagacaacgaaggattgtgcaacaacatgctactcgatatagaagagttgcttggctaaaggtctgatcacaaaaagcttgacagcacgatttaaccgagcatctcttgtatttttacaaggttttttttaactgttctgagtttgcaggtattggagtgtctatcaactcaaggtctcacttcatcagtaggctcttcaattgatgtcactcaaggaagttttagaaatattaagaacagtacaacctccagatctgtgatcaaggagaggttaggctgaaataccaatataatcaatgtagtatgtactcagtttttggtgattcatcttgcgatttactatgttcttttttttctaactcttctcagattgaaatgtttcaacatgcgatttgaagagatttgccagaaacagatgaactggggtgttcctgacagagatttacgagattccctaattcttatgattgctgaaatattgttacctgcttatagatctttcctgaaacactttgggtactttccaatttgctctggttttacgactttgttttatttctttatcaagctcctcaagacatttctcctttggttatgttatggttatcgttttcatcatgtaggcctcttgttgagaacagccacagcgctttaaaatatatgaagtacactccagaatcacttgagcaagctcttggtaatctatttgcaaagaagttacgaagtgatcaggtcatcagggattctgattgcatcaaacatcccatttaactgtaagtcaagagaccttcctgaaccctatctgtactatgcagtgtcatagtgtgttggaacaaaaaggggtgcattttagtttcatagcgcattttacctgttaagtattgtcatcttgttttgattttgttttcagacagctagccaaatccattgtaagcaaatttaactttgggttcaataaccaggtgttctccttgcatttgtttgctgcctgcattgtgcatgtttgcattggactgacatactctttctctaagcctggaggttcagaccaagtctaaacatttatctctttttttatgaaaaagaaacaaaccgtagactgtaaactgttccaagtggctaactgcatgatcagccttgcattcctcttgagagatgcatgttagcgttggctccaatcctgaagactcaaattctcaaaccaagtcataagagtctcctcaaaaactgtaaaagataaagtgttaaattggtcctagtggacagtggttatttaatctagtttaggttattgagaaaaaaatcgatcccacccatcaaatatgtggtagctgggtattaggtgttagcctacactaacctgcaaatttttgaacgaactcactaacctgcaaatggagactgtccagaattagatttaacttttatcaaaacaaaaggaagacgctgacttgtaaaaattcctatttcaaacatacaagggaactcttgcacgtggactctattcaccaatagcgtccatgcatgagtggcatgacggtcaatggctagctagtaggataagtataggttgtacctgaagaatatttcacatcttttggagactacttacaggaaagtattcttctacaactcattcaggaagtatagcagtttgcatgctgctttttaatttacatgtcattgtggaccctaaatgatgtaaatggctatcacattccactttattaatggcactgctggcacacaacaattgttaaacccgtattgataggattaactgagttcatggtctcatcaatttttatgtagcataaatgtgaatgcatttttgaagaagataggttgctagctcactattggaagtggctacactgggtgattattatactagaatgaacatatatctccaaacattttcttccacctcatttgtttacaattttgtgttgtatttctagtgtgcatgctttatttttcttcaaataaaatgtttttaaaactgtatattacaactactgtatttttatggttagtgcaaattagttgaatctgattgcctgggaccatggcagaagaaccataatcagccatcatcattacagtatataccaggaccgcacctgctctcttcattctagttcttccatatccatccttttagttaggatcattctgttaggttctcttggtatattgagatgcatgagtatgaccccacctatgacgggataatatgtttctttactcctgcataaatgatttccccttctcattaataaacttgtgaagatacaagagcttaatgtacagaaagttgattgcagattgaactttatcgcctttatggtgacattgtggatgagaatccactgtattcagactaagaaatatgataacacctttgtggctgcagtactttctggtgctctcgttttcttcttagatgtcctttagaggcttggcgcatagttggtttgtgcttcaggcaaactttatattctttccccacatttttctgcttcaaacagtgatttaaaatttggaattgttttgattaatggattctgtctttgtttcttaatttggtcatttggtgagtgcaaattatatgtttcatgcatatttggagtcacctatcattcttgtgatctttcaatttcctgtcatcagactgaaaagttgcacggtttgtagtgattttgatagaaaaggacgagttcttgttagtagtttcatggcaatatcgcagttagtggagttggttcgagaggtgtcgtgcattcatgccccatcaccttatgtatggttgtataatactccctccgatcttttttgtacgaagctggttagtttaattcattaaaggatgtaggtagtactactttttcaggaagaggtacataactttgtgagaaaagagcaaatttaccattttctcttgcataattacttctctatgttcgcttcatggttgaagcttcccccattgactcctgccggaacttcatatcattgtttaattaagcatatgctagtttttttttcttttggctgggtagataagcattgctagttttggttgccatctgagactatggattatggcaagggcggatgggggtagcagggccttgagtctactattggcgcgcgagaactatgggagtcaccactaaaatatttttttttgctatatgtagaggggaagagggggctgtagctttgtctagtttgttcagactcctcttatatttcttcctagatccgtcactggagacggggtaacatagttaatcatgctagttttgggctatagtagaggccgaggatgttaacttctattacaaaattgtattaaaaaaaaaaggttaccgtgctacctacagttatatagcttgtagataacatttggcaaggcaaaatttctctgttaacttcctgcttcctgctgttatgattcgtttggcatgaaacttttgttactcgggctgtcatgtaggttattcattcgtcaatttataagataaatacatactttactgtttcccctaattaatatctgtatgacattgtcgtctcaggtttgactcctgtaggcgaagtcagcgaacgaggtagcaggctccaagccttattcatcatctgccatagctaaagcgcatggaaaccacgagggcatatttccgaatgccaacttggagcgcagctgcacaggtgagcccctaatgcaacagctctttgtatttccacgtaaccatctgcgcgtactgccgttggcatttgatgctattagtcgacatctgcccatttagcagtgattatacggcaggcatcaggtgtacagtaattggaaggcgcaccgttccttgcatcttatgtcctagtggagacaatcaattatcagaaactctggttggctggttcaaagtctcgcgcattagtgtgaaagatactcctatgtgacctttatggtaccacaaattcactgcatctaatcatacttttcttaatacaattatgtattggaagattacagtgcgcatagcatataacaagagcccatttggcttaagagacgtccctaacatgggttccctatgtgagctgtcctttggactctacctgccaacaacccttcttctctgcccttcatttccgcacaagctcaaacatggtggacggctgtagcataagaagcttccatgctgtgtgcttgtgtcccactgatatacgtgtctggctaggcaatcgtttatttcgatctattgtcattgtactgtgattgactgatttgtttccacactcgttaattacattctttaagctggggttttgttggcacatggatgatagaatcgcaagcgtgcttctggttctctatctcacctaatattcgcaaactcttatagccatatgcttgtaaattagccatttttctgagttacggtgaacagtagacaggagtgtagtcgcacgttatcctttttttctttgttttgtttgaagtgagaatgtgatatgaatgaagattacagttagctaggcaactggacaaggaagtgagagtacgggacccatttattatctttctatgggacggcttcttctcttcctgtttacctttctttcctttggatctcttcctctgatgtggacaccctacccgctcggtgactctcttacagccaataatgaatcctccttgctcggttaattacctgctgatagctaaggtacagttcgctattatgtgtagttatgttacagaggtggtcaaacgtaaaaactagagtcttcagtgcaatcgaacatcatgaatgaaacgatcggttgtacgtcattatctggacttgttggtgcttagatgcgcacgtcagaagatcggacatgtaagtatgcaatacgagtccactagctctgtttgacgcggagtcatttgtgctgatcactagtgccgcacctgctaacctactggaaagcaaggtcaatctagtactaaatgacattggtaatgcccgttataacttgatgtatgtgggtgtggcgtgcaaaagaaggtttaacgcgccttgtcacactcacacaccttccaaatgatgcaaaggcactcgctcacctgcgggctgcgcccaacgttccttttagctgcttccttccctttaatttccatcgctgatggattccttttgagagaatcaaaatccttccttttcactttttgtatcgacgaaaggcgttttctccgagtccttaacaaaacttgattacctttcaatcaatcatagcttcttttggagcttaccactcaccaccatcgatcaccagctccaccatcataatccacccctttgagacatacaccatgcttacaaagctgaaattaagttaagcagcaggcgaccgtgcaaagtctagtaagccacccaaaagtgagcagcagcaaccaacaactgaacctaccctgctctgctcacactgtcagccgatgctgatcacctccttccaatcaatcaacctgccattgctgtacatgagccacaccaccatctgagctcatatataaaccccctccccacccgctgccgcgacctcctcccagccatttcgatcgatcaaggagagcaaagaggggatgtcggtgatcaaggattgtggggggcacaaggggtgcgagtgcgagaaggagaaggtgcaccggcggctgtgctgggcgctggtggcgctggtgctcctgacgctcttcatcgtgctggtggtgtggctggcgctgcggccgcacaagccgcggttctacctgcaggacctgtccgtgctgtgcctcaacgtgacgccgccggcgtccgcctacctcttcaccaccatgcaggcgacggtggcggcgcgcaacgacaacggccgcgtgggcgtctactacgacaaggtggacgtgtacgcgcagtacaaggacgtggccatcacggtgccgacgaggctccccgtggagtaccagggccactacgaccagtccgtctggtcccccttcctccaatcgctcgaccacgtcgtcctcccccccaacctcgccgtcgccctcgcccaggacgagaccgccggctacgtcctcgtcgacatccgcctcgacggctgggtccgatggaaggtcggcacctggatctccggccactaccacctccgcgtcaactgccccgccctcctcaccgtcaacgacggcaagggcagctacggcgtcaactacggcggcggcgatggctacttccgcttccagcaagcagctgcatgcgccgtcgatgtctagctgtgtcttctttcttcatttcctcctcctccttctcttcttctttttaattagtttcacggcttctcttcttcttcttgcttaatttttctcaccggaatcaatcatctcatatcaatgaagaaaaaccgatcgatgatagtactagcttcttaatttagaccgtagttggtttggagctagtgtagcttggagtgaaagggaaaattggggtattctgaaaagatgcataatagacgtacagctgggagtagacgtgaagtgtctgcataattcgatttgcatttggcaataattatattccaatgtgagtacatcaataattaaaaaaaatgttcatatgtacacctgtgtgttttgctcgtcttgcctttcgattctctctataaaaaaaattgaagaaaagagactatattcgtgttagcttgtgcctgagatatttgacctttatcttggacctcatcgatcagcttttagtttagtaaagcgctcctttgaaaacgaaaatctaataagctagcgatcgatcgatgagagagtttgttacgagtgtggaccaatgggcagattgctactagctggccttccccgttgtgtgccggggagccactgcacgtcactgcacatgccgatggcgactcactcttattatttgtttcgccatcttttgccaatttttcttgcacagtgattgacgatatgtcatgcatttcctttttatatatttatcatcggaattatggaaagctactttgctagctctaagcacgcgtcaaccccagcatcacagcatgtgatgacttaacagctagtactccctccgtttcaaaatatttgacaccattaaatttttagcacatgtttgaccgttcgtcttattctaaaacttttgtgaaatatgtaaaattatatgcctacatcaaaatatatttaacaatgaatcaaataataggaaaataattaataattacttaatttttttaaataagacaaacgatcaaacatgtgctaaaaagtcaacggcgtcaaatattttgaaacggagagagtattagtatacttcattgactactagcttgtgattctttcacaagtagtaagtaaagtggtctctgttagttcttcatggagactagatgaggggtgctaaagcttctactatggagatcagtgtcgtcatgatcgaccaactcatggtctaatacaagtaaaatttaattgcatgatggagcattataatccatacatacactttgtgatctcgcgtgttaatgattaaaatgcgtgccaatttggcatggttggtggatgcgaccaaattaaaccaaacgctacatgtgcttttgttagggcactcatagtagcttacacagttttagttggtggcacacacgtatacagatcactactaccatctgctcttcaaaaaatatgttctctatatagatttagatcaccatctttaattaatcttagtaaatactggtacaggagaatggagagtagcagataacgctttcagttgcaagtccctttcgctcgattgcctcgcaccaacgtaggtagctatagctgcttgccctttgcagagcatggttgcaaaaatattctgcagaatacctgctggccctatcaaaatcaattcgatcgatagcctgctttgaggcttgaggtttggttatacagtacacatactttaagagtgtttttaagtggagggaaaaaaagagaaaattcatatacgtaaaacgatacgagccattagcatatatgattgattgattattgattattttaaacttaaaaaatatattaatataaattttcgataggtcaaatcctatcttagatagtaatattttaggatggaggaagggttttagagaacttatagcaactttaacttatttcataatctatggcttctccacatagttagtttgtttgcatagagtttcataatcaatagttgtaaaatccaaaataatataaattaagagccaaaagttgaaaaaacctgatttttttccaaattttcaaaagtttgatactcatcagctgcttcttacaatctcgagaaccccaagaggttcttatactgtacatagggtggtaatggacctaacattttgaccaacaaaatgtgagggttgggtccaaaaatggttgggttgaaatttagtagttttttttttgtgctaaaaatatttaagggaggtgggttgtgaaagaatccatgggccctaactgtacaccatgcctgctatgtatattgaactgtacctttctgtgtggttgagatgatgatataatgctgagacagagatagagctggctccatgcatgaagaatgtcgtgcccataagggcttataatttgggggcgtactgcctgcttacctgctatatatgtactgtagctaagctaagctagtacgtatgcatgtatgtattcgaatttgaaaaggttgatcataagcaggtaattataagcagggaagcaggtatgtatgtacgtggtggccggtgggtaaggttaggatgagcggtagagtgaggcactagtagcacactgtagtctagtcctgcaaagaaagagcttttgatcaagtgcgagtgactttagctgctagtttccttgaggtttcttcgaaagggggaaagtgaaaaaggcaagggtgattggctgctattctaagggaagaccctccatcacagtcaatatatatatattcggcaatgtatcccaaacaagatgagaatatgagattgagcacatggttgagtgaatgacgatatttgaaaatgccgtttatttgggaattgtgatcgatacagcatctgccgatcaacatatgcatgcatacatctgcccatccggccactgaatataggattggtgatttggtgaacgcagcgctggtgaacaaaagaaagaggaaaattttggaggaaggaacaggcagagttggattgccagttgtgccacccgacggagcgactgggacgagcaggaaagtggatgcaaatgcaatcacacacattgactgggtcagttacggcccgtcgcgctaacgcggatcgcattgggctgctggcctcttgcgcggggttactgggaatccgcgggccttctgcccctcgccgagctctgcaggcgcatgggcgaaaatgagcccgagctgtggtgctcagcttgggccacatcgtcacactatcggacgggccgtttgtggcccaggctgctgtttcaaggcccttagaagtcgcgagcaggttgactgttcatatatcttctttttttaaaaaaaaaatacacagtacaacactacaacgcaaacacaccacagaacacctcgctgtcgacggttgcatcacctaccattgaaagcacaaagccattaaatcctaaaaaattcgctctcatggggagttgaacccactgtgacctatggttccactgaggctcgtgtaaccactaggctacaggctctttcgcttatgttcatatatctaatatctaaatgatctattatattattaaaggaatagaaaaaggagcctccacgttcgctcttatggcctagaaattctcacattaatcgaagaaaaagaaaaggcagagtccaaatagaaatacaatttagaaatagctgaaattcgaaattaaaaaataaggaatattagaggggagactagagtccatatagaaatacagttaggaaataactaaaatttggaattaaaaataaggaatattagaagtagagtatagagtccatataaaaatacagttaggaaatacctgaaattcggaattaaaaataaggaatattagaagtagagtatagagtccacataaaaatacgattaggaaataactgaaatttggaattaaaaataaggaatattagaagtaaagtatatagtccatatagaaatacaattagaaaataatagaaatttggaattaaaaataaggaatattagaggtagagtatagagtccatatagaaatacaattaagaaaaaaaaatagaaattcagaattaaaaaataagaaatattataagtagattatagagttcatataggaatttaaaaataactcaaatttggaataaatataataaaattaaataaaattaaaagtagagtttacagtccgtataaaaataaaatttacaaataactaaaattcgaaattaagaaaaacatgggaagaagagcttaggaatacactttagaagtaactgaaattcgaaactaaaaattaaagaatattgaaagatgagtttagagtccacataaaaatacaattagaaataataaaaattcagaaataaaaataaataatattggaagaagagcatagagtctatatagaaatacaatttatagaaaattcggaattaaaaaaacaatattaaaagacgagtctagagtctatataggaatatatataatttaaataaggaatagtagaagtagagtatagagtccatatagaaatacaattaggaagtaatagaaatttggaattaaaaataaggaatattagaagtagagtatagagtccatatagaaatacaattaagaaaaaaaaaatagaaattcggaattaaaaaataaggaatattagaagtagagtataaagtacatataggaatttaaaactaactaaaatttggaataaacataatacaattaaaagtagagtttagagtccgtaaaaaatacaatttacaaataaataaaatttgaaattaagaaaaacatgggaagaagagtttaaagtcaatataggaatacaatttagaagtaactgaaattcgaaattaaaaattaaagaatattgaaagatgagtttagagtccacatagaaatacaattagaaataataaaaattcagaaataaaaataaataatattggaagaagagtatagagtctatatagaaatacattttactgaaaattcagaattaaaaaaaagaaatattaaaagacgagtctagagtccatataggaatatatataatttacaaataactaaaatttgatattaaaaataattaataactaacacgtatataaaatacaatatgaatattacacattagcaattttataaagttattgcaaaatttaaaattatgtcgtcattttaatatatttgaataatataatgagaaaacatatatgctattatatgagagaaacatactagttattaatcaaaggaaaaggaaaattcgtggtgaagtcttcacgcgtcacgcgtctttgcgcgataaattgactacgaaacgattgcttgtttgagctaaacagctcaatacccggtagagtttggacgaaatttcccgttgaaacgctaaacaaatctatattgaaagcgacacgtgagcgacgtgggcttgagtgaatcgaagaaagtggcaagcaagcgcggcacaagcgaacgtttcaacggtgacgagtcgccccagataaacaatgccgcgcgccccccgccgttgcaatcagacacgtacagcgcagcaggctgtgtccctgcggtttatactgcttcttcctctttgattttggggtttgttggaatcatgccaccttaattcggtaaaatttaagatataccacccgtatctaaatgatatgtaggacccacatgagtcaatgacatgtgtgtcagggtggcatatcaaaatttgtgtggcatggttcaaattttcccttgattttgggtgcgctcgttcctgcgggcaaccgctcctgtcagcttgttttttcactcgcatgctttccaaactgttaaacggtgtattttttcaaaaagcttatatataaaagttgctcaaaaaattcatattgatttatttttttaaaaaaatagctaatacttaattaatcacgcgctaatagctttgtcggtgatatgggcccgggggtatcatgtttagagggaggaggttgccccccaatgccacgtggccctcccccaaggggagtcaggcccgaggtggggtggcggccactccctgatcgagactagagggagaaggctaccccaggcgccacatggccctcccccgaggggtcgggggagcccgaccccctctctaggtcaccacgtacggtgggttaggtgtccgcctacaggtgcccacctacccgtatttatggcgacccgagaggtcgcgccacgccgcatttaatgtggcgtgcagtgtactcaaccggtctgtgaccggtcgaatcaccgatgggactgggtagtgcacctgtgcgctgctcgtgtgttagatgtcggggagtgatctcctccaccagggaaccgtgaagcccccctttgtgagttcggccgggggcagcgtgtgagattcgagggcttggtgagcgaagctgtgtgatcttgagggggttctatcccccaaagacgatgagacaaaaaaggtttatacaggttcgggccgctaagtagcgtaataccctactactgtgcttgattgattgagtgtagaacacaagtgctcggggttgcgagacccaagtgccggttcgctcggaagtccccccctctctcactaggcctggacctctttttatacctcaaggggttaccacattggcccaacaacctaacttcgtcgagaagtattacaatctttgcattaaatgcatgtcttgttccttaactttgaagctgcatacacgtcgcctcggtcgtggggcctaccaaaccatgccgcctgacacggggggcgcccaagtcattcaccatttaatgggtgaagacttctgggctcctattacaccaggaaacgggagcctagctttgatcagagcgggagggccgactccggctgggataagaggatgagaacctctcaccatcattatttgatgggacatgtcaggctgcacgccgcctgacacacgagcagcgcacaagcgcactagccagtcccatcggtcattcgaccagttacagaccagttgagtacactgcacgccgcattaaatgtggcgtgccgcgaccgctcgggtcgccataaatacgggtaggtaggcatatgtaggcggacacctaacccaccgtacatggtgacctagagaagaggtcggaggagcggnttttttagtcacgagagggggccgccgccgcccgacctctggcccgatcccccctccggcagcctcctccaattagtctttgggtaggagaggccaccaccccacttcgggcctgactccccttgggggagggccacgtggcattgggaggggcagcctcctccctctaaatatgatacccccgggcccatatcaccgacagtagcccccggcgttagccctgaccaaaacctttcccaggtggtcagggttgacgccaatctactagtcagttgacatgtgggcccgatcttctgtcctatcattctgggagttgggcggtgggagtttagtcacgttcatacgtcgccttaacttcccactttcctcccgattttcgaggcgctgtgggctcgggagtttagcccgtaccttaggccgtgaacttatttcctgtatatactcagcaaacattgttagattctctcgggcccgtgaccttacgccgcgtaccttgcttgcccctgccttttgttaacctctgtttgcgttctacttcatctacccaaacgattattttcacatgagtgtgaggactgaactttccatagccaacaatctttacccgcgatcaaactaggctgggcgccgtagccagccggcggggccaaagctagctgctgcagaagagtcagcacaaggggcccgggcgtcgacggcgaccagagctcgacgcagggctaggagagagctaggaatcgtagcccccacacttttagcaaagaatcgtttgaatggatgaagcgaatacaaactttttggtaccaagggaggtaaaccagcgcgcgacacgtgggtaccgcgggaccgcgaggaagagatgggcgagagataaatataagcaataataattctatgtgagcgattatcttcgcgcgagtgcgagaactaaactttccatagccaataatcttcacccacgatcaagccaagctgagtgctgtagccaaccggtggggccaaagccaaccgctacggaagagccagcacagggggccccagacgtcgacgacgcccagagcttgacgcagggctaggatagagctagtaatcgtagccccacacttatagcaaagaatcgcttatatgaataaagcaaacataaaccttgcttgcatgtcgcgacctttcaaacttttagctcgaagagggcctcccatcatgggttcccaaccattttgggaagcctacgaccacttagcaaacgaggtcaggttcccacgagcctgtgtccccacgctacacattctgtttgctctttcctttcggtggcctccttccaatatctcattttctggtggaggagttcattctccgataagcctgctccgttttccgtgccaaaaggattatttcccgtccctcactctcgattgggccctttatttttcaacttgtcttcgcctggtacggcgtcagcaaggactaaacatccattaacaaaaaaaaaccttaagaatttgatataatcttgatcatcatgggcagagtttgggatgcgaaaatattagcaatatcctcgtggtggttgctgcagcaaaaagaaattggcctgcaaaagcgtggcgcgtgtttttttttcttttttttaaggtataggacaaaacaaataaagcgagagttccctgcgtttaaagtggtgtccggtcaaagaccaggcatccagcggagcgtgggttggggtctcaaccaccagccaaacgccgccacaacggctacaactccaccacactccccgcatcatcagggtcgcacacacacaccaccatgtcatgtgcccgcccactactaccacttcgcctccttcccatcgagggcgaggcgatcacaccacgacccggccaaactttgttaacccaaaccaaaaaacaacaacacctgccaattactcctcgcggttgctgccgtcctgcaatgcagccgaggctatcagcagttaatcggccacgcgctttacacaattattataaacgcgtcgttgcgaccccgacctggagtacttataacccacccgatccaccacaaacacgtacacaaaccacaaacccgcatcgtctcctcctcctccacttgttgttcaattccccccccccctctctctctctctctctctccgtcgcagatctcggcaagggggcaacaaggtaggaggcggcgatgggttcggcgagccgcgcggtgtcgtgcctgtgctgcccgtgcaagtgcctggcgtgcggcctcttcagctgcctctgcagcatcctcatctccctcctcgtcaccctcggcgtcctcgccctcatcttctacctcatcttccgcccccacatgatcgccgccaccgtcgactccgccgccctcacccagttcaccctctccaccaactccgccctcgcctacagcctcaccgtcgacctcaccgtccgcaaccccaacaagcgcgtcggcctctactacgacaacgtcgagtccctcgccctcttcgacggccagcgcttcggctacgcccccctcgactccttctaccagtccaccgaggcatccaccaagctctcccccgccttcaagggccagcagccgctccaaggcgacatcaccgccgccaacttcaggtcgcagcagaccgccggcaagttcgacatcgaggtcaagctcaacgccaagctcagggtcaaggtctgggccttcaaggttcccggacccaaggccaagatcagctgccccatcaccgtcccagcgtccgcccccaacgcccccgcattccagcgcaccgactgcaaagtctggttctgatttcgatggttggttccgcttcgcatttggggattactattagccagcactgcttccagtatggacggatggattcttttgtttctttcgatttgttgatgagggattagctcgccggatgttgctgtacatcgctgtggtttaggtggttacatatcttctagcccttgtagctagcgcttgtcatgcacatattatcgatccatgtcttgttcttcttagttttttcccctttcttttgggtacggcttacttactgctgttcagatcatatatgactgtatgttggttgatacattcagagattttattcaggatcacctattacttctatgagtgacatctattatgattccttggttgattctgagttgtgccacttattacgagtgccttcttactgagataccagtgttcaattgttcatacatcagagcttctctgcttttttttttcatttgttggattgatctttgccacgggcaagccgtgacgtgatgaaattcacaggtcaggtgagcaccccacataatcgtataatgaaaaagtttcaaaactttaccttcaaaagaaagaaagaaagaaagaaaatcgtttgtttcagaaagagcatctccttttcacttttcagtgcctctcctctccttggtgctggtggagtggtggatggatatctatccaagtcttgccgaggattttcctttcttctaatggttggaactaatccaagtgtgggcgtggtgacagcgattcttttgtgtttttatttaggtttgcgtcgttgtcatccaagcatagagacacaaacaacatcgtcgttttcattgacggatgcactcgcgacaggccagcagcttctgaattcgatatccttctaagtcagggcacttgtgcagttgtgcaactaacacccggctttcaggttagtagcagtttgccagtttagctgctttagcacgatagcgcgttaccgatttcctgtgaagcaggcaaccaaatcaaaactactcggtgaaattattcgtgaaaatcattaattaagaagtggttggataattctccagcactcgaccacgattgacaagcaggacagcgaaaagcatatatgccgcattcataaacgtgtgtgccccggtgctctgctaaattccaacgacaacgatcggaatcacatggagataggatgcaactaaaacctcatctgagcagctcacctgtttttttttattcctttctttgataagattacctaaacaccagtagaaacacaaaaaaggctggtaataactataccatgacaaaagggggggggggggcaaagaaatcgcttgtgtgcttcttctactgtaaatatagccattgaatttatggtacagacggtgcaattgcagtatggtcggtcgaaattctggtttctatggccaaaaaaatctttcttgtgtgcttctctcccactgtaaatatagccactgaatttatggtgcaggctgttcaattgcagaatggtcggtcgaaactgtggtttctgtagccaaaaaaacttgctcgagatggaaacacccagaagaatattcacagagagaaagtacgttctgtctaaacagaagcggacctgtacctctcgttcttttgggcctttcggcctcgtctcctccttttgggctgtctgtactacgggcctcccctggttccttcagaaatactgggcttactgttgaggcccacaatactacaagaatatggtgagcccatcttagcatgggcctcatttttttcctttcaaaaacatctagtagtaccagcagcagaataaattcagtttctgttctttttgttgtagtacaactttgactcagttggccacttggcaagaaataattctggattttgaatcattcctgtagagagagctggtgtacggtgcgaatgctatcctccatactcgtttttttttatcatattctactccaagaaaaactgctatagctttccccccatatgcgacatcagtactgtatgcacgggctggcggtaaatgcgaaaagggtaccacactaccactgcatatgtgaagcagacacgtagtagcagcgaccctgcagctgcaaatgggcggcacatgcttatatttacaccgccacaacagtaacgtgagttgttggtaggataattctagagctccatcggtcagaagcagcaatgaacccatcgacacaacacgtaccagattgcacccaaaaaaaatcgcaggatctagcgatctcagatcaaacacttcgagaattacactaccaagaactcgtacaacaagagaggggtagagtaaatactctctcgtgctttctctctttgccaaagcaaagcaatcccaaaaggaaaagatacaaacatcgtcttttccctcgtctttttcttcattccgcttacggacactaataatggagtatctaatctgcctttgcaaccacaaactgacggcgaacgcatccacacacgccacggccacgccattgtaaaaagagattcacatcgagctagtaatatcttattgttcataaaatgcgcttcatctctaacctcgctctaatacgggacacgctagctaatacaattactactagaaagctgcataaacgcacagctttatcatcaactaacttttttttcgtacgtggagtacgtaattaattaactcgatcagcacaagcccccgccattgccatggattggagcttacgacgacgaggcgcattgctggcgccggaatccgagcctctccttctccaggtcgtactcgatgtagtaattctgctgctggaagctcccaagaatgatcgccggcccgccggaggagactccggcgccgccggagctggttgggacgtcgctcaccacggcaaggcagatggcctcggccatagccggagcgccgccgctcggagccggtccggccaccacgaagtagttctcgacggggaggttcatgacggagccgcccttgaagtggagcgacatctccggcagctccatcgtcttcgtccccggcggcatcgcgaagcaggggctgaggccgaggccctcctccaccaccttggaccggctgtacctccctcccacggccgcgaccaccgccgccgccaccggctcgaacaccgtgcggtcgaagtaggagaacgtcgtgccggagtcgacgatggcgcctcccccggcgcccccggcgacgaacgccctctccggcagctgcacgctcttcccgcccaccgtgatggcggtcagagccaggtagtagtagacggagtacggcggcctggcgctcgcgctccgagccaacggggcgtactgcatcccgacgccaccgtccttaccacccgcgccgccgaggatcagctcgccgctgacggcggcgttgtcgtcgaaccggcgagacaggaggcagtaggagaacttggtgaggccgagctgggacggcacagacggcgcgccgcggccgaaaccggcgaggccggacggcggctggtgcacggacgccaagctgcagccgatgacgaagttcctgacggcgcggccgggcgtgcgcagcgtgtcggagatgagcaggccggcggtggatcctgagccgtagacgacgaggtagggcgggcagacgttgttggcgttggcgttccgtggcgtgcagttggcgccggggcaggaggaggcggcgcggcagtcggagaggtggtcgggggagtggatccagaggcaggaagggttgcggcagccgatgaggcgggaggaggaggagttcttggggtggaagacgtggaggggggaggccgcggagagggaggagcagttgcggcactggtaggaggaggtgcaggggacccaggagaggtggctgccggtgtcgaggagcacggggaggggttgcggcggcgtgccgagggagacggtgaaggcgtagccgccgtaggagtgcgggtagagcgaggcgcggacggacggtggcggcgcggttccttggcgcgagcgcgggcgcgggcgggcgaggtgcgcggcgcgggcgagggaggcggcggcgaggcgggagagcgggtgatggtgggggtggtcggtgtcggcggggacgggcgggaggttgcggtagagcgggagcgtgatggcggtggagaggagggggaggagcagcagctgcaggaggacgactagcggtggtggattcgccatggtggtgtgcgcgtgttgatcgatcggcaatgcagggcaagctagctgctgcctacgagctctctgtgctttgcttgtgtctctcttaaaccgggaagtgagagttttcagagttgagcttgattgcggagggctcggtttggcatatgtgcttcgcttgcgttgggttgcattggtgggggccgcacgctcgatcggttcatggatttgatttgggatgctcgatcacgggcgcggagacatggatggtgaacggtctccgcggatggagtcctagccgcgtcggcggattcacgatcggcgccgctctctgttcccacgtacgcgcgcgcgcgcgagatggtcggtatcggccatgccacgctttcacgtacacttgagccgcgcgtccacagaaacatgatggatagtaattagtgccaccaatgcatgtggcacgccctcggatgattggatagtagcgcacctattcctcccttccagacactagaagcgtagtacgtgccctgccactgcgggttcttatcatcaacaccgccatgtgatgctgctgacgaattcatatgcgatgcttctgctatatgcatgttcttctaccgcgcatctaattaacgtcacccgtgaaattagaaaggattaattcatccgtcctccgccacgactgctgcaatgagtatcgccaccacacagtacaactgacacagccataaagacgaaatgatattgcaccttcaatgcacatctaccgcacaccccagcaacgcatctatcctagccagtctccatggacgtacacaaaccaactcgtacagtagtcatccttcttagaaatttcccgaggcgacaactatcgacaggcaggaaccgcagcttttgtttatttctctccactttcaccaattcaccatgcacgccttacttttactttttttaaaaaaaatatagtacatctttggatggacccgcgtccatcagattagatccaacggaccagatgtaatgggagctgctatatcataagatcccgttcgaacagtacagagatcggattttgatacctcatcctatcagccgatacttattggtatcatatatgatacttattgatattgtatcaatgctaggctagtactccatccgtctaaaaaaagacaaaccctgatttcattgcccaacgtttgaccttccgtcttatttgaaaaaattataaaaaaaaattaaaaatacaagttacgcataaaatattaatcatgttttatcatctaacaataatgaaaatacgaattataaaaaaaatttatataagatggacagtcaaagttggacacgaaaatctagggtttgtttttttttttacagagggagtagctgatacccggttagtaccacgtcagtatcttttttttctccccctcgatatgttctccgatgacaacgacgtgctgcccagtgacgtactacctccgttttttaatagatgacgccgttgactttttctcatctgtttgaccattcgtcttatttaaaaaatttacataattataatttattttgttatgagttgttttatcactaatagtactttaagtgtgatttatatcttatacatttgcataaaaaattttgaataagatgagtggtcaaatatataagaaaaagtcaacaccgtcatctattaaaaaaacggagagggtatctctcatctccggcgagagcgacgtgcccctgttgacgcgggactcttctccggcaagacccccttccttcccctaccttcctcttcggtgacgaaccctccacctcgcgtaggcatgcttcattgtaccggaagaaagcacatcgttttgccgacgagaagctctggatttgcaacaaaaggctggagcaaactggctccccaacccacacccttatggaaccctgcaacaccaagaacatgtcatacacaaaaacaaaatccttgaccaacgagcgctggggctcgccagcctgatcgccgaacgcaaccatagccatcgccgcccgtcgcaccgctcctctcctaccgtacaccctggagagatggggaagagagggagatggagaggagagagagggccgctgacatgtggagcccacatagataccactcgccatgtcagctaaaaattggtcactatattgcagatggaccaaaatttaacatggtattgtgaatcgagggatatgctatacattgtatttctgttgagggatgaagttcacactccgcaacaacttaaggggcctaaagtgaacttatttcgtgtgcatatgccaccattttctccgtgggccgtcaacgttgattcacatggcccatctactaggccgcagcccagcctactaaaccagtaagccctagctccgaacaacccctcgtctgtctctcttccccaaaccctccacccaacccgcctcctcgagcgacggcgcagccatggcggaagcagcagcagcacctcccgccgccgccgccaccaactacgaggtggacctcggcaacctcatggcctacgacccgtcgcatcacctccccgccgcatcctcctccaggtccgcacccatcgccgctactgctattgtgccgtgctgctttgattccgtgaccaagtttcccggggttgcgcgcagggaggagctgagggaggagtgcctgcggaaggggacggagctggcgcaggcggtcgccgacgccctcttcgcgctgccggccaccgaggaccgcgacggccccatggtccgcctcccgccgcccaccacccgcttcccccgcgagaagcatgtaagacccgaacctatcgcttgcatactcctctccaatctttgtgatctcccaagtatcatttgctgctgctgatctgctataatcatgtatgtggagccctaagcttagcttcactagtgtgattcgttcgtgtgaatgaaattgatacttcgatagttctccttgtatggttcacatggttctccttgctgacttgctgcggccataacattgagattctcacatgttcgtactgttattgagtcttgtgacggaatttcgtagttatgtccaacttgatgcagctaaagttagctctatatggtgtcaaatcttaacatgtaactcaagcggctggcacaatgttttttttcttgcttatctagttttttggacaacactaaatcactaatccataagagtagaaacatgctgagcgaacagttctttatattgatgtgtgcatgtacagtcacatatacagactggagaatacgatttattgcagtgtttcacttctttaacttatatttcttgtctccagctaccaaggccgaagccccctactaaatgggagcagtttgcgaagatgaaaggtgaacttttttaaaaagcaaacgttttgttcttgttgttgcctaatattaaatgtatgttttctcattaatgtccatatgttctcacttctcgatggatatatgaatgctacttgcagggatcacaaagcacaagaagaacaaacgtgaatgggacgagcaaactcaaacctggaagcggacttatggctatgaccgtgttaatgatgataaagacattccaatcattgaagccaaggcgacagatggttagtaatttgtctttctttaactaccctcttctgtgacaaggatattaccttttcctttgttcaatagcctattgcagttatcaatgctacacactcttcttcttatatacaacattttatttgttttaaagctagcgctcgtacactactttagttgaccatttctaaatattgaatgcttgccctcaattcatcttagatagagtcattttcttttggggtccttgtttgcaatgacacttgttctgaaatatgcatgtctcctaatcctgattcaccaatctgataccccttttgttgtaacttttcgctacagagcctggtgttgatccttttgctcaaagaagggaagataagaagaagcatgttgaaaagcaagaaaagaacagactagaaaacttgaaaaaagcagccaaagttggtgctttgcctaggttgttatcctttcctagtagacattgtatttatcttgtacattccttttctgtgttggtaaaccaagagccttgtgtaaatctgcaacgtaaagtacatttgtacaatggcagctcaagtttttcatataatatgtctttttttttatttgcagtcatatacaacttgctgcaacagcgttgcctatcacgggaactaaagcagacatacccaaaaaatctagaaagaaagatctcgaggatgttgctggcatggcttcatcagcaacagctagtggtgggaagttcgatgaaaaattgcctggcgagaaacctccaaaaaatcctggcaaacatagaaaggtttttaatctgaagttccctgccttttatgtgcaactatgcaccattaaaggattttataagtgcattatctgaattgattcttttctgcagttcctccctgttgttgaaggaaaaggaatgggcaaccaggagaaacagcaaaatgacaaaatcttgaatgctctgctggccaaaagttctgaggatcaaatggatgttggcagggtaatattcaggattaaatatcttgaactaatctgtatataatttattatcttggtattgccatttgttgacggggtgaactaacagcatctatctaaaaatttgaaaccaggcaattacgatgtacaaggtgaagaaggagaaacaaaggaggaaagataaggaaaagtcttcttcatcgaacaagctgaagccccagaagaaaacactcaagaaatcttcgaagaaaaaggcttaggttaattacattcttcggacctgctgtaggaggtgagcatagttttcgagactcaaggagaattggcaaattttgctgtctgtttgtccaatttgaacacatcggagaaatcttgttattgcaattgttggttatgatgtaagaacctgaatgctattataacatggttgtcatgaatatgcaatacatatgcattataatttcaaaagttctggagttcgttttggtaacttgttatcaatctaaagcaaggaacagttttctgatcttatttagttcttggattttggtaccgtgtaactgtgtatgtagtacctagcagatattttttatcctcacaattacctgagttgaaattgatatgcctataattttctagtaaggtattgaatttgcgaaattctattgtgttgttaccaagctactgtgtcgtccctctgaattaatctcaggaccaccacgcataaaacatgttagatttgacctccattgtaaaggtgaacatttgtctgtgtgtgcaaaatatggtgtggtcacgacactggggagtagccagtaggggagtagatcagtagattagggatggtggtggtaccagttcgaattaggctcatacaattgaacgacaattcgctgacatactaccaacctcagatttggtatacaggaagcatgttgttgagattctgtgttaatttgcactagtggtagaccagcatgtctgtgtgtatgtatagttgattgcttattccttggaacagcatatgatttgggcgctgtttctgcctccccttgggcagtgttgcctggtccttgccattcattgtagcctctcccatggtatcttttcggttgtagggttggggcgtttgccagtagagttcgccgctatcgcccccgtgatttcctcccaggatgccaccaaaaacagtttgctttctgctgccactcatctatgattctattccagtagccaagttatcttgttagcttgtggagatatccttttgttttcgagagaagagaacatctcaaacttgaaatctgcatgcaactattaaggagatcggcctggggatcactggttttggagtgtggaggagtgcaagggcccctgttttttttttctttttctttttctgatgatcgatgcatgccatgctgctatagctgggccaagagctgcactgtttcggctaggctgttgtggtttggttgaggccgcatcaaacagtggcgtcttatatattggtgcgcccacacatgcaaacaaatttcttgagcccggcttcgtggtgcgccatccaaatcgtagtgtctccattttggcgtctttcacatgcacaccctatcatcctttcctttccatgctcaaccaagtcatgggtaaataatatatacggccttcagttaaaatttgccaaagttgttttcttttcttttagaaaaaacacaatacatacgtagatgctcgtataaacacatgtagctatgaacatacacgcacacactatctctataagcacatctctgaagttgatttgagcgagctagttaggttattgctttgtttttcgcacaacactcaaatttgtcgaagttgataggcgtggggattttgaaatgttgttacttccttagactacccgcggccatttttggcgcgagtggcaggtagtctgcagagttcactgaaagagtgaagcagtacatactactagctgccatggcatttcaaaatgaacttctgctgcgtctgagccatgagtcctgcgttcctgaaccccagggtgcatgagggagtagtgaatggatgaggcagtactacttaacagtagtatacccgcatcttacaatagagcgcgtttcgcgagaatagcatatttttggtatgtacgtatgtcccgtttaaatttcacgagaaaagtatgttcaattccaatgtggaaattaacatgaacattttctcacgatctaaattagaggcttaattagccctcctttgaaatagaggggtttcaaaagttcgtaaaattactgttctctaaaggagcccttgtaagatctaagatgaatttgggcatcatttaagaacactatatcacgaaaatcttttttttgacagtgcaatgtctagcgcaagttgttgataacatgatggatagattatattaagacgatgcaggagagaaaacgacgggtaacaactagtgcacgcagaatggagtacgtagtacacattgacatttgacaggtgaggacgaaatctcgatctctcgcggcaaagcagcaatatacagcaatgcatctcactccaacccaatcaaacacacacaccagtcaacactgctacagcatcaatcataccatggccatggcatacattatgcatgcttccaagatcaatcaatcaaacgtagtctctcgcttaattgctctacctagctagctaatacagtagtaattattgtgctcatggatgagctatagccttagcttagttaatctggctgcctttctggagaggcagctggaaggcggaggaggaggcggtggcggaggaaggagaagacgcgagcgccacgaccaagtcgacgaatgctccgacgatgaagccatgggtcttcttgccgttggccctcaggtaccagccgagcatctcctccagccacccccagtcatggcccccgccactcatgtggctcatcaccatctcctccatcgaccgccggaagtctccgtacgggtcggccgagtcgatggacatcgccgtcgccccgtcgaacgccgccgcgtcggcgtcgacggcgcgtcccttgacgacgatggagctcgtcgactcgggctcgaagaagaggcggcggttcgacgaccggagcccgcggatgatcacctcgtcgtcgtcgtcgacgacgtcgttgacggcggaggcggcggaggagtaggagcggcaggtggagtggtcgtcgaggaagaaggccgggttcatcacgctcgtcttgtagacgcagtagtcgtcttcctcctcctcctgctgccgccgccgcttgctgtcgtcgtcgtctgcgcttgctggggcgtcgtgcctggcgaaggagagcgtcctcgcctgcgtgcacgaaggccattgccacgacgacgccgtgctcgacgacgacgacaggctacaggcatcattgccgccgccgccgccgccgccgccgccgaggaagagagaggcaacaagcttccgaaccatggctagctaactcctagctagcttacgtgcagctagctgtgtgagagtgatcgatcaatggatgaagcttaagctaggctatgtcggatgtcgctgtaaactgagttggccttttggtcggagcgagctgcgcttagctgtgcttttaaagaggctgctgcggcgtgtgcaagtagctatcaaagatgcgagcgagcgaaagcctgtcttcttcttctcttgcattgcatgttgtttaattaattagcagctacctgcacttaacacgtctaatctaatatgttagctacccatcacacacagcttaattggcagctactgatactaatgctacttaattataactgaaacttgtatgttgtcggtttacgctgcaactggagcataaaaaaaaatgtacgcatgcaggtaaggtaaggtaccaagtacgtaccattttgtcattttgagaacgcagatttgcagtcgtggctgtatgtatgaatggccagcagcaaacagcatatataccacattgatacggatgaattacatgaccgggaggtggaaccgcgcgctaattaattaattatatcatgtgtaatcgcacggccatctgatccatgttttcctgtattttataagaggtagaagttgctagctagcttgatatctattaattatacatgtacagtttagtccactgctcgcattgttctctaccagcaatacacgaagaaagcgcagcgacgtttccctgacacacaattgatcgaaatccaggatcacacgcaggccggtcaggcagcagaaaatgctagtagctctatagtttaattccccttgtgcatgcgtatcagaaatgaatactacatgctgctgcgatggtggccgacttgtcctctatgattgtataaatggattggatcatatatatattgattcatatatagggtggatgcggctgtcaatgcaagaactgtgcagccatgcatgcaggagggaggaggtgggggacatgcaagcggtgtttgctgaatttctttttgcttttcatgtgtacttctccgtgcctgatgcttgagagaattatttgaacttgccaagatcctagcttagcccatctgtcatgtctcgacctacctagctagtctcacccagtcaattaattaattggatgctttagtttcttgatctccctaagcaaaatggtttgcacaaataaactagctgatgaactcaactgatgtttgtaattagataatggtgatcaactcaactgatatatatagtgatatgatatcatctttactagtgcctgcaggccatgcactgttttagcctttagacttgagttcagaggtaatgacggatgaatagagtcgtctgaaacctatgtcttctcatgaagtttaatgaacagaaatggcagtacataaaggcaaagacatgatatcagaaatactaaatgcgtttctctgatgttcccgtcctgattttgtatctatggtcgcgacctcttgtcgtaaacttccttttgtgtactgccaacttgccattgtgcagtgttttactactcttttctgcatgtattttttttattcaaaggattagaccccaaaattaatttaagattatttatgcaagcttgcctaaccacgagaccgaatttattatagttccacctctctatatttctttctcttctacatctgcgattctcatagtactatatctcattgatcatcgatgtctgcatattcagatatggcatgaaagagaaaacaagcaaagcgaaggcatcattctaactgaaccaagaaacttgtgatacattaatggtactctctagtagtatctactaagtaggtggctgttatgaactagtatgaagtattcctaaagaaatgagatcttctaggatcacgtttggtatacgagattctagtatttccaaacatttctgtgaacaatttaaacatggcttcatgtatatgtaccagccagtcagttacaagttgcagcatatacaacattcagagagacagagaaattgctgttgattgcttcatgccgtagacaagcaacaagatcttatctaggatctcgttctaacaccaaagaaaaaaaaagctggcataaattgatgtctgaatggcataaatttgcttagcaaaacatgcagttagtgacaaaagagaaatcatggcgtttcaccgctgaatgcgacgtgtcgactgatgtaccaccaggaactccatgcatgctcctctctgctttcagttttagcattatgttaagttgagcaacaactatcaaggcatgcagctgcttcccaaagacacagaaacgactgtttattgcagcaaaaattactgaggtgttgtgctgcgattagctgaagctactggcttttgttgctgagtagcattgtgtgtgttggttcgtagtaccagtgagtcagtgttaaagctggttgatgccattgcctacttgcacactgtagtacgctgcagagaagatgcctgtggctgaaagcctgcatatgcatgcagtatggactgtttgcaaatagtattactggcagttagattacccaaaaacacatcaccagatgctttgcagcagctttccatcgcggaatcaacaccagctgcaatggacaggataagtgtcttgtcatcgcctcaaacacatgcttcacgttgatgggttcttgtttctccacctcacactttcaggctaactgcaattcaagctcatttacagagaatcgagaagcaaaggaagttttgttccttccttttgaaactccaatacaaacgagatgaccttgattcagaactaggaagttgatagaaatgtacagcagtttttaaaaatgtgcttgacaggtttgcagtaaattttggaggcagggtaatacaggagaacaacgtgtactgttgcaagggccataagcttcttactagctaacagatccactgttatggaacatgaagaaacgcagttttttgtttctcatcataagtggcaataggtctggacacagtaatacattgcctgttcatatatctcctggttggttgtagcagctgcagagaggcaaggaccagtgagggtgccttaggtactgtgctttctttcctggatcaatgatgaacacttactgtttgttagcaagataaattagtacaactttcaagggtggaaagacaaatgatcagatgaaataatgcaaaaacatgtccctcctccacagtatatactgttccttgtctgctatccactgcaaagacagctacaagaacaatgataggcggagagaggaaaataaaagattggagcatcaaatcttgattctgaatctcaaatggtcactatctcattgttttatagccatagggtgcatctgggcttgttctcttgctgggctcaattggcttacacaaattcaaagggatgtagcgtgtcagagttccaggaaggatcttcagcaatagagctctcattccattgatcaaatgaggctgtatattttccagatatgctccactggtatgataaggggatcaaatcaacgatcctagattgtttaatccatcccttctatccgtccattggaccaacaatgattgtttagctaatcatcagctgcctgagctttttttagaactgtaaaacctgaaccttttctagtcagagatgtgcttggacatgagcgtgcttcagctattaaatgttgatccgatggaataaaatttgacagtccctaaggaatatgttcgagaatctaatgtctacactagccacaaacataaaaaaatgggataagatttgcacattgcccattcatcagcatgttcttggccctgaataagtactgaattgaagcctgtttcagttatgtggcccaaaacagcattttgagaacttcaacaaaaaaaataaagcattttgagctgtatacaattcaaaaggaaggtgaccatgaaactgaaaatgttcgatgaggtcatcagttgggagacatcgcgcaacaaagccggtgattttcttatgattctcgtgcgtgtccgcgataaacaaatgcatgtgcttgctttgcttgcactgtgatgagatgcagcctaacgcagaaagcaggtccaggcaccaactaactttagattgtggagttgggcatcgttagtttgtctcttacatgtagtacaaacaacccacatgatgctagcattcagataatgagacatcatcatctggtacaattgtttcagcttaatacttttctgagaatgtaggcgtctctgcaagcatatccttgtcatcaacctaacaaacacctaactgttttcgtgcatgagaaaaacaatgactaagtagttcatttcttcttaatacgaaagcgcaatccttttgcgtattcccgaaaagtagttcatttttagagttgagtacaattgtttttttggaggttccaagttcgtctcttgccttatcctccattctgtattgtatttcagaacgataccttaagcaaaaactccataatcgtatggtgatgcctagagtaattaacattctgaacagaaatttttattcaactgcattatgcgcacggtaattaagaatttcacaattgctgcgagctttcaatagcactacacatgaagcaaagaaaatgtcagcagaggtgcagaattcgaaagaggttcttctgattttgtcgaggtagtctgattgatgtgaaatgacatgtccataatatgacgaaaacagggctactcctccttgacgaacctttttctttattacagtactctagttggctcgaggcaaagaaggactttcacctgagacagaaatagggtacgatcatctggtgacttcacttctttttacacaagcacatcgatgatcgatcctctgaaaagtttgaacaaactagttcagcctttcagcgcctggtcagtccacaaaccttgccattcaaactttgtcatcgtgtatgatttcattgttgtcatcattttcaaattttttttacgactcacaccagataatataaagttcatattgatatagcaaaaaaaaaattataaaattataaccctaaaagattgtaatcagaaaagaaacaaagaaaacaaacacaacgccaccgagagttcgcagctcctcacaccacacactagagaaaacactagcaccaaaccaactgccgctaagcgtgatcgatcgtcactaggccaacaaggggggttgcaaacaccccgtctaacactgactcaacctagtagaatgttgaaaggctttcggttattctcatgtggaggggttaaggggaggaagagagcaacagagaaggagatccactcctctctcgcccaacttgatgaagacaaccaagagccgtcggagaccaatcagagagaaggagacgaaggcaaggaacatgacctagacagcgccttccggaaggtcatggcgtcttagacgtcactgttgctgctggggagtcccaagctagggtttcgcctgcaaacctccctaccacacttgccaccgtcgccccccgagctccgccacttgcacaacctctgccaactcgacctcaaccgctccagcgccccactgccagccatgctagccctggactctggtggacacatgcagcgacggccttcgccgtcgctgaaacgccggcctcatgatcgtaggtcacggtggccgccgtgttgtcgcctacgttgtcccctccttgctgccggccgtgtcgtgcagccatcacctacaccgtccatctccgcccgccgtgtcgtgccatccatgaccatgctttcctcgcacggcgccttctcatcatgcacgcctttcctcgcgtggccccgcacctctaccggaccaccgccatcaggggtcgtcctctcttgatctggctgcggggaggccagatctagcctccagcgggatggatccgctgcgccaaaccactccggccgccggtctccgtacccgacgcatgccacctcgtctcccatgcataggagtagcttcgtcggggttgctttccccgccaccaccttcccggtggcagtaaggtgacgagggggggggggtgaggggggttgcggcgcgggtggctagggttttgcccccaagccgcctgtgcgagtgcgacactaaggttttttttttttacaaaatttatcatcatttcccgtatgtacttgatcacaaattcagttgggatcaggggcggatctagcatggggtggcggggtctcgagccctcactactggcatgaagactattagagcccccacgaagaccccactaatgaatagtctcctacgaagaccccactaatttttttaccatatgtagatggaaagagaactgtaattctatctagtttgctcagacctcactgctatttctttttagatccgccactgtttgggattcaatcatagatgcgcctcttattcggatttcagtaatgtttgagaatgatgtttcattttcttaaacaggggcggaaaattatgcagaaagtctgcaaaagaatggagataagtgcatcctgacagttcatccttcaccttcatttcaggattaatctaaaaccttatcccccctgcatttccggcgcaactgtcaagcacctgtcctgaataaactagtagccacggtgtaatcgacgaaacaaaatggactagaaaactagtagtataatgcagatttgtttgactgtttctctcattgaccggtcggctaactgaacgaaactagcatgccacgcatgaactagcaccctgaactcacactcatcgtctgaccttaaaacgagtcaatctcaccgtttcattcatcataagttcaggactactgtagccttttttttttccttcttcatgcataggtgtgtttagttcacgctaaaattaaaaatttaattgaaattgaaacgatgtgatgaaaaaattaaaaaattttatataggaaaattttgatacgatgaaaaagttaaaaactngttgataaatttggaactaaacccggccgaccatagtacactagtatgcactttgaccgaatgacacgcgctgctcgtttgactcccaacatgcgacgcgattcgctgcgctgcacacggtgcgcatggccttttttgcctttttgttcatacgacgcgtttttctctatagccgtttcatcatgacaaacaacaggggaagccgcccaattttttaacggtgaaagtttaaaccaccacacgagaaaatcaaccgaatttaaccaatcaattaaaccatctttttttccctcttattattactgtacatctgccgaaagaaatcctttcttgcagacgacgaatcaacaaattttacagcggaggagaggagatcgtatcatctcgctgccaccagcggcagcgagggtgttttgttgctgggcatgtccatgtcgagctccaggccgaagagcacgccttggtaggcctcgacgccatgcttgaggaagtagagctcccgcatccgccggaagacgtcccaggtgagcaagctgtcggaggcggcctggtggcaccgccccgccgcgcgcttcacctgcagcgccgccgccacgcgctccagcccgccgtacagctcgccgccgcagtgccgcatcatgtgcttcacgtcgtacacctcgtcgccgaagaagacgcgcaccaggttcaggaactcggccatggacctcggcagcttccgccccatgaggagcttgaccaggtaggcgaagtcgtaggcggagtggaaggtgacccacttgacggcgccgtgggagcagacgaggcccgacgacatgagcagcggcgccagcgcgctcgccctgacgccgtgcctgcggtgcgcggcgaggtccacgccgtgctccgccagcagctggacggactcggcggcgtggcggtggacgcgctggtcgaagtcggagaggttgatctcgaaggcgagcgcgggcgccgcggtgggggacgcggcgagggtgatgcccacctggatgaggtggagcgcgtccacgttgcggcggaggaggtcgtaccggtcgccggcggtgagcagggcggggtgcttggtcgggcggtggatcacgccgggaaactccgtgtccatggacacgtacgggaagtgatcgatcgcgttgcggatgatccggaattcctcctccacgttgtgcgcccacacccggcgtatctccaccggcggcgcaggctgcctcttcctgccaacgccggcggcggcgaactccgacggcacgaacgccatgccaggcggcggcggctgctgcttcttccgaccggcggcgaacaacaactccggcggcggcttcttcctggcggcgacgaactctgacggcatgtcttaactcaaagattggatggatctcggcaacgaattcgaagcgcgatgagcaattggaatttggaaaaattcggaccgaattggagatgcgagtgcgtttgcctgtttggactgcggcgagtgagagcttgcgttttataggagtccaccggcgcatccattcgcggaaggcggcaggagcgtgaggggaaagcggcgtggggagctttgagatttgtgcgcatagaggaacggacggtggccgtgcgtctgcgtttatggcgtgcgttaacatacggggttaatgattggggttaggggcgcgcgtggattgaccgtgttgcagacacagaggcatctgcccggaattgtgggtttcttttttattattatttatttggattgagttcaagggaggtggacgcattcccggtttgtttaattccgcagctgctgcagcggatgtgcgataccgtacgtacgcattcggaattctgtactaatattttattagtaatttttttcatttataattatataatccctatgttttataatgtaagactttctagcattgtctatattgtgaaacggataaagtaggagtagtgctagtatactctagtcggctggtagagtataaagtatagggaggacacatttctggtggtgctagttggtatttgggtgcagtgcaccccggccaaaacagagcactaataagcagagatgctccaagttgagaggtagtacgctgaacgtggacatgcaccaggttcggtgcatacatgttcccaccccctccgttaggtcggcttgttgcggtaattgccgacgtggtgaagttgcaaaacaaaaccaatggagcttggcgaggccactagtactactccagtagactagtcatcatcactcatgaggctgaggctgaccgaccgaggagcagcaacgacccggtccccgactcctccctcccgtatgcgtgcgttcggtagtccaccggtagtccggtaggccgtacactagtgtgcaggcaccgcaccgtcgctctcactttggcggtggccatctagtacacgtttttcttcccccatccctgtacctgtacgtgcagctgtgctgtgctttgctggaaaaccaaaaccgcaactgggacgagggagggaagggaacctcgccgctgtctcacgccaagcgctagccgctgctccatccgcaggttgctgctttcgcggtcgcggtcgtcgcgggccacacgctgcccggcccgtgcgccgtgcgtgtgaggtgagccgactcgtttttttgttttttcctagccagcggcgcggggcgagctgcggtgcggcggcggctgaagagaatcgaatgggattgggggggggggggg

SEQ ID NO: 8839 - DNA, 2331 bp, Oryza sativa
ctcaccctgcttcacgacggcatcgaaggcgacgctgcccttggcgtcgacagtgagcgcgaggatcttcgagccgcccttctcgtcccgtcggcccatgccgagcgggtactgcgcgacgtggatctccgggaaggccccgccgtcgctgaagtcctccagccgccgcggcacgaacccgccacggcggcacgggcttggtggggcccgaagactttgctgccgccgccgcgtctgactgcgccgactccccgccataccactctgggccttgcgtgccgcctctgctcgctctcgccacccgccgccggccgaagggaagagggggagagaaagagagaggtgccaccggccgaagggaagaatgggacagaaagagagagaagggagagagaggaggaaggactgatatgtgggccccacatgtcagtgggcccactttttttcttgtgtgaatgactaatgggtcccatgcatattttttaattctaccgctacgtagatgccacgtcatcatcacgtggaacgaagactcggtcaatattgccacgtaggcaccacgtggcgccacgtcagcaaaaccgcctcctaaaaccgcccagggagtcaaattgcaccggttttgtaagtttgagtagtcaagatttctggtattgcggttgagagatatgatttagattcgatagtcagttgagagagtcaaagtgatcttattcccgcggaatcccgctgcaatccatgccggcccacgacggatcggtgtaccgcgccccgcgcgcgggtcatggatcacacggacgggtgggtggtggctgcgttgacggggcagtctcgcgcgcgcgggggagacgggagacggacggcgcggcgccgacgcagcgaaagcctgagaggagaggacaacgtgccgcttcgctggcgcagtgagtggcgaccggcctagtccggccggcatccaacctgctggtgctgcgcgcgccgcccgcccgcgtggccacggtgtgcagtactacagccggccacggccggcgcggaagttggtgtaagccggtaatctccttgccgatacattttttaaaaaaaaacttttttttgcctgtttttccttcttcggatagcggccggatgagatgctctagaagcagtggcggagccaccgcccaccgccgggcgaccccgggcactcgtggcagtgaacatgaagtaaaatatgatataatatagaactgtactccctccgtttcgaaatgtttgacaccattgactttttagcacatgtttgaccgttcgtcttattcaaaaaatttaagtaattattgattcttttcctatcatttgattcattgttaaatatatttttatgtaggcatataattttaaatatttcacaaaagtttttgaataagacgaacggttaaacatgtgctaaaaagtcaacggtgtcaaacatttcgaatcggagggagtacttgtcttagttagatttgcttggggtttaaaaattttctagctctactactgtctagaaaatctagctctgtatacatgctttcatcaaaatatcattctagatcatgttttgcttgccaatccatctgcggaaactgagacctcccaaacacttgtatcactaagggcattagcagtgcgacaacacattttgctgaacctcatgcgtcacataggctcaagaacacctaagaataatgtttaacacaagtttcacagtggtacctagtctcaagtggggtccacacaaataaaaaagtattttttttctctctcccttgtcctcccagtgccacgcctcccctccccctcctccggccatcgcgcctcccccttcctcctcctgctatcgcgccttcctgataagcgacggcgccgggcggcccaagcggcgacagatctggctgcggatcaagcctccccctcccctcctcctccggccaccgcgcccctcctcatcctccggccagcgtggagtggagctcgccaatgtggatctagtggtgggcaacctcgacctcctctccggtggtgcggatttggtggttggccggtggctacaaggggaaatcaacgttggcaccgccctccctcccctcccctcccctcccctctcccctcccactgccggccggcacctcttaggagaagatgcggaggcggtggtaggtcgatggaagcggacgcctctcccctccctctccccaacggatctgccagtggcgatggttggcgggggtcttagcggcagcggcgtaggtcggcgacacagattgggcggtgacaaaaatcccggtatgcccctccctattccggtcatcg

SEQ ID NO: 8840 - DNA, 18845 bp, Oryza sativa
aacatagtgcaaataaatacgtattagctgagaaaaagctaacaaaataaaaggaaaggaaaaaaaattaacaaagatgtttgtgtttggagcagtgggggtgaggacacgatgatgtcagtgcaggtgaagctcccattcttgttttatctggaacagacgcaagtagttgagcaacccttgaaatcaaagctgctctgcctgggttcaagttgtgatcatcgtgcttgctgcttacagtaaactctgcaataatctggctgacccccttattctcgacaaaacatagaattaacagcctgaaatgtgggaaaataatgacaaactaagctcaaatatggttatcaggtgagaaaaaaaaaggaagataccagataggaacaggcccatgaattttcagatgaagtgtgcatgctagattgtttgattcctaatgactcgagcataaaatagacttaagaatacaaagcagactattgggcaaatacatgatattagtacagacccatgcagtcgaagtgttgaaacttgaaaatttgtcctacaaggtttgggtataatatttgaagttgtgaactcacagggagttgtcaaaaagaaggatgtgctatagacttataggaaaagcaaacaaagttggaccaataaaagattcaggtgtaatgaaatagaattgatagattgttcattaataagctttcaatgtttgaacatataatgttatgatcttccttagagcctactttatgagacaaagcaggaacaagagcttgaatgacttcagttggagatcctttgacaaaaaaggaatcacagatttccttccttgcacaggcacgaatctgatgtaaccacttcaaggcaacatctggacaaccaaagtgtgagaatgggattataactgaaggaactttgcaaatggcctaactgtgatgaacaatcaagaagttttaagcgtatagtaatcaaattgtagagattggtaaacaatacaaatgaagtatgacttgtagagattgtagctggcagataacattataagcaaacgggagagttgtacatgaaaaaaatatcaatggtacaagtatgtttgcagtgacaaattcaagagtaaacttacggccaagcaaaatcttagatagagtaggaaacgctggaccatggcaaaaagcatgcctccaagatccccgttcatcactgctgaggcttacaccattaataatctgaaagtacagaaaataattctccctgttacatcatggcctaaaaggatggaactccaattggctatttggctgaatcatattgaaggaagcatgtgtctttgaatatccatactaatttatctctcaagcatgaaacttgatcctctgtattctgaatgaattatcaaatgacacaggttttacaaaatgtactccctccatactcgtaaaggaagtcgtttaggacagcgacacggtctccaaaacacaactttaacttcttgtttctataaaaatatttattgaaaagtgatatatgtatacttttatgaaagtatttttcaagacaaatatattcatataatttttacattttcaaactcaacaacttgagagttattcatgatttatattcccaaggtttgacttaaacattgtcctaaacgacttcctttgtgagtatggagggagtatgctgctacagctcacctagcaaggtcctgcaatttgattacccattgtgtgaccattattaaagctataggtttatcaatttgatgcttatcaattggaaaattttgtggatgcttatcaatccagtttcggagtaattccttccagagatcaatttcctcaaatatatgcaccgcaattatgacaatacagtggctgaaatattgtccatgtaaccaatagtgttcactatgataccttaatgctccatttcggcatacagtcctaagtgattgcaagtcaaaacaaaaactcaagacctcctttttttttatcacagaccccttccatgattttttttttttgagacagagagcggagaccctcccatttcattaacgaaatgataagattcttacaaaaggttcagagcaagtaaagaaactaaacatcacacaagcccatggggcctgacccaaaacatgacagccatgttaactacagcagctcaaagatgaaaataaaccgaagacattcagcaaaacagccagcattcaacaccccaaacgcctgacttgtggattccatccatgacttgcattgtagagatcaccggctacccttccatgattattagcaatcacacatcattgtttgcgccagaaccaaaaatagcaatgataaaactacaagtcatttttctcagatgcacgaaataaaaggcctagaattagcacagagcttcacctggctcctgaagggttcgtccacggtacctacaggagagcacacgcggacaagagaggccatcagacaccccaagtgacagcgaatgagataaaggggaatagggggcatgtcggattaggattcggagcctcaccggctacggtagcggagtcgacggggaagacgatggccgcgacggcgtggatcgcgcggacgacctcgccggcgctcgacgcggcggcgaccgcgtcggccgcctccgccaccttgtccagtgctaggtcttcgaggcgcgcgccaccatggtcgccgccgccgcccgccgcggagctgcttgggttgctcgccatgggaaggggggggggcgggggaagggaaacacaggacgaacctacgagagagcgcttgagaagggtggaggttttggagcaagagtaattaggggggttttgtttggaggtgaaattacagttttgcccgccttggctgccgttggttaagataaaaatttgggggtatgtttgagaatatcaaattttcaaatgaacttttattagagaagatgtgttagagaatataaaaaaaaattgaaggaattaaaatgtcgaatttcaattgtactttttagagaacatgctaccggtagtatactattgaccctcactcccgtttagcaatttaaaaaacgtgcgcgtggaaaacaagagatgtgagttaggaaagtagtgcgcgtggaaaacgagatatgtgagttaggaaagtggagatgagaactcagcctaagctttttttttttgtaaggttagaattgatgtcattaaattttgcatatttcttttcttcgatacagcaattaactaacttttctcagttttgacttttgacaaatcccaaagataggacataaagtagtcgaattatgcatcaaaagcggatgaagcgagtatagccaactgccaagtactcctacggagcatgatatgattcgaaaataagctcaaactttcgaacgctttcattacaaccaagaaacatttcaatttcatattattcccatcatgcttcccgaagaaaccatgatgaatttatcatggttacaacagaaacatccacttctacagcgtaacaaagaatggtactagtattgttctattctgcacgtattacattctgtgtgcggaactcaacacgtactgctcgagtacaatttcagagcagagggcagggaaatgaaaagaatgccatatgtaccaggtatagttaagttaagaagaaagaaaataaaactgtgaatatatctgctagtattgtacaattatgctacgagggcaatggtcacaagatgctgcctatcaaccataggtgcaagaagagccaatacaccatgagccctagccttgcacgaggccggttcatcagaatttggctccctgagaccctacagaaaaaaatacagggcagttagactacagaaaaatacagcgtggttagactaaaggcaaataaaatattaaaacgtgtagaaaagtacgagctacgaactcgtaggaagcactactctactcccagaagacgatcataattgtcaacacgacgaaaaaatcaacataatcccatcagtgtttgacagcattgtctgttgaagtgtaagctgcttaccagatgccatcaaccctatcagcaatctgttttccttgtgctggaatcatgccggatgtatgcagtgatttaaatacacgcccttcaatacagcaaatacagcactgtcaatgacacattaaaaatgattatttaaacaacacaaaaggatgctgttacctttgtcgtcagaatcttgtgcagtaattagtcgttccgactctcggccaatattcagaacaagatggtcagatgagccttttcgcattagtctagaatgcgcagccgtagggacagatgaaattgatgccttccccgctggtccctgcagagaagtggactctattgttacaaccaaagcatagatggaatattcatacatcttcacgagatgtgctggcatgtgtagtatcagaaacaaaaaaaaaatgcatgtataagatttgtggccagggaaatcacacgaaagaacagtaatactactatctaataatattaggagtgtaaatggcatatgctaaaaaggtaatggagcaaaagaaaagaattgacaagataatagacagacaaggtttaccaaatcttcagcatcagatatctctgaaccaactgctgaggaagatgcttcaaatgctctatccatattagcctctggttgcacaagccgagcatgatgcaagtcatcaaacatcttaacttttgttgacaactcatcaattgccttttccctgacctgcagctttgctcccagttcctgtattacagacttggcattcccagattccacatttgaggcaattattagtttttccagctttgataagagtgcttgtgtgcttgtaggcttgttatcttctagtgcttcttttcctccaagatatcctaatcgctgaatcattcgttccatactaactgttatctcaagtagttcactactctttgattccagctccctgcggtttgagtcactatttctggatgcctcctttagctgctccatttcacgagtatgggattcaagatttaaatgtaaatcttcattttcatatctcaaggtatctacttcgtgccgaagtgcataaacttcatcaatgagactgaagagcttttcaataggactagaggacatagccaattctctctgcaaatgtgactcagcagatgatgttaacttatttattttctcaacaagcgcttccaattgatcctttgaaataacctcagtcatacctgaatattttacagaggacgagagttaggacaagaataaaacaagtaaataggttctaagtaggaaattgtcaataaagaatgtcccgttggcagttgcataagagaaattacctctctctgttgtattttgtgcgtgctctaatgacagcaactctatctcttttgccttcaacatattccccctttcctggtactcttggatctttatttccattcctttgcgctcatcctttaatgtttcaagatctttctccagcacacatactctttttacatacagctcatgctcctgcaaagaagtttcagcagctgattcagtttgtttcagcctcatttttaactcatctaacatggtgaacactgcctctttcatattagataacttttctgactccaacttcagtctgtttacagtagatactaaagcatctgaaaccttagtgtaatcactagcatccacatccttcaaaacagatgaagatccttcaacttttgatacaatgctggagtttcctgttgccaattctattgcatagcctagttcaagaagatcatcagaaatggtttcaatctgttggtagcaataaatacaatttgatgacattgccctcaactctttctgtagagaaagcaattcggattcttgagctctattatgagtgtccttgttttgcaattcattcctcaaggtgtcatgctcttctagagtatgagcaactttgctacttgccaactgcaaagagtgatgaaccagcgtgatattttcatccatgtaacctgacaagtctttaaaaatctcagacaggtattcagcttggttgctcaactgttcaacaacagtagagaaggacaaagcaccatcaacattcctttttctgattttgctgcttgccattctttcagtaacaaagttatcgtagtctgggaaagagagaagcattcccgattctgaatcctgcttatgaacatatgaaatggtcagattatgtttgacatgattaagccaagtcaatcggcacaatttgagatatataaagtgtaagtcaggtaaaaacattttttggttccctcgctgaaatatctaaaagtttaaaaaacagaaagcctgcaagtctcaagtcattttaccgccgtatccattgttaggaattaggaaacagttacaaacacaataattgttctggagttacaagatcaacagatccataacacgagaactgcattgcgtacatgtataatggagtaactgttatgattagaagaagaatttagctagattgattggtggtaagatggagtcagtaccaaggtcctaactttatactaaaacttcagaaagctgtgtattacaatagaaaacataaacacactgaaaagcacaaacgctaaaatcataaatcatttaaacaaagagtcatacaattgagtgcgtgtgtgtgtgttggggggtggggggagggggcattgaggccaggagaggaggggcactttacctccattgttgggtcaatctgaaaaccctttgcagcaagctgttcacgcatactcctcacaataagggccatttctctcaaggtactgaccttctttccaaattcttcagtcattaatgataagaggctgttatccattacaagtgtactaagtttctcaaggtaaacatcatgttcagttgaatgactttgtaagtttccatgacttctgtccaactcttccaaacatttggcaagcttagcattaagagcactagtttctgtttcatgcttggcatcagcttccttcttttcagcatcaagaacagaaatattcactctagcctgtgacaatgcatcttgtagtgagttaatcgttacattggcatcttcgaatttgctggcataaatagccagttcctcatttgttttctccaactcctcttctacagcagcagtatgcaattgcatctgccgcttttcttcagaaatagaagagatatactcctttgaattactcaattcatcttccaatacctttaggctggaaagggcatcagcaagctggctagcttgtgaggtaacttgttcatttactttgtgtagctcattctccacagagctcttagtaacttgtgattccttgatatattgggcaatctgacctattttgtcgataggatcctcacatgggctatcgaaaggaagagaaatgcttgatatcaattcaactagagcacccgaagaaactttggcttctgccaacatgctttccacttttcccttttcgtcaataagggaaataatgtccaactgcaacttttgagagtgtgtgacctgagaagacagatgctcaacttgctctctgagatccgtaatggcagattctcttgatgctatctcatattttagattctccatttccatgtatgttgcatcaatgtcttgttttagcttatctgtttcagagttcttttcattcaatgtatgttttaaattctctatttcagagttattctcatcaagagcatgctttaacttatctacctcagagtttttcacatccaaagcttgttttatgttctctgattcagagttcagttcatcccaagcttgttttagcttctctaaaacagagttgtttccatcaagagtttgtttcaagttttctaattcagcattcttttcatccagagcatgttttagcttctctatgtcagatttcttctcatctaggacttgcttgagtccttcacgttcctgtaccaaacccttgccctttttaacagccattgacaatttctccctaagcaaagatgatttttcctccacccgttcaagctctttctgtaatgagtccttttcatttttcagtgcgtcagtttcctgtaccattctttgtaattcaccagatagcctcatcatctcagatctatcagccttgtcttcttcaagaattattttacataatgttaattcctgatctagggtataaacttgtgtttgaagcttctcgaaactttcacactcaacaggagaggactttgctcttccttggatgttggcgaggcactgttcaactaatttgccaccgtccaggatttcatggtcttccaattggacatcagaaacctctgcaaatgccttcacaagctcagtataccgcgacgagacaacagacaattgatcactagcagcatggtacagggacatcaattcagcatgttcatttgcaagtatgtccttttcctgcttctcttcaagtagagctattgtcaagcggtcaacttcctcatgcattgaattcaacttggattcatgtgaagccagtttgtgcagcatagcagaggactcatcctgcatccgtgctgcatcctctttagcctggtacagtgaattgagaagccaatggatttgtgaatcgagctcaccagttaagactgcatgtggaaggtcagttgaggctaggatatctttaactttccgatgctctgagaagatcatgtcagcaattttcttttgctcaaccagccattccaatctgtcagccatctccaaggaaagcagatcctctggaaatgatgcttctgacattaccccttcaatgcgttgaagaatcacatcctttactgaaagggaagtctgaacagaagtaagtgcagtgttttcttcagtcagttgctcaacagcagccttagcggcttcccatgcattatatgtttctcgaagctcatccaaacattgctcatgttcattcgacttttcatccagcaaaatcttgagttcctcaactctgctctcagctgcttgcatggcatctgacttctgctgcaactctgtcatgcacccatcaagctgagctgtcttttctgccaatgcctgcttcaaggaatcacgatgctgcaccaacgacttgccctttgtaacagccatgctgagcttttctttagttgtcgataatttatgctccacctgttcgaactctgcttttgccttttttgcttcagcattcactacatccagagcagctttcacactctgaagctcttcagcaagattcttgttttcttccccaaaagtgttcaccttctgcaggaaatctgctttattcctcttgctgttaaccagttcttccgaaacaatacctaagatggtagcatgatcgcattgccctgtagccccaaaatcaggctgtacctctgctagaacctgctcaagttgttcaatatccagtaagatttgtcgatgcctctctgccagcaatgaagtcttcctttcaacaagagatatcccctcttcatcagcaccctcactgctgacgtcatattgcccaaccacagcatcaacagaagcaacaattctcccaatagcttgttctgacccttccctcgacacctcaacctccgcagacctaccgcgtaagctctcgatctcctgctccctcgcacgcaccactgagttcagttcaagtacaagtctcgagcaatcgtcaagcatcgagtgcagcggcgtcagcgatcccgacgccctctcatcagagtcctccgccggcaacgatcccgaagcatcttcccccacaagctcacgcagcatccctcggagcgccacagcctcccgtgcaaacacctccctctcttcctgaaccaaattcattcattccacgtccgcattattacaaactattagctatatcgcatcaactattgactgggtagatgaggcaaaaagcgaagcgacaccttgtacttccggcactcggcggctaagctcgactcgtcggggaaatcgatgacagcgatagattcgtcgagggagcgggcggagcgggagccaccgaggtcgtccggcgcgtcctcgaaggtctctccgctggtggcgtcgtcggcgggcatgttgacgaggacgccgccgtcggggtcggcaccggggctccgcgcttcctacacgcagcagcagaagcttccataagccgtcctcctcacgcgaagccaggtaccatgacaaaaggacggccgagacggcggcggcggcggcgggggaatacctgggaggggagctcgacgaggacgccgtcgctgctgccgccctcgtcggactgtacccggacgcgcggcggggagcggcggagcgcggaggaagaggcggacgacgaggaggaggacttgggggaggagtcggagtcggagtggtcgcccatcgcggcggccacggcggcggcgggcggcgctggatctgggcccgggggggggggtgggatccgatcaggccatcgccgaggaggaagaaagaaaaatttggggggatgtttggtccggtggagacgatggcgtgtgggccccgatccccagggtgcatggaggtggaggtggagtagcagagcggcgaaggcttggaggagactgtgcttacgagtgggacccaggactcagtgggagatgggagggtgacatgtcaccttgccgcatttgtcagctggtcggaccccacgtggcggagtgtgttaaccgggctcccgggagatcgcgtgtacttcttcgtgtcgggcccccggtggtggattttcgccgacccgttgaccagtgtaaacgtttcggttgctagtattcaatctgtaaataaaataaattctaactgtatatttatcaatagaatttgagtgtttagactgagggagtaaatgataggagtatcgtaggaaagtaagcgtctgtttggagagcttctactatggccctctttgtttaggtttataagccaacttataagccgaaaagtctaagactaaacaaacaagcggctttttcgtttgtcttttttgaagccataagccactctaacactattaagccaaaagctaggttggagaagcttttttggcttatgtgaggtagatgtatgactccaccattaaacttaggatattaaatccaccggcttataaatcatataagctaataagctgacttaaaagtctaagccaataagcttaagcctaaacagagagggtctatatcttctcccagaatcaaaagcctccaatcagtttaggtcttttttggggagcttatcccagctgcagcttttcccaaaagatgcttctgctagaagctgcctcaaacaatccacagtttctgagaatctgtaattacatattctaaaaaatgaactaagaagccagaagctgggtttcaaagcttttccagattctcagaagttggctaccaaacagctgcttctcagaatctaaagctccccaaacaggccctagattttggttcagattctgagaagttgtagttgtaaaatactatataaaatgaactagaagtcagaagctgggaaaccccacttttctaaattcttagaagctagctaccaaccagatgcttctcataatgttaagctccccaaatatgccctaaatcttttttataaattttaatgagccatagcctaaatgataactttgaacaacaaaactagataggaaaaattgcaaaaaaaaaacatccataagttatttgaaagttttacattctatcccataaattattcttttcaagtgtcaaccaacctacttagttttatttaaaaaccatcatagtattcatatgtttaatcgaatcaacatgtgtttcataaagtgtgagctgtcaaggtggcttttactgaaactaaatcatttcagagtatagtcttgatattttttttaatattccacaaataaaattgttgaggagagtttaaacattatcgtactgagttttgttgtatgaaaaaaaaagctcaaacaaatatagaaaataaatataatgcaaacacttggacaaaattgattgttttgatttaccaccccaagatagccaatgcgcacgtgcttaattgaatcaatttaataatactatattagggataacgggttgtttcgattaaacacgtacgcatcgggggtggtatttacaacaaaactaagttgagggtattgcaaaaaaaatgatttatgaggtagaatgttaaattttatgtgacttatgggattgttttttaattttttccacctatatatgaaaatggaggtccctcgactattaaaactaatagattttatccctttgaacggtacgaacgatggttttatccattgtgacgttgagtgagccggctactgatcttgaacgaattcaaggaggggacaacttctataggatgaaacatcaatattaattgaactacaatttctcaaagaataagaaaaaaataaaacaaaagcttttgtcataaaagctataggaaaatttcaaaacaaaagaagaaaaaattatactccctccgtcccataatacaagggattttgagtttttgtttgcactgtttaaccactcgtcttatttaaaaattttttagaattattatttatttttttacttactttattatctaaattactttaaacacaacttttctttttttatatttgcataaattttttaataagacgaaggtatttttatagggggctaaccactcacaagaaaaagaaaatcataatttttggatggtcacttgccaagtttccatggttggtcaagcgccattataacactttatggcgcgtaacagtttccgaggcatgggtcccaccgcccacccccggaggctcgagcagtcgagcagcgttccctatctcgcaacatcgcatcacgttcgtccgatcccctagcgtggccaccgatccgcccgtccctgctctgggcttgccgcctttttccttctcccacgacgacccaccccaagaggcccagacgggagacggcttgccgcctcttctccttcccgctccgcgccatccacctccccctcctctccctcccctccgccgccgcctggcagcttccgcatcggggggaagcgcggtagcagcgctggtctgtccaactcgaggtggtgttatccccaagatcgagaaggtgcatttggggtggtgtttccgctcggagatggtcagagggacatcgacccggcaatactgtttctagaaccaaatgtaggtaaagttcaagctctgctcttgtgagttgtggctagaagatgattacaaggccctgtttagatctcaccctaaaatttttcaccctgtcacattgaaggtttaaacacatatatgaagtattaaatataggctaaaaaaataactaattgtatagactgcgactaatttgcgagatgaatcttttaagcctaattgctctatgatttgacaatgtggtactacagtaaacatttgctaatgacggattaattaggcttaataaattcgtctcgcggtttaccgatgaattctgtaattagttttttttattagtgtctgaacaccctatataatacccgatgtgacacgccaaaactttacacccctggatctaaacaccccctaagtttatttccttctatgctactccatctgttgcaaaatgtaaggagtgaaattaatgagagagatgaataaaatgagggatgactgagacgaggaagtaggttgagaggttattattacattttgggggtgaacttgagcagtatcgcacattgagttcgggtgacgcttttttctgttgcttcctgtcaataatgtagcctcatttttgtttttactgctgatttgatgctttctttggtccgctgtttgttccaggtgattggagagattcatcagtgattgctttagactagactgtactggggatttattggtgtttataaggatggatggtgctgttcgagggcagggatgcgtggggaggctcaggagcttcaacaaaacgaaaaagaagaaccggaactgcagtgatgacatgcgaaatggtgatgacgaagagaagaagtacagtcatcacgacatgaagaacaacttgcgaaatgatgccaacgaagagaagaggaagagcagcgatgacatgcgagatggtgatttcgaagagaagaagaagtgcagtcgtcacgacatgaagaagaacttgcgaaatgatgccaacgaagagaagaggaagagcagcgatgacatgcgagatggtgatgacgaagagaagaagtgcagtcgtcaagacatgaagaagaacctgcgaaatgatgccgacgaagagaagaggaagagcagtgatgacatgcgagatggtgatgacgaagagaagaagaagcgcagtcgtcatgacatgaagaagaactcgcgaaatgatgccgatgaagagaagaggaagaggaagaggaagtgcagtgatgacctgaagaagagtgtggtaaacgatgccagcaaagaggcgacgtcacacagtgactggagaaagaataggaaggctggaagcgatgctgagcaaagggggaagaagttgttgaatggcgacaagaaggctaagagtaggaaggtgaccactccattctttgaaaagatgcggaaaataaaaatgcagcgcacgagcaaccagaatggtgagaagaatatgaagagtgacggtgacagctataagaagacagtgccgctctcagtcaacaagggtaagatggagaaagatggaacgaacaagaggactttgtctaatacacttgttgcaaaggagaggaaaatgcgacctagtgacagtatggagatgaagatgaagaaaaagaagcgggatgcatcattcgttcaacctgatgagaggacagctcagacatttagcactaaaaacaaggaaaagaagaggaaggcgccatctacaccattgaagagggagcagaaggagcgagtggctagcagtgacaataaaaaggagacgaagaaggcttgtattgttgctataggaaatgagaaaaaaaattgtagggatggcaagaagaagaaaaggaaagcagccttcgcattcttcaaatttgtgcgcgacgagttcgaggaattactggtgtgtgcagatttctaattcctacacatacttgattatgtctgttgctcataagctcttctttaattagctatccatgaccttgagacttttatttgtgcttgaaacttggaaggtacttggaaattaatatcatctaatattatcggtcattggttaatttaaaggtgaccatatgctgtattcttctttctacaatcctgcctgccattgacaaccaggactaaatcaactacacagaggaatgatgaagaggccttgtacgaacagagtcagtttcaatttgaccttgtaaattattcagttacatcctttttaccattcttgaaaaggagccaagagcaagaggtgccagagtttataacatcgtgtggaggttttctctcatctttggagacttatgtacctctccagctctccttggagtggtacctcttgtaaccttcggagaatcagaaaaaaacccaatgaatgtatggcctgttctccgtagtgcatcgttatggtgctgtagtagccttttgctgccattgacatggccattaagcaactagtcatctttcttgttgcgaccataatgataaaaaaatattttggccgaaaggatcagataagcagttatgttttctttttctctctgtttacatggatgcatgaagtatccaactttctgtcttatttttaagttggcacctgcctcgctgcttaaatatctctccatagctctcaagcaccctaaaaagtctccgtaatttcagctctgttttttcttgttcattttagtgtcttttttgtcattgttttttcttcttgtactgtaccatgatgattatccttaaatattatatgcacataatgttgatttattcttgtgcagttcataccaccagcagttgcacccagccttaaggatttaattgatcgccatgtatatcttgaagactcagaggggaagtgttcaaagatcaggctatcggtggtggatggttccctagctttttatgagggatggaacagtttcgtttcagaacattgtattaagtggggtgaatttctattatttgagtacacaccagaatcaacattttctgtgcgggtgtttggtattgattcttgtgaaagactacatttcagtgtcaaaagcggaggaaaaggtgctgtgaagaaaaggaaagaaaggcatacattatctgatgatttgatatcacattataatggtcagtatcaggactctgaagacatacacgatggccccaatgtttctggtgaatctcctaggagcaaagagcccaaaataacagttgatgctgagattggtaccaggaatctagttgctaaatctataaatgcagcttccgaaacacaagactctgaaagagttgaaagtgggattggatatggatccttaggggcactaggtaataaggttagaaatttaagcaatggggagtgtgatacaaggagtgactctgtgttctgtatccaagaaaaaacaagaagatctgaggttattataataagtgatgaagcttattcaacacaagtagacgaggataccatgaagcaaacagcaccaagtgaagcttcagaaatacatcatgtgactatcaatacacaaaaagaccttgaaagagttgtagatggtgtttgttgtgaatcctcagtagcactaaacaataagatgggaaatttgatccttggagagcccaaaaacaagaatatttcaccagcatgtagcacagaaaaaacaaatggatctgaaataactccaaccaccggtgtaattcctttaacacaagaaaatattgatacggtgaagttaaatacactttcttgcttcgaggaagacagaagcacaacaagagaatctgaacttgctgctgctattccaacaacatcagaaactcatgattcagataaagatttaggacagaaacatcaaaggaattccgttcaagtaaattctatcatagctgttgataaatatcctaatgatagtgagatgaatattagtggaaatattttcagaatatatgaagctccagcgggtactcggtgcttggagaagtggaaaaggggtattgtgaacggtcgagcagctcttgatgacattggacaggttagacctgaaaaaacacaaaaagctggagagaagttagttggtaattgtggtgcaatgggagaaagtccagttgatctacggatagagtctgatgttactgatacctgcctcaaaccaattctcaacatacctattgaagaactctcgattcttgatagcgtatcaatatccaaatgcggacgtagcaggacagaggtcaaccatttgttcaatcaaaaaggtggaagggtgctacttctcataatacctatgatgtctgaaagcctgaaactatttttatttctcaaaagcctgaaactaacatttacaaagttagcttgtttagtttgaatataatttttatttacagcgtgtactgaattgtctatttggtaggagctactgttcaactgcaaacaaaaaaggagccattgaaaccaactggtagcagcggaaatagaaagggggacaaaattgcagtgtctgtcaaccgtgtatttgctcatcaatcaggtgaacttacctagtttatttcattgtaaaattaaggagaggctgaccaatttcattttgtgtttcttgttgggcactcaaattcacccatgcagaacttcagatcccccagcaggaaaatggaaattttaccagttgtgtaaccccagtggctctgctgcctgctaaggctgaactcctggatctggatgatcattcccttcaattctgcatcccttctaccattcagaaatggcttgtgagttgtttgtatcccatggacaatttcttttgcagctcgttagtattttattaaaacaagggcagaataatccatcatatctgctttcatggaatcaagggatagaaaaagaggacttttacggtactccctccattccaaaatataaggcataaccactcataactcaaagaccaagaaataattattatcatcttgtagtttggatcatcctaataaatacaatgcatgcatccaatagaattagaaaacatgagagtggatgatttaaaaaagtaataatttaatggagaagatgctatagttaattgcctacatgtatgcatgccttatattatagaacatttaacaaaagtggttgtgccttatattttggaatggagggagtacattgtactgcaagtatatactagcagtatatagaaaaaatgccacaccaagagtgaaaaataaggacttgcacttttggattgcgatggatctacccatctgcaacgtaaggtgtcgtggtccgagtccatgacgagcaaacaccgctggaggatagctgggtggtgttggctgctagccgctaggtatgaagggaggacttaggttgggatgaagaacattgagtcaatattaaagagtcgtataagttgtacagttgtattttcagaaataggtgcaagagttatataaggagtagagttctactttcaaatacaaacatgaattattaaaatattatctagcagtgcaaaaaaccatagaaatatagttttataaaatactgctaaacaattactccctccgtcccataatatagcaacctagtaccggatggga

SEQ ID NO: 8841 - DNA, 11749 bp, Oryza sativa
agccgagcaatgtacccaagttagtgttttaattcttaaaacccgcttaacaactaaaatgtggaatggttggcctgggttggcttgggacgagctgggacccagggtcgggttgccagttcggtctgaatcatcgtaggccttgggttaaggcaggttcgtgtgggttcacggccttgattaataatattgtttagtgctaggatcgcgtttacaaaatagccttgagcaactaaatgtctttaaatgctgtttactgcaaccctaaccctttatattataattcccttgtactcccttgcatttattctgcatttgtgggtgtgtcttgttgagtacggtggatgtactcagtcttgctcaatttttcccaagtccagaagaggagttccttgaagatgaaggctttggtgtctagctcgtgcctgctgtcaagcgcctgtggtcgtcgccctagtcttccgctgtttttcgtttgtctttgtgtgctgggccttcgctgcccgtgtaataattctatttacgcttccgcttgttaaactctgaattgtatcagcttttggtgtaccttgcctcctgggacaaggattaatgcacgcacgtcaggaacgcccgttgggttatttccggtcgtgacaagttggtatcagagccacccttgaccctaggacgagccgtagatcccaagccttagctatattttcaaaaataaaaatctttggttatttgtgaaaattgtctagtctctctctgccttgctgcttcatttatcgccaaaatctgatcttttaaatgttgttttctttttgtttttgtttgtagatggccggcagcgtcacccgtcgtggtttgcacatgactggcttcgtcttggagctgcggggcatgtgcgtggtcttggggtatccacatggagtggattaccaggccaggccgctcccggagcaggagggtgaggatgcagagccccacgctggttgggaggtcactgcagtgatcctctctggctctcccgagcggacttcgctggcagtcaccgcgggtggagattccttccccgccgcttgccagaacgccgccctcctcgccatcggcacccttcaccagcgctacccggacgagttgcagcactcgccctaccgctaccaccctcgtcgcggaggagcccgcgacttcgccaccttccgggatgctagctcggaggatgacgctaccatcgtgcacctggcacgcatggtggaggcgtacgacgcggctcgtatcgacttccatcagatggtgcgccgcggtatggtcgagaacaacatgaagatcctggagctgcggcaggagaacctgcagctcaagaaggacctcgacgcggtggaggcgcagctgcatcagctcaagatcgcccagggagaggtctgccgccccaagcgtcgccgcgtctgccgcagccagaagatcaccgcccgcaagagcacctccaggcctgagcttgttcgtcagtccctggcgtggacctgcttcgtcgagacccctcgtgccgagcccgcgcccgtggttccccaggagggggaagcctccggcgttggtagcacggaggatgcgctgttgctcaccttccgccctggcccgtcgcagcagtagacgagcagttagtaggcttgcgcgtgtgttcttcctcgtttgtcttcttgttgagtcgtgtggggcatggttatgccggtgtgtggcataactgtgtcggagcctgtcttattttatttgcctaagcaacttgaactttaatgaaccaatttaatagcagtaataaatttaagaattatggtagtcgtgggtggttagttttaattgttagcttctctctctctgtttgctggttctgtgtggggttttcagatggtgacgaccaggagaaatgctgttaccggtgatggcaatcaacctgaaggcagcaaccacaaccaccagggcaacccacctccacctcctcctccgcctccgccaccaccaccagacaccaacgccattctcacccaaatcctcgcccagcaagccaacatgatgactactttcctccaccacctccaaaatccgccacaacagaatgctccacctccacctccccaacactctaaactcgccgagttcctccgcatccgcccacctaccttctctagctccaacaaccccgtggatgcgttggattggttgcatgccgtggggaagaagctggacactgtgcagtgcagtgatgaagagaaagtcatcttcgccgcccaccagctgcagggacccgcatctctatggtgggaccacttccaagctacgcagccagagggacagcctattacatgggctcgcttcaccgccgctttccggagaacccatgtgctcgccggagtcgtggccctcaagaaaagggaattccgagagttgaagcaaggcaaccgctccgtgatggagtatttgcatgagttcaacaacctggcccgttacgctccggaggatgtgcgggaagatgaggagaagcaagagaagttcctggcaggaatggaccccgagctgtccgtccgtctagtctctggggactatccggatttccaacgtctggtggacaagagcatccgcttggaagccaagcacaaggaactggagtcgcacaagcgccgcttggcgaatttccgcaatcaacagggtgctaaccaaagggtccgctacaccaatccctatccagggggatcctcctcgcagcagcaacaacagcagcagcaacctcgctccgcgcctcgacctcaattcgtggtgcgcgtcccacagccgcagcagcagcagaatcaacaagggactcgtgcgccccgtcctcctacgccagccgtgcagcctggtcaaggccacagggacgctcaaggtcagcagcgtctgtgcttcaactgctttgagcccgggcactttgcggataaatgcccgaagccaaggcgtcagcaaggccaagcgcctccccgctccaacaacggtggcaaggacgtcattcggggtcgtgtgaatcacgtgacggccgaggacgtgctgacaactccagacgtcatcgttggtacgttcctcgttcattccatccctgctaccattttgttcgactctggagcttcccactcgtttatatctgtgccattcgtggggagaaatcagttgggggtagaaaggcttaggaaccctctgctcatcaccacccctggaggggttatgacagcaaagtattatagccctgccgtccctatagaaattcaggggattccttttccctcggatctgattctgctagacaccaagaagttggatgtgatccttgggatgaattggttggctcaattccaaggagtagtggtttgcgcgagacgcactgtcactctgtaccgagggccggaacaaccggttgttttctttgcacccccagcctctgtcagaagttcagaacttcatcagataggactgtcagaaatccccatagtcagggagttcggagacgtgtttccggaagaactacctggtatgccgcccaagcgagagattgagttccggatagatcttgctccaggaaccactcctctgtacaagcgaccctatcgtatggcagcgaatgaactggccgaagtcaagaaacagttggaagagttgaaagaaaaggggtatatacgtccgagtacttccccatggggtgctcctgtgatttttgtagagaagaaagacaagacgaagaggatgtgcgtcgactacagagctctcaatgaagtcaccatcaaaaacaagtaccctcttccccggatcgatgacctgttcgatcaacttaaaggtgccactgtattctccaagattgatcttcgttccggatatcaccaattacgtatccgtgaggaagatattccgaagactgcattcaccacgcgatacgggctgtatgaattcacggtgatgtcgttcggcttgaccaatgctcctgccttcttcatgaacttaatgaacaaagtgttcatggaatacttggataagtttgttgtggttttcattgatgacattctgatatactcacaatcagaagaagaccatcagcaccatctccgtctggtgttgggaaagttgcgggaacatcaattgtatgccaagcttagcaagtgtgagttctggttgtccgaagtcaaattcttagggcacgtgatatctgctaaaggagttgctgtggatcccgaaacagtgaccgccgtcaccgattggaagcaacccaagacagtcactcaaattcgcagtttcttaggtttggcaggatactaccggaggttcatcgagaacttctccaaaatcgctcgacccatgacacagttgttgaagaaagaagagaaatttgtgtggagcccgcaatgcgagaaggcgtttcaaactctcaaggaaaagctggtttcctcgccggtgttaatcttgccggatactcgcaaggacttcatggtgtattgtgacgcttcgcgccaaggattggggtgcgtgctcatgcaggacggtcatgtggtagcctatgcctctcgccagcttcggcctcatgaaggcaattaccctacccatgatttggagttagccgctgtggttcatgctctaaaaatctggcggcactatctcattgggaatcgctgtgaaatatataccgatcataagagcttgaaatacatcttcacccagtcggatctgaatcttcggcaaaggagatggttagaactcatcaaggattatgatgtgggaattcactatcatcctggtaaggccaacgtggttgccgacgctctaagtcgaaagagtcattgcaacactcttaacgtccgtggcattccacccgaacttagtcaacaaatggaagccctgaacctaagcatagttggtcgtggattcttggctgcgttggaagccaagcctaccttgctcgatcaaatccgtgaggctcagaagaatgatccggacatgcatggactcctcaagaatatgaaacagggtaaagccgctggtttcacagaggatgaacacggaaccctatggaacggaaatcgggtatgcgttccagatagcagagaacttaaacagctgatacttcaggaagctcacgaaagtccttattcaatccaccctggcagtaccaagatgtacttagacttgaaggagaaatactggtgggttagcatgaagcgggaaattgcagagttcgtggctctgtgtgatgtgtgccagcgtgtcaaggcagagcaccagcgaccggccggactcctccaacctctccaagtgccagaatggaaatgggatgaaattgggatggatttcatcaccggacttccaaaaacccaaggcggatatgattctatatgggtagttgtggatcggttaaccaaggtggctcgattcattcctgtgaagaccacctatggagggaacaaactagcggagctctacttcgctaggatcgtgagtctccatggtattcccaagaaaatcgtatctgataggggaagccaattcacctctcacttttggaagaagctccaagaagagcttggtacccgattaaatttcagcaccgcgtaccacccgcagacagatggatagaccgagcgtctaaatcagatcctagaagatatgcttcgcgcatgtgtcctagatttcgggaagacctgggataagagtctcccctatgccgagttctcctacaataacagttatcaagccagcatacaaatggcaccttatgaagcgttgtacgggcgcaaatgccggacaccgctattgtgggaccaagttggagaaagccaagtgttcgggactgatatcctgagagaagctgaagctaaagttagaaccattcgggataatctaaaggtggcccagtcccggcagaaaagttatgcagataaccgtcgccgtgacctggaattcgcagtggatgattttgtgtaccttcgggtcacgccattgcgaggagtacataggttccagacaaaagggaagctcgcacctcggtatgtgggtcctttccgtatcattgctcggcgcggagaagtcgcttaccagttggagctgcccgcctccttgggcaacgtgcatgatgtgttccatgtgtcacaactcaagaaatgtcttcgagtgccatccgagcaggccgactcagagcaaattgaagttcgcgaagatttgacctacgtggagaggccagtgaaaatcctggacaccatggagcgcaggaccaggaaccgggtaatccgtttttgcaaggtccagtggagcaaccacgccgaagaagaagctacttgggagcgtgaagacgagctgaaggcagcccatcccgatctcttcgccagttcttccgaatctcggggtcgagattccgtttaaggggggtaggtttgtcgcgtcccaaaacgactctaaaattcatcctcaaaattgtgccgagaataattaaaattcatgtgaaagcctccaacaattaaaatgtgcaaagataaaagtcaaatgaggcttggaggatttttatatatttcctaaaagcctaaaatgtgtaaataaattttagtggaattttcagagcacaaataataattgagaagaaataaacaaagttgaaaaggtttataaaaagaaaaccctaaaagaagtccttttcctccccttttcccttcttgggccggctcggcccaactcccccccctctctcctctccccgcggcccatcggctcctccccgcgcgcgcgccgctgacgggtgggcccgcccgccaccctcgctgacgggtgggtcccgcctgtcatcttcctcctcgcgccgcgccgccgcccgcccgtgccctagcgccgccgccgccgcggattccgccgcatcccgccgtccccgcgcgcattaaagagggggaaatcactccccgtgattccctctcccgtttccccctcttttccctctctctctccctcggattcgtccgatttgaatcccgcaatcgtcgccggtgtcttcaatggagccgagatctccgcggccgtttcctccctctccggccgcgctctccccctctcggcgctatatatttgctccccgtgcctctctcctccgtttccgccgctcgccgctcgctctcgccgtcggattcgtgctagcgccgtcctcctctctctccgccgtcgccgccaaccttcggttcgccgccgtcgtcactccggacttcctcccgactcggcgccacctccatcggcttcgccgcgtcgtcgtcgaccccgtccgctcctccgtttcgcccgccgactgccggagcaccgtcgccctcgtcatcccgaaccgcgccgccgcctctcgccgcttcggtcgtcgtttccgccgccctcgtcgtcccggggtgagccgaggaccgccgttcgctttccctcttctctccgctctctcgggcgccgctccgccgcgccggtggtcgccggcggtgaccatcggggagcgggtgcgccgcctcccgtcggccgtgccggcgaggccgccttcggccgcctcccgcggctgccaggtggggcccggccgtcagccgcccgcgcccgcgggtgcggctgacttgtgggacccacggcgccgaccgccgccagccgcgtgctcccggtccaccgtggaccgagaggctgacgcgtgggccccactcccgtggacccggtccgcgcgccctctctctcggctgacgcaataattcgatttttaaattaaaatttaaatgaagaaattcgcaaatatccatttaaagagcatataaacttcaaatggccataacttggccatttgaactcggaattggaccgttcaagtctctaatttttccttaagaagtgaagaacccatttttgtgctttgtttctgctgttatgtggaatttattagtgtttgtgtcgcgaccgggaaaattgccttttcccgaacgctagtgtattaatccccgtcccaggaaaagccggggtacaccacacaaacatggtataaaagacacatctttattatatcgataatatttacattattacaaaggcacttaaggcctgacaatcaaaaataaacagcagcggactagcgggcctacggctcaatcttcacaggcgctcaactggggtataagccaggactccacctaagacatcttctccaaagcttctcttactgaagaggggaaagattgagcaagaataagtacaaccacagtactcagcaagccacaccggagatgcataattaatgcaagggagtacaaggggataataatataggggttaagttttgcagtaaacagcatttaaaagtcacttagttgccccaaagccattttataagacaatcctagagctacacagtattattaaacaaggccgtgaaccctcacgaacctgccttaacccaaggcctacgatgattcagaccgaactggcaacccgaccctgggtcccagctcgtcccaagccaacccaggccaaccattccacattttagttgttgagcaaattttaagaattgaaacactgacttgggtacattgctcggcttgcccataaccgagggcgcggctattcgaatagattatactctgatcagaggtgtacatctttacccacaagacacatcttcctcacgtgtaaccacgtgccacataccaccacggtatacagacggaagacgtgacatagtttccaacccatcctagccatagacaagagtaccgacccaatcccgcctacggccggaacacccgggacaggcaggcaggactgagcccctagcagcagggcaccaaccctctgccatatgacatctcgactaccgggccgcagctcgtgtagccttcatttgccctggagaatgtccatcgacccccgacttcatccatctccaatccgtgtacttttgtttatgactagactgagccacaaactaagccttacccactagacatgtggaagtacggtagtgctttgcaacagaggcccgaagaccggtccttatatggccgaggtgctaccatcaaaaccatgcaccccgagcccagcctaaaaccattttggggacttttgaatagagggggaggtgtgattccaattccacaataaaccaacaattccagagtgtccaggtgatatgaatatttcccaaagtctagagttggaaaacctcctaatgttacttaattaaattgcgaagcatctacctagaattaaactagtggtgtcatgagtagagagtccactagttgaggttttgtttgcctagggtgaacaaggtaataataataacaataacaataataatatggtcataacaaaggtaaataggcatggctaaataaaacagtgataacgcgggaatttaaataaagcgataatgcaataatttaaatcaacataattttacaaactggattcaatatgttcaaagatgatgtgacttgccttgctcgctttcccaaacaccggcttcaacttccacgaagagcggatcttccgaagctgcagcgtctacacgaccaacggaaaagaaaaggcttttactctaataaactccacataacagcagaaacaaagcacaaaaatgggttcttgacttcttaaggaaaaattagagacttgaacggtccaattccgagttcaaatggccaagatatggccatttgaagtttatatgctctttaaatggatatttacgaatttcttcatttaaattttaattaaaaacgcatttattgcgtcagccgggggagaggagcgcgcggaccgggtccacgagagtggggcccacacggcagcctctcggtccacggtggaccgggagcacgcggctggcggcggccggcgccgtgggtcccacgcgtcagccgcacccgcgggcgcgggcggctgacggccgggccccacttggcagccgcggggcgcgcccgaaggcggcctcgccggcacggccgacgggaggcggcgcgcccgcgccccgatggtcaccgccggcgaccaccggcgcggcggagcggcgcccgagagagcggagaggagagggaagcgaaagggacggtccacggctcaccccgagacacgaggacggcggagacgacgaacggagcggaggaacgcggcggcgcggttcgggatgacgagggcgacggagctccggcggtcggcgggcgaagcgaaggggcggacggggtcggcgacaacgcggcgaagccgatggaggtgacgccgagacgggaggaagtccggagcgacgacggcggcgaaccggaggtcggcggcgacggcggagagagaggtggacgtcgcgagcacgaatccgatggcgagagcaagcggcgaacggcggaaacggaggagggaggcacggggagcaaatatatagcgccgagagggggagagcgcggccggagagggaggaaacggccgcggagatctcggctccattgaagacgccggcgacgattgcgggattcaaatcggacgaatccgagggagagagagagggaaaagagggggaaacgggagagggaatcgcggggaatgattcccccctcattatggcgcgcggggacggcgggatgcggcggaatccgcggcggcggcggcgctagggcacgggcgagcggcggacgcggcgcgaggagggagatgacaggtgggtcccacccgtcagcgagagtggcgggcgggcccgcctgtcagcggcgcgcgcgcgcgggggagccgatgggccggaggggaagagagagagagggaggggctgggccgagccggcccaagaaggaagggggggggaaaaaagacttttagggatttttctttttataaaccttttcaactttgtttatttcttttcaattattatttgtgctctgaaaattccactaaaatttgagggctccttttagaccaaggagaatttaacaaaaattctccgggccacatttgaatttttcttgtacgtattttagggtttgccaatttcttttcgaattttaattaattctattattcctttttgaaaatgatttttattttgggatgaatttatcaggacgtgacagtttgagccttttcttttccgttggtcgtgtagacgctgtagcttcggaagatccgctcttcgtggaagttgaagacggtgtttgggaaagcgagcaaggcaagacacatcatcttgatcatattgaatcccagtttataaacttatgttgatttaaattattgcattatcgctttatttaaattcccgcgttatcactgttttatttagccatgcctatttacctttgttatgaccttattattattgctattgttattattaccttgttcaccctagattaaacaaaaccccaactagtggacactctactcgtggtatcactagtatgattttaggtagatgcttcgcaatttaattaggtaacattaggtggttttacaactttagactttgggaatattcatatcacctgggcactttggaattgttggtttattgtggaattggattcacaccgctccctctattcaaaagcccccaaaatggttttaggctgggctcggggtgcatggttttgatagtagcacctcggccatataaggaccggtcttcgggcctctgttgcaaagcactaccgtacttccacatgtctagtgggtaaaggcttagtttgtggctcaatctagttataacaaaagtacacggattgga

SEQ ID NO: 8842 - DNA, 33152 bp, Oryza sativa
tgacgcaataattcgatttttaaattaaaatttaaatgaagaaattcgcaaatatccatttaaagagcatataaacttcaaatggccataacttggccatttgaactcggaattggaccgttcaagtctctaatttttccttaagaagtgaagaacccatttttgtgctttgtttctgctgttatgtggaatttattagtgtttgagccttttcttttccgttggtcgtgtagacgctgcagcttcggaagatccgctcttcgtggaagttgaagacggtgtttgggaaagcgagcaaggcaagacacatcatcttgatcatattgaatcccagtttataaacttatgttgatttaaattattgcattatcgctttatttaaattcccgcgttatcactgttttatttagccatgcctatttacctttgttatgaccttattattattgctattgttattattaccttgttcaccctagattaaacaaaaccccaactagtggacactctactcgtggtatcactagtatgattttaggtagatgcttcgcaatttaattaggtaacattaggtggttttacaactttagactttgggaatattcatatcacctgggcactttggaattgttggtttattgtggaattggattcacaccgctccctctattcaaaagcccccaaaatggttttaggctgggctcggggtgcatggttttgatagtagcacctcggccatataaggaccggtcttcgggcctctgttgcaaagcactaccgtacttccacatgtctagtgggtaaggcttagtttgtggctcagtctagttataaacaaaagtacacggattggagatggatgaagtcgggggtcgatggacattctccagggcaaatgaaggctacacgagctgcggcccggtagtcgagatgtcatggcagagggttggtgccctgctgctaggggctcagtcctgcctgcctgtcccggaggttccggccgtaggcgggattgggtcggtactcttgtctatggctaggatgggttggaaactatgtcacgtcttccgtctgtataccgtggtggtatgtggcacgtggttacacgtgagaaagacgtgtcttgtgggtaaagatgtacacctctgatcagagtttaatctattcgaatagccgcgccctcggttatgggcaagccgagcaatgtacccaagttagtgttttaattcttaaaacccgcttaacaactaaaatgtggaatggttggcctgggttggcttgggacgagctgggacccagggtcgggttgccagttcggtctgaatcatcgtaggccttgggttaaggcaggttcgtgtgggttcacggccttgattaataatattgtttagtgctaggatcgcgtttacaaaatagccttgagcaactaaatgtctttaaatgctgtttactgcaaccctaaccctttatattataattcccttgtactcccttgcatttattctgcatttgtgggtgtgtcttgttgagtacggtggatgtactcagtcttgctcaatttttcccaagtccagaagaggagttccttgaagatgaaggctttggtgtctagctcgtgcctgctgtcaagcgcctgtggtcgtcgccctagtcttccgctgtttttcgtttgtctttgtgtgctgggccttcgctgcccgtgtaataattctatttacgcttccgcttgttaaactctgaattgtatcagcttttggtgtaccttgcctcctgggacaaggattaatgcacgcacgtcaggaacgcccgttgggttatttccggtcgtgacaaccgtttaggcaggccccgggcgggtttgagtatctgtatgtcgcgatcgacaagttcactaagtggcccgaggcttatccggtcgtcaagatcgataagcactccgcacttaagttcattaagggcattacagcccggtttggggtgcctaaccgtattattacggataatggcacccaattcactagtgaacttttcggcgatcactgcgaagacatgggcatcaagctctgcttcgcctcccccgcccaccccagaagcaatggccaagtggagcgcgccaatgcggaaatcctcagaggccttaaaaccaagaccttcaacatcctcaagaagcacggcgattcgtggatcgaggagttgccagcggtgctctgggcgaaccgaaccacaccaagccgagcaaccggggaaacgcctttcttcctcgtctacggcgcggaagcggttctcccatccgagctcaccctgaggtcccctcgggccaccatgtactgcgaggctgatcaagatcagcttcgcagagatgacctcgactacttggaggagcgaaggcggcgcgcggccctccgagccgcgcgctaccagcagagcctgcggcgctaccatcagcgccgcatccgggcccgatcactctgcgtcaacgacctcgtcctacgccgcgtccaaacgcgtgctggattgagcaagctctcaccaatgtgggagggtccgtatcgagtgatcggcgtcccccggccgggctccgttcggctagccgcgggcgacggcacagagctgcctaacccgtggaacatcgaacaccttcgtcgcttctacccctaatagggttcgggtgtcaggtttcgggctcgggccaaccccgtacccccctcgggcgtgcagggttggccgggggctaccacacatgcatattcttatttctcttctatctgtatttcaataaaagcattttcgatttcctaaaggctgtgtctgtgctgttgtttccttttgaagaatcttgacttgaaataggtcactcgtgctcgatcctgccctcgggggctcgagtcggctaaaatcgccaaaaggggcccagaaccgagccgtgccccggggcgtggtgaactccgggggggaatcggcaaaaacccacaaccgggtcacccataaccctcggtcaccacgctcccggcctggccagtctcgacacgtggatctccccaggcactagccccgacccgagccatttgaggactgggacctgggcacgagcccttgttcgagctaagacacaaaaggaccatggcacagatcatcctcgttctcatacacacagtaaaatgaaattgacacagaaatttctttattttgattgcagagtaagttaatctatacaaaaaggaggcccgaaggcttcggaagaaagaaaagaagaaaaaactatttaaagattggcggggacctggaggctcactccgatgcacccgggtcgccagcctcgtcgccactgtcgcccacaccgccgtcatcgccctcctcgtcggagctgagggcgaacgcgagccgaggggccgaaccctcgaagctgtgaacgatatggttggcggcgtcctggaaccgcgcgcgcgcgccgtcctcagtcccgggagggaactcgtccagcgccatccatggggagaagtcggggtccctggcctggtaactcgccagtacgagctccaccgctcctcgggcaaggtccctcgaggatgacttaatcgtcctctcgagctcctcggggagccgttggagagtcccggccatctccgagaggcgctgagcgaggcccccctggttggcggcgtacttcgcagtccgcccgccccagagacccgcctgccgcccggcgcggtctaaacgggacacggcgtcgcgaagcatgctgggccctatctcgcctgccagacgaagggcctcgacctccccggtggacgaattcagcgcgccctgcagatccgcgatggtgtgttcggcagctgcgaggcgggcggctaagtcgctgtcgcccgtggccgccccaccgctacgcgcccttgcatccagctcccttgcctgcgcctcgagttcagcggcccgttggttcagtgcggccctctcggcgcgggcaccttccagattgcgacgcgcttgttcctcttgcgcagcttcgcggagggacgcgctctccgccagcctttgcgctgcggcctcggcctcctcgagggctcgctcccgctcggtgagcgcatcctcgcggaggcggagtgcggattcttcttcggcacaggcggcttcgtgcgccgccagtgtgacctcccgaatggcaacggcggcctcgcggtccgccaggtccctctccacgacgcaggcacgctcttccagcgccatggcacgggcctcaagggcttcttcgcgccgccgggatgccacctcggtctccgccgcccgccgttctcgggcagcggcagcgtcaaggaccccccgggcggcgtcgagcttcttccctagctccgcctcccagctcccgtattgaaggcggaggtcgtcctgcgcctcgttcatcacggtagtggcgatgagggcagccccccgctcctcctccacctccctggcgatctcctccagcaccttccgacgggcttcgagctctgaggcatgccggcggtgtgccttgcggctcacctccaccatggcctccaccgagtgtcgcccctcttcgacgcgcgcccatgcggcgtcgagctccgcccgctctgcttgcagggcctccatctgggcacttaacccgtccaacaccgtggtgtttgcgacggccaaggcctgcaaaaggggctctgcgctcagtggggcaacggaaggcgtgggggagagccgcctcggtgaggatgccgcgcggcccggcccgccgatggacgtgccgggctcggggacgtcccccggacctggcttgtcctgagtgttgcccgagggagtgggcccaagcgatgtgcccgcggcctcgtcgcgagctgcctcggaagttgtcgccgcctcggcttggcgaagtctggcttcctcccgagcggcttcttcagcctggcgagcccggacggcctcccgggcggcctcctcggcttcccgtaggcgatccgtggcttctcgccggtcagattctcgcctccgggcctccgcggtcgccgtatcctcggcctcagactggccggacttggaatggcgggagggacgcgacgagatctcgctgaaacagaagaaagaccagaagacaaacaagatgggtgagtgaaaactcgcgttgggagaatgaatacagccacaatgggcgtgggacgaacctgcgagggggtcggttaaacgactaccttggaggggaaataaggtttccccgggatggttctgtccccccatcttgcgaagccgtttcttcttccgctccccctcgggctgcggcgtcggcgcggccccctccgggcgcctgctgctgacacgcgccgccccgccccctcggggaggagatggggaggaggaaccctcttgcttcctcttccctcgggcgtcggcagggcggcagccccccgagcccccgtcacggagcccggaagcacgaccccctcctggggtagattgttctcccctgcagctcccgcccgcgccatcatggcctcgaggagcctgctcctctgaggccccgaccgccttcatgatggtcaggatggtggcgcgatctggatcgctgcagagggggaggactccttgggggatgagcgatgcctccgcggagctgagattcagcacccgttggatcattaccttgaagtcttcagggacccagtcccatttgaccccccggtgggtcctcatacagtcctcggacccggtgtactcccaggcaccccgggcgcgccgctggagtggtgcgatccggcgacgaaggtagtcgccgtacaccatggcccctgtgagcccctgggatcgcaggcccgccaggcggtcgaggacggcgtcgtagccatctcccagatctaccggcgcccgccagctggaggcctgcgccgggggctggttcggaagtcggaggcgcgcttcgtcggcgaggggggtgtagaaccagtcgctcttccagtcatcccacttcttgtggaggacgcaaggaatgtagcggttcagcaccggcccccgcggctggaagtagcagccaccaaccaccgacggcggcgacaccggctgtacggtgaagaaccaccggaacaaccgaagggatgggcgcaccccgatgaacatctcgcacaagtgcgcgaagatggccaatgtcattaccgcgttgggggtgaggtgcgccatctggagatcgtaaaactccagaacatccatgaagaaagaagaaaatagcggaaccagccctgccattgcgaaagggaggaagaaaacggtccgccccgggtagcgtggcgccgggcgtccctcgcccagcgtaactatctcctggccggtggcagattccggcaggaagcggcgcggcagcccggcctgcctctcgctcacgatgcgggaaagcggcagcacgctaccatcgagtggagcagagccccgtgccatgacgccggaagaagagatgtttgagagcgagcgcgtgtggcgagggtagggcacaggaaacaaggagttagggcgcaagcggcgaagacaaggggaataatggcgagaggaaggaagcaaatctcttcctcggtgtctttatacccttgccaacgctgtgcccggctcctcgcttctcgcgcccactatctcgctccctcgtttctcgcgcccacgcttccactaatcccattcgcccgcttgcggcgcatgaggtgaatatgcggctgtggcagtcgagatggaacatatcgtgcgcgcgttaattgcactcgccgaccgaagtgccatcaccatatctccaggcaaaacgaaccggctcgtcccgattcgtgtgctactcgagtaatgtggcagtcttgaagaggccgctcattattgacagtcgagttaccattgccgatgtgcgtgatttgcgaccgttgggtttctgcccaactgtagagaccagccccacttgtcaccaggcctaagtaagtggcgtcacgcccgaccgcttccctcgaggagggtgatcgccctggcataacgccgggggctactgtcggtgacatgggaccgggagtatcatgactagaggtttgggcaggagcaatcacccacgtggcctgaccccctcgggggggtcgggcccgaaggtgatgaggccgcccctctctttgtctccccgagggatcggaccgctcccgtttcggccccgagggccgaggcgccccgaccccttgtgggttttgcgccgcgtgtataggttaggtgagcacggcggggctcacctaaccgcatttattgcggtttgaacgagcgcgtcacgccgcatgtaacgcagtgcagcgcgctcgtttatccggtctgtgaccggtcacagaccggtcagatcgtgggttaggtggcaacaggcggtctgacacacgcctcgccccatcccgtcaggataagagcctccaggcacttgtccctagccggagccagcgtgctagctcctggagatgacacgttggtcccggtcagatatatgctaggcttcatcccaaccgttacaagcaagacattgtatgaagaagggtgaacatgcagattgataaactgacgcgtggtggacaagaatgaccgatttgtgaccggtctgacactggtcatgtcgtcggcagacagccatgttcccacgtcgcacctgcttccggcgaaagtggaggtaggtatgggccgtcccatcagaaggtcattcggacggcaaccattacaaatctccgcccatttatgaaggaaaggcgagccaagttttagtgaaaagaggatgggtccccaccaaaaagagaaataggtagaagtggtgcatgtggtatccccttgagatataaaaggaggaccttgcccacttagggaggggatccggaccagaggaccaggggaggagagattggagactcccggaggatccaggagaagatcccacgagaggcaaaaaggaggaaaggggtttctagagtttgagctctctggttctccagctctttgtagcttcttcgtacacagatctaccagaacacaggagtagggtattacgcttctcagcggcccgaacctgtatacatcacccgtgtcttgtgtgtttccactttcgcgaacattccacagactaggagcttagaacctcacccagggcccccggccgaaccggcaaagggggacctgcgcggtctcccggtgaggagccccacgctccgtcacatgatgtcaataatatgaaatcgaaatgtttcttggttgtaatgaaagcgttcgaaagttcgagcttgttttcgaatcttatagagaatcatgcactcatgcttcgtatttggcagttggttatactcgctccttccgcttttgatgcataattcgactactgagaaaagttagttaattgctgtatcgaggaaaagaagcaagttagttttatagcaggtacaatagcatactataagagtaagtttaatagtatagtccactactagctccaattcatccatagccaatctaatagctcattcatacaatagttgcttactatactattaatatatggccccagtcatacacacactgtgttttggagtccgtgctgcagctggctacagatctgtagcccgctgctattctttttcattttttatctcataaaaatatgtttatagctaactaatggtatgctattgtacctgctctaagccagctatagacatattttaaaaagataaaagaggatagagaagtgcagtgggctacagatttatagtcagctgtagtacggactccaagaggcaatgtgagtatgacatgtgggaccagatattaatagtgtggtatatgtttctagttaactattgtatgaattactattactcaatccttcccaaattgatcatcatgtaaaagaatctaaaaattcttaaattgatcatcatataactgcatggacacggatttcagcagaatacagttaatacagcatggaagaatgtgtgcatgctatggtgtaagtggcatgaggttttaatcgatgcatggtgggagaatgtgtgtatgttgtattgattgatgtgatttaaattatccttggttttggtgtataaaatcaatttgggaaggaaggagtagattgactatagatgatttagagctagtagttggctatactattaaacttgctcttagcagctccaattctatccttataaaaaaacttagaaataataggagtaatatactactggtatcatgaataaaagtacaattgacattcgacattcttaattccttcaattatttttttggtatctcaaacacatcttctctaacaaaagttcatttgcaaattttgatattctcaaacataccccaaaattttatcttagccaacggcagtcaagccgggtaaaactgttatttctcctccaaacaaaaccccctaattactcttgctccaaaacctccccttctcaagcgctctctcttaggttcgtcgtgtgtttcccttcaccctcccatggcgagcaacccaagcagctccgcggcgagggctgcgggctcccagggcggcggccatggtggcgcgcgcctcgaagacctagcactggacaaggtggcggaggcggccgacgcggtcgccgccgcgtcgagcgccggcgaggtcgtccgcgcgatccacgccgtcgccgccctcgtcttccccgtcgactccgctgccgtagccggtgaggctccgaatcctaatccgacatgctccctattcccatttatctcattcgccgtcacttggggtgtctgatggcctctcttgtaggtaccgtggacgaacccttcaggagccaggtgaagctctgtgctaattttaggccttttatttcgtccatctgagaaaaattactagtagttttatcatttgctatttttggttctggcataaacaatgatgtgtgatttctaataatcatggaaggggtctgtgataaaaaaaatggggaagtcttgagtttttgttttgacctgcaatcacaaaggactgtatgccgaaatggagcagtaattctgccacaaaaaatagaaatggagcattaagatatcatagtgaactattggttatgtggacaatgtttcagccgctgtaatgtcataattgtggtgcatatatttgaggaaattgatctctggaaggaattactccgaaactggattgataagcatccacagaattttccagttgataaacctataactttggtcacacaatgggtaatcgaattgcaggaccttgctaggtgagctgtagcagcacacattttgtaaaacctgtgtcatttgataatgcattcagaatacagaagatcatgtttcatgcttgagagataaattagtatggatattcaaagacacatgcttccttcaatatgattcagccaaatagccaattggagttccatccttttaggccatgatgtaacagggagaattattttctgtactttcagataattaatggcgtaagcctcagcaatgatgaacggggatcttggaggcatgctttttaccatggtccagcatttcctactatatctaagattttgcttggccgtaagtttactcttgaatctatcactgcatatatactttgtaccattgatattctttacatgtacaactctcctgtttgcttataatgttatctgccagtcatacaagtcatacttcatttgtattgtttatcgatctctacaatttgattactatacactcaaaacttcttgattgttcatcacagttaggtcagttgcaaagttccttcagttataatcccattctcacactttggttgtccagatgttgccttgaagtggttacgtcagatccgtgcctctgcaaggaaggaaatatatgattcgttttttgtcaaaggacctccaactgaagtcattcaagctcttgttcctgctttgtctcacaaaggaggctctaaggaagatcataacattatgtgttcaaatattgaaaggttattcatgaacaatctatcaattctattaagtttacacctgaatcttttattggtccaactttgtttgcttttactataagtctatagcacatccttctttttgacaattccctgtgagttcaaaacttcaaatattacacccaaaccttgtaggacaaaatttcaagtttcaacacttcgactacatgggtctgtactaatatcatgtatttgtccaatcgtctgctttgtattcttaagtctattttatgctcgagtcattaggaaatcaaacaatctagcatgcacacttcatctgaaaattcatgggtctgttcctatctggtatcttccttttttctcacccgataactatgttttgagcttggtgtgtcattatttccccccatttcaggctgttaattctatgtttggtcgagaataagggggtcagccagattattgcagagtttactgtaagcagcaagcacgatgatgacaacttgaacccaggcagagcagctttcatttcaagggttgctcaactacttgcatctgttccagataaaacaagaatgggagcttcacctgcactgacatcatcgtatcctcacccccaccgccccaaacacgacacacacaaacacaaacatctttgttatttttttcctttccttttattctgttagctttttctcagctaatatgtatttatttgcactatgtttgttcctccaaactgtaagtccttgatggaaaccaaggtcattcttcaagtgtgttgtcgatcagcttcttgttgcaactgaacaagcggctatggagttggctgctggcgaagatgctaatggactagatgcctccaattctgtgttcctcttcgtgggtgaagtgatatctcgtgttagccgtcgtggatctactggtgagtattcatccttcaggatgtagcttgacgtgtgcagtgtgctgttagtttatctgtttagacatttctatttactaatgggggcagttctagttggtgcagtaatggtttagcaatgcatttgtgtctggtaggattatagtgtattcaactcaacatttatgtttgcgatggtctgctctagggtgatggagcttatccttttttgtcctcatataatccttaatccttatgcaaactaattcaacacagtggtacacatttggttttctctgatggtccactaatagtcccttcagctgaaattttaaacatttaaggtagcctgtttttgggtttttatccagtgttcacttttggcaatcacagtagacttggggtctgcaatgcttgagatgtcacccaggatagcagtgcctcatgtcatggctgatcatcctagcacactgttctagtcattaacaacttcttgtttgtaatctatgtagccatccttttccctactatttgttgtatttctgataatatatcttgctcttttcaggcattttagttgctgagctgattcctaggatccgtagtcacttaaagagatgtatggaatctgatcataaaaccataagtcctgacaagatcaagcatgtttcccaattttggtttaatgtggttgaggctattagagaccagcattctgttgaaaggttggcggaagagatgttgcgccaacttgcatcacaacatacaagcgatgaggaggcatactggattctgtggactttgtttaatcagagcttcatgcacaaaactgtttttgaggtgagaatgagatagtacatgtgcgcattttaatactatgcaacacttgacgtgcttgttttttagtttatccacattggttcatctgtgtctggcatgctacatttatctgtgaaggaaaaagtacttctgaggtttatttttttcagttagtggatgttttaggtaaggtgaatgatagtcttcagataccctgtatgtctttgttacttcattcctatgaacgacaaacagggtgccatgtatgtttacttaactttcagcatgggcttatattatgggtgtctattcagcgtataattggcatgcagcgattgatcaaataatcttcaacgtgtcttttcttttcttttctttcatcctttaattctctgtgctttcttcagggcaatgtttgttgacaaatttttgcgttggaaaacattccctctatgttgtctgagatggattcttcactatgctgtctttgaattgccaccaaattcaggcatagaaacacagaagcaaaggacatcgagcttccttggtacactgcaaactttagtcagtgtttggtccaagaaagagtttgtccaggcatactcagtggagcaacaagcttgtatcctttgaggcactcaaaactgtattacattacacactttttatttgcaaattatcatttgacttgttccccttaaacaacactcagacatcactgcagcaattgggttgtgtttggagaagatgtcaaaaagagaattagaaacaactaaagatgtattgaacaatattcttgaaggtgtaagctgtgagtatccccccccaccccccctgcattagcttatcatattattattatggtaatactgaatgctcttttgctgtaggtaggttagagagtccaattgatttaatccggaagatggccagtgctattgcattgacattttctaaagttgttgatccaaacaatcctctataccttgatgataactgttgtgagaatgttgagtgggactttggggttttatctccgaaggaaatcacagccccttcaaaggatgtagaacttataagcaaactgaaaccatctttgcctgagaacaagaaacatgctggtgagagaagggcaaaggctattaaacatgatacttcagagaacagggcaaaaatcattgagatcaaatcactagattcttgtgaaacgtctggttctgctgtgaatgggcatttcggagaggaagaatgtgatgaggaaataatgaacattgatgcctccagtgattcatccctggagccatatgatctgtcagacgatgactcagatttgcagaagaaattcacccaattaaaagatcttgctgctgcactacgaaaacctgatgatccagacggtgtaagtttctatctagtgctacctgtactttccagagcaaattattgtaaaattctgatcatcctccctttttttttacccaaggttgaaaacgctctgagttctgccgaaaagcttgtgagagcatcacctgatgaactacgccacaactcaggtgatcttgttagagcacttgtgcatgttcgatgttctgacgtggcaatggaaggagaggaagattctgctgaagaaaagagacagaaggcattagttgccttgctggtaacctgcacatttgaaccattagatgttctcaccaagttgctgtactcatcaagcgtggatgtaagtcagcgcattttgattattgatgttatgactgaggccgcacaggagcttgcggaaactaaaattgtaaggagagagctgcggcatggaaacttgatatccgacacctctccctcttggctagttcctagtgatcagggacctgctggtgcaggtccttggagggaagtctcagaatcaggaacacttctgaattggtcacaccggtatgaaagagaagttccatctagatctggtcaagttaaatcaggaaaatctcgtaaatggggtcttggaaaagctaaagatttgcagacagagtggtcaaaaaacagatttcctttatatgctgctgcttttatgctccctgttatgcaaggatatgataaaagatcacatggtgttgacttgctcaatcgggactttgttgtcctaggtaaattgatatacatgcttggtgtctgtatgaagtgcatggcaatgcatccagaagcatcagctgttgccccagctcttcttgatatgatcagatctaggtatgccaagcctaaaacaagcatttccgtgttaaagactttcttagttataaccaagtggtacgattttgacattggattttgtttctgcagggctgtttcgcaacatcccgaagcatacgtcaggaggtctgtgttgtttgcagcttcttgcatactgatagcgctgcatccgtcgtatgttgcatcatctcttatagaaggaaatcaggatgtttctactggtttggaatggatacgcacatgggctcttcatgttgcagaaacagatcctgatacagaatgcacatcagtaagtactctggtctatatctgttatcgatcacttgttcgtgttttgttcgtcgacgtagagagcaattatggtataataggatgacatttgtttcttaaaaccacacacaataataataggtcattttttgacgaacaaaggagtacagttatgctggttttgtatcaaagtttgtctgcatcgcctaatcatttcagtaacctacccttatatgctttagttttctgtaacctactcatttctctcattccttcagtatacaaattcagtgacccagctcttttcagcaatttgtaacgaaaaacaggacatatttttacttataagctggaaaccagtttttacttaaaagagaccaattcagtataagctggaaactcagtaacttttcacactgtcatctaactcctcccattggcatgtttgtcttcaagatggctatgacctgcctgcggcttcattctgagatggcccttcagacatcacgagcactggaatcggcggatcacagcaaggccagcagcagcagcagcaggtcgctaccttctaagcttgataacatcatcataccatttgccaacatgatgtgatcgatgtactagattaagttgtaaataagcatatattatcttgccatgtaatattagaaattccaggtcagctaattctgattaggcttgatattgtcatattacagggttttttaatctgggatttgaaaatgctagaatttttgtcgattcgtgtggagattgtatggaagttgtcctgatccagattaaagagaattgatgaaaattgtacccagattgatgaactgactaatagttgatgatgatgagtaaaagagaattggacgagtcatgcaggggcgaggtatccgtggggaccaccagccacaggatggggccactcctcgagcgttggatcagccgcgagggacgatccgacggaggagattcgtccggtccaggtatttaagcacaactttttgcgcttcgcagcacaaccacttttccgcatctctctctctctcgcgtctcaagagcagcggcaaaggtgagaggtgagatctctctcccacttcatcctcctctcctctgtggtttcatccgccgcctccatccctaaaccctacttcttctccgaaagcgccgtgagattcttctccctactcttcttcgatcttgctccattggtggtggtgtttgtttgcttggagtgtttggtgtcgcggtttctctcgttcttgtcttcgctgaatcgagcagcaccctgcgtcttggttggttcctgtttaccgcggtctggtcctcttttttcgtgttcttcgcttcccgtacccgtgatgttgttgcttgatgcatttgaggcgtggttttctcggagttggatgaggaggtcgacgagcaccgaagcttcatggttggtctccgttcgcctctctcccatcggagcacgttgatcttgacggttcctggcgcgaccaatgcgtgcgcgagaagttagacgccatgaattcgtttctcttctctgctttgtttttttttttggctcctgttttgcagttggtgtgttgcggaggtgtcagtttctgaatttgtataaaccaaatgccctcttcttattctttttgctgttcctgatgcaatctgcccgtcttccttacgtattgatcaagtagaacggcgcctcgttctcttctcgaattttaaggcgtttcggaatccgaaatttgctaagattttacctggccgtgatcatttttttcctcctgttcttggcttccctttcccgtgttgttgttgcttgatgcttttgaagttgggtgtgtgagtttcttggaggaggttgaagagcacggaagcttcatggtgatctcgttcgcctctcctcggaacatgttagtcttgatcttgccttccgtttctctatttggtcttgatcttgccttccgtttctctatttctaccagtgcaagctcgagaaattaaaccacatcaattcgtttctcttttcagtttgttctgttttggtatgctgcggaagtgccagtttctgaatttgtattagctagatgccttcttctgttcatttcgctgctcctgatgcaatatgcaggatgcttcttctctacacgtctctctgttttctgcctcgaaagaactctctgtcctattgtggctttgtttactcgatgctattttttcgttcaatgatttctgcatgtgtcgctccattgaattacttgtaaatcttctgattctttacctatcaaagaaacttccatctcttgaatcttgatttggcttccttctcccttaccgagatattgtgcattttttgtctgtaacctgtttttcacttctctgtgatggcgttcggtgccgtactgtactgttaggttgttcttgctttttttcttctgttcttcattctctgtttgcaattgtttaagttttgattcgccgaagcagtgccatatctaaaggaaatcgatcattcttgtacagtacactttatgcgctcgtttcctcttcttatctcactttgaaatttggtgttatgatatgtgtcagtaaagcttatatcgcgtttgtagaaaaccttgtgtgtattttgttcgcagtaataaaataagatttaggtgtaaaataatgcagcactgcaactgaagattgatacttccatgttatatatctcaaaaatgcatttaagcatttaagggccctgaatgaaagcaccaattacaccctgtgctttgagctagataagtagtgccatatcaagtttgatgattctacttcactttatttcatatgtaacctagctttctggcatttaattgatctgtattattgtttaagtgtctttccccgtttttgttaataatgttattttatatttgtattcatgttaaattttcagcaaagcaagttccgctatgggtaacagccttcctgtagaatcgaagttcacttttgaagaagagaatgacagaattaagtatgttgtgtcgtctatgcaaggatggggtgagaaaatggaagatgctgtgagtaaacttgcagccttttgtatgaaaaaaaaagggacagttctgcaaaatactgtgactgacatatgccctctatattctctagcatgcagctattctaaatcttgatgatgccacgtccacgtctttctttggtgtttatgatggccatggaggtttgctttcattctcattttttttttaatttcaaaccctccaaattgttggcgtaactgttatgtcatgctatgtttgtctgtgtgtatcactttgtttatctctgcgcatgttttgaaaactttgtggtatatgttgaaacatttacctgtcaattttcaaataaatatgatgctacagttatggataatgaacaagttagctaatcagtaatcacattcgtgtggcatgcttgcaaggataacatgaactacataaaaagaaattttaattcatgagagataaaacactgcatgaatatgagttactagtaatataaatggtgatgataatttagaggataattacagattaacaggttagtttttttttaatgatgcctattcaagtgttgttctgctactaatgttcacaacagtgttttgatttataagcttctatgcaatagaagtaatcttgatccatcgtattgagcgagacgccatactgaattgtttttttctatctcaggagctgaagtagcattgtattgcgcaaaacaatttcacattgagctatgcaatcatgaagactatcacaacgatctgattaatgcactggacaatgtgtttttaaggttattttggcctactttacataattttgtttatagctgcacttggaaatgtgggatatcattgttcgtgtgattgctgcagcatggatgagaacctgcaacagtccgatgcttggagagagttagttattcctcatgataatggatgtatgtattttctcaaggctggtgtctgtgctaagcctttcccacaggtagtaatcttttaacccctagcatcctcaaatattcatatcgtgaagaagttactcaaaattgtatttgttggacagtgtgcatattgtatctatgaaaaaggaaatggaagaatgtgtttgatatcgagactgttgttctttcttgtgatgtactttggagttggaggagatatgtttaaccctaatctcgactaattgctcctattaaaaaaggttcaattagttacatatcaattggctggtttactgagttggaggccaacaggttcttaagttctcattgcaccttggttcttatcatactatgctatccaaattgaggtattgtttgcgatatcccttcgatggttatttctttcatacattggtttggttttcagaaatgtttttctatacctgttggctttcttgagctattttttggtagccttttccttctaacaatgttgtgattctgtgttatatacttcagtttggttgttgttttcccaggcgacatatactgggccagcgtatgaagggagcacagcatgtgtggttgtcatcagaggtaaccaaatgattgttggacatgttggtgattctcgttgcgtactctcaagacagggtggcctggtatagtgattgtttccctattgaatttctggttaatacctaatttgcaagctcgttcattgtggtgcctaacatttgtgcttgtttccattttgtcaataggctattgatttatccttcgatcacaaaccatgcacaagaactgagtctgaaagagagagagttcaaaatgcaggagggagatctcttggacttaggtgtgaacaagtaatggggaattatgtagtcaaggaacaatgggtcctcggtgattttgggggaggtgtaacaatctcaagatcaattggtatagtcttgtctggatctgtttttcattgattgcatgtaatagcacaaaaagaagcacattacactgtgattggcgttttacctacttacatttcaggtgactttgctttcaagaagaacaaagatttagatcgtgaaaaacaaatgctggtatgtgatccggacatcctcgctgtaagtgtaactaagtgtaaataggtccgtttggtagaatatgaagttcagttttgccgggttgggatctgatggaaaattgccctttcaatgtcaggatgacataactgatgacatggagtttcttgttattgcaagtcaaggtctctggtaagtggtaactcttcagcaaaaaatacctgtcaataactattggatcatttttatgtcaccagtactcattggcattctcttttttttttttcctcctatttggttcatatatagtttcactcatagttccatactaattgcattgactactgtatattttccccctgcaggtcttgcgtggacagtgcggacgtggtttcttacatacatgaccgtttatcggtggtgagtcttttctttccctcagtttgtcttcttggcaggacaagatatcttagtggtgttaatcatgctatctgttctaggaaatgacttcaatcaagcaatgtaaatatcctgattttctcttttcttttaaaaaaaaactgtgtaagccctaaacctcacaaaaccatttgttagtttagcactgaatatgcatgcctggctgacaaactgccatctgctttgacttcgattctttcgctgttaaaactgctgttaccaataatgctgtgaccaattaatattgctatgcaggagggtgcagagctgcgtgtcatctgtgaggaggttgttgagttcggcttggcatcgggcgagaacactaccgtcatcctggttcagttcaagcccggcgccttccagtaccagctggtggatcccgctggatttggcactgccgtctctaacattgccagcaccagtgctgcgccggctggtgccagcgacacaagcgacgagggcgtcatggccgactcctgcgccacggctgacaccagcggcagtgccagggctgagagcggcgagctcgtccccactcccagcgccaacaacaccgtcacggatgaggtcgatcccactggcactgtcgcagccgacgacaaggtcgatcccaactccagcgccaatgccgacgctgacgacggcgctcccaaaccttctctcggcgcagtcatcgagtccgacgaggtcgccctcgatgccactgcaacgggccatcaggtggccgtgcgtcagcaggaggaattcgacccaaagaagtgttggatctgcggaaaaggctacaagaagattcttcttgaaccttcttcggccagggcgagaaacccacttctggctcacgctaagacgtgtgagtcggaagacaagaaggcgaagaagaagataaccaagtatatgatgaaagccaacgtcaccaaccagtatcattgatactgtacgttaactacttgcacctgtacgttaactactttgcttttggtgaagttttcctcattcttctagctctatgtgatacgttttggttttaaatcgattcatgcattggataatggatgttggtgaaatgaagggagtaatcagtcatatggttggtttaatgggaaagtctatttgtggattaagtagatccatgccaccatttagcagtgatggctattcggtcaagtcttccgataacaccaccatatcttcagcaactcacagtcgaatgaattatttttctaacttattttgtataaaacgaaatcctaattgcaaaaattttagatctttctgtatcctcaaggacttaagtgtgccaaaagatctcggtgggtctctccttgatatcccaaaaacttcatcccaaagttccattacaaatcccaaggttcgaattttgaaattcaaaacttgcctaaatccttgtgaatcacccaaaccctaaatccttccctcccaaaaaaattcaaattttccgagaaaatcatccaagcctataattttattattcccttaaatcctcataaattactgtgcacaaatatcaatatcaattcatgcaaaaattgcattggctgagtgcataatattaatagcgccatgtttcaaccaacaaagaaatattatatcaaatttcatttgcgtcgattttgattttggcctgaaagaagagtaacttcattgtgagatgattcactatatgaaaatataagagctaacaacgtcaatttgtgtcaattagtactaaaatcaacccaaatactataatctactctctccgatccccaaaactctcttgcgtcttgctgcccaaactcgtagaaccaaatatttatgtccgaggtgatctccttggtgttagacgaactggatgactttggtacaaatgctgtttcgccatcacgtgtaacaatgtcgacatggatagtctcaggccagtcatacagcctcgggaggaacaccttgttttgcatcaatctaagcttagtcttcctcaacattgtcgtgtatgtcccggtgaacaacgcatgtccttccaatgaccgcatcttctcccactccatcgtctcttcgttgagcttgacgacatggataggcgcaccactgtagccgacgaggacagccatgagcgcgccttggtcggactcaaacaggtggctatcaacttggtgtttgattccaaagcccttaggtttatcgggaactgtaaaattattgtcgtggttgcatggatcatacaccgccatcttcccgtcttcaccaagaacatacaacaaaccaccatggagcaccgggttgctgatcggcgccgccagaagttgcggtccttccacgtcaaagtccgttaattcccagggcccccactcgccgtcgtcttgttgggtcgcacgggcgagctgtagcgcgtacgtcgtgttgacgcaatacatcctccgcgcgtgctcatcgtagacaataaactcgaatgaatagaaaggcatctctggcagctcatacatggtgccggctacgagatcggcttggaggatcaatctaggtagacacagcgtgaggtgttgtccactggagcagcagatcctagccgcaattttgggcaccttgaggagcgtgtcggcgatctcgaaacacctgtggtagtaggggctgtagtacctgacgttcgtgacgccgatgtcggcggcgctcaggaggagaggcgtgatccacgccgggtagaagggcgacacggcggagcgccagtgccggcacgtcaatgcgaagctcgggtgggtcgaccacccgagccgatccaggacgagcacgagcatgtccaacgggagagacgaccagtcccgtagtccctgcgccgccgtcgcagtggcctccatctatctgcttggcgaatctcgagggttcgtgcaccgcaatggcctgcttggcgcgctgcgttttgtgctgctacggagctctgctttcttgacgtgtttcctccggactcatatataggtcggcttccgcttctgcttgtagtttgtatacccggcacggttggtttttgttggttgctatccaatctccatagatgcatatgtggtgatccctctttatccccggcccagattactgtttccttttactgatttaccggcccaaagtactagtactataatttgtttgaattttgatgtcgtgtaggaattcatgtcctaattggtactagtaatcgtaggtcgtaggcgtgcagatttcttcgcttctctttcctatatgccagtaattgcactgctcaaagcctctcctcgtttataaagcaccgccaaattcgttcgttttcaattgaccggccgtatcctacctgtgggacagtcggccatcaaaatcatggaggaggcaggcgatgcatctgcagcagtactggatcccaagcttgctcctctgcttctgttcggccacggcgacgccacgtccctgtacagcgtgccggcgagagcactgctgccaaggagggtgggcgacggcggcgtcgacgacatgatgagaggccaccggtggtggaccacggcgcagggctggctgctcatggcgcgccgcggctcgccgtgcactttcctgtgggaccctttcaccggccgccgtgtcgggctgccccccgaccacgacggcaccgtcctcgccgccgaaggcagcagccatcgccggaggtgcctcctctcgtgctgcggtcccatggacccggccagctgcgtcgtgctcgtcatcgaccacgccgacacggtgctctggtattgccgccccggcgacaaccactgggtgaagaggcatcagcaccagtacctccagcctgggccgcctcaccacgagcaccgcggcatcgtcatcctggcgttacgccagctcacggcgatggacggcgagttctacaccgatctcatcgaccatgtcgccgtcctcgagttctcactggagccggcgttcaccgtgaccgccgtagacgacgacgacaggaggccggcggtgtacatgaaacgtaccagcatctttgtggaatcgaacggggagctgcactccattctcttctctcacccgattggatgtgatcggattgtcgctggtgttggcgtttacaggctgagcatggcgacgacgcaggagcaaagatcagcgtgggtgaaggtggattcgctaggtggcagagtgttcttcgttcagataggctgttttggagcgtcacttgatgcacggacaacaggcttgagagggaactgtatctactactcggggttcaatgggaaagcgctgtgtgtctacgacatggaacgaggaactacggctgtaatcaaccccggagaacatcttccatatcaccagtcgcctaaaatattgatgccaaccagatgagcatttcttactccattcgttcgaaagtaatatggtaatctaaaattggatggcatgcattaaagatgtacaccaatgtagctatatctcgtctattaattttataagatttaatttcataagatataatatttttctatgaaacggggtaaaaatgacgggagatttgcaataatgacactgcaaacattgacctttgctataatgatactggacacatatttcatagacacatatggacccatttgtcatccactcggagtgtcaagacagcgaagccctaatgtttgttgtcccaatattgcaattttctctaaaaggaccctgggtgttgcagcgagagatcttgctatgaatgatagctcaacttggtaaattatctttgagaaaatagtttacaaaatattaaaatccagaagaacaaaataagagtcaggttcaactcaaagccaatttttcgagtacagtatatatatgaaaatgggtactcctagggagtacatactcccgctcctattgaccgtccatcgaagcaagccccgatgaagcccgttaccggatccacacgcggtggacaaatttccgtccgcggtaatcggaaaatcgaaacaatgttgagctcgcatataaatccctctcgacagccctgatcgataaatcaggttgtcaacgggcgattcagagcgaacaacggcgattttgtgacatcaatccatggcacaggtgatatgagattctctttccgtcttctttgcttttctcgtggagcttcctcttgttatatcagtttttattgctcatgcacgagaaacgatctttaatacctgttcgagactagtaatcgagactaaactttttgatgtttaattagtaccaattgaaacaacatgtagtaaagatgcatactaagtaaaaaaaaataatagtatgtgagatttgaattcaacatctcgtagcataactgtacaatactagcagatatattcatagttttattttatttcttcttaacccttgtttagttctaaactttttcttcaaactttcaactttttcatcacatcaaaacgttcctacacacacaaacttacaacttttccgtcatatcgtttcaatttcaaccaaacttccaattttgacgtgaactaaacacacccttaacttaactatacctggtaggcattcttttcatttccctgtcctctgctcagaaattgtactcgagcagtacgtgttgagttccgcacacagaatgtaatacgtgcagaatagaacaatactagtactaccattatgtagatgtggatgtttctgttgtaaccatgataaattcatcatggtttcttcgggaagcatgatgtcggtgacatgggaccgggagtatcatgactagaggtttgggcaggagcaatcacccacgtggcctgaccccctcgggggggtcgggcccgaaggtgatgaggccgcccctctctttgtctccccgagggatcggaccgctcccgtttcggccccgagggccgaggcgccccgaccccttgtgggttttgcgccgcgtgtataggttaggtgagcacggcggggctcacctaaccgcatttattgcggtttgaacgagcgcgtcacgccgcatgtaacgcagtgcagcgcgctcgtttatccggtctgtgaccggtcacagaccggtcagatcgtgggttaggtggcaacaggcggtctgacacacgcctcgccccatcccgtcaggataagagcctccaggcacttgtccctagccggagccagcgtgctagctcctggagatgacacgttggtcccggtcagatatatgctaggcttcatcccaaccgttacaagcaagacattgtatgaagaagggtgaacatgcagattgataaactgacgcgtggtggacaagaatgaccgatttgtgaccggtctgacactggtcatgtcgtcggcagacagccatgttcccacgtcgcacctgcttccggcgaaagtggaggtaggtatgggccgtcccatcagaaggtcattcggacggcaaccattacaaatctccgcccatttatgaaggaaaggcgagccaagttttagtgaaaagaggatgggtccccaccaaaaagagaaataggtagaagtggtgcatgtggtatccccttgagatataaaaggaggaccttgcccacttagggaggggatccggaccagaggaccaggggaggagagattggagactcccggaggatccaggagaagatcccacgagaggcaaaaaggaggaaaggggtttctagagtttgagctctctggttctccagctctttgtagcttcttcgtacacagatctaccagaacacaggagtagggtattacgcttctcagcggcccgaacctgtatacattgcccgtgtcttgtgtgtttccactttcgcgaacattccacagactaggagcttagaacctcacccagggccctcggccgaaccggcaaagggggacctgcgcggtctcccggtgaggagccccacgctccgtcatctgacgcgccaggtagggggttctgcgtgtgtttttctaagctctcatactctttcgtgtgcgccaagcttttcctgttcagcccaatggctaaacaagcaaaagcgcacaagctctctccgagtgttagcggtgacgacggggagccgaacccacgccgtcgagctcgtactccaccgccccctccacgccaaagtcctaggcgggaggaggcgctcgagagggtcgaaggatccgcgacttcgacatccacgggtgatggagaagggcgccgagatggggagcgtcgcctcctcgtctacggcgacggtagcacgccccagggcgcgctccaagctgcgggcgcgctcctacgtcacccgcccgtcgtccctgacccggagtctccagcccaacgttggctggatgacgtagccaacttggtcatgacggcacggcagcacctaggtgttggtgggcggtcctccgccaccaagacctctggcgctgctaccaccggctccgtgtcgtcaaggcggagggcgcggcgagcggcggctgttgctcgccgttcggctgccactccctcgtcagcacctctgacccgggaagatcagcgtggggggccagatgcccgcatcggtatcgagcgccggcgtaatggtcgacgtgctacccacgcaacggagggtgcctcctcgtccggagtgtcacctcaacacggacgcggggatcagccctccgtgcccccggttggtggtgtcggctgtagagcctttgtagcgagccttcggaacgtccgttggcccccaaggttccggcccaccatcgccgaaaaatatgacgggagcgtcaaccccgccgagtttctccaggtctacacgaccgggatcgaggccgccgggggtgatgacagggtcatggcgaatttctttcccatggccctgaagggacaggcgcggggttggctaatgaacttgccacccgcgtcggtccactcttgggaggatttgtgccaacagtttaccatgaactttcaaggcacatatccgcgcccaggtgaagaagcggacttacacgcagtacagcgaagggatgatgagtcacttcgctcatacattcagcggttctgtcaagtccgcaacaccataccatgcatccctgcacacgcggtgatctacgcgttcaggggggtgtgcggcacaaccgcatgctcgaaaagatcgcctccaaggagccccagactaccgcggagctttttcagctcgcggaccgagtggctcgtaaggaggaggcctggacctggaacccctccggttccggtgtggcaacttcggccgcccccgggtccgctgctcagacagggcgacgtgacaggaggaggaagaagaggtcggcccattccgacgacgagggtcatgtcctcgctgtcgagggcgcttcgcgggccacccgaaaggggaggcctgcgagcgacaaaaagaaggaggccggcgctcccagcagggagcgcccaaccggcaagtggtgcatcgtccacaacacctccctccacgacctcgcggactgccgcgcagtcaaaagtttggctgagcggacgagaaagtgggaggaggagaggaggcaggagcgccgagagggtaagtccccggcggtaccctccggcaatcggcgaagtgaggccaagcagaaggcccccgtcgaggacatcgatggcggcgatgatgacctaggctttcaggagcctggggccaccattgccactgtcgatgggggagcgtgtgctcacgtttctcgccggagccttaaggccatgaagcgagagcttctggccgcggcccccactcatgaggcgacgcgtcgggcgcggtggtcggaggttgccctcaccttcgaccagaccgaccacccaccgtgtgttgcccggggaggacagatcgcgatggtggtttcccccaccgtttgcaacgtgaagttggggcgtgtcctcatagacggggggggggggggggggcagccctcaacatcctttcccccgcggcctttgacgccatcaaggccccggggatggtgctctggccgtcccagccgattatcggtgtgacgccggggcacacatggccgttaggtcatatcgacctaccggtcaccttcggtggatccgtcaacttccgcacggagcgggtaaacttcgatgtggcggacctaagtctgccctacaacgcggtcctagggaggcccgcgttggtgaagttcatggcggcggtccattacgcttaccttcagatgaagatgccgggccccggtggccccatctctgtccatggcgacctcaaagtcgcgcttgcttgtatggagcagcgcgcggatcacctcgccgctgcgtccaagcccgagggtggcgacgagaggcttggcacctccgttcccgccgccccgaggcagcggatgatcacatgcgacgaggtcccggtcaaggaggttgccctgggtgacggcccgtccaagactacacgaatcggtggtcttctggatggcaaataggaagacgcgctcgtctccttcctgcgggcaaacgctgacgtcttcgcatggagaccggcggatatgcccggggtccccagggaggtgattgagcaccgtctcgccgtacggccgggcgcaaggccgatccggcagaaagtgcggcggcaggccccggaacgtcaagccttcatccgcgaggaggtggcgcgacttctggaggccggattcatccgcgaggtcatccatccggagtggctggcaaacccggtggtcgttcccaaggcgaatggcaaacttcggatgtgcatcgactacaccgaccttaacaaggcatgtcctaaggacccttaccccctgcctcgcatagatcagattgtcgactccacagcggggtgcgaccttttgtgttttctagatgcatactctggttaccatcagattcgcatggctagggaggatgaggaaaaaactacattcattacccccataggaacttattgttatacgacaatgcccttcgggttaaagaatgcaggtcctacttttcaacgtactactcgaatttctttgggtagccaaataggacgtaatgttgaggcttatgtcgatgacttggttgtgaagacgcgcgaccaagaaactttactttcagatctggcggaaactttcgagagtctccgctccgcccgcataaagctgaaccccgataagtgcgtgtacggtgtacctgcgggcaagcttctcgggttcttggtctctgcccgaggcatcgaggccaaccccgagaagatacgagctatagagcggatgcgcccccagcaagcttagggatgtgcaatgcgtcaccggttgcatggccgccctaagtcggttcatatcgaggctgggagagaaggcgctacccttatttaagctcctcaaacgctccgggccgttcacttggacggaggaagctgaacgtgccctcactcagttgaaggcgtatctcagctctcccccagttttgatcgccccggagccagatgaacccttgctactctacttagcggcgaccccgcaagtagttagtgcggcgttggttgtggagcgcgatgaggacaatcctcattccgcgcatccccaccctgtgctggcttggcccgggagagagcagggaggagaggcccccgagccgaacggtggcccaaggcccccgacgaccggagctggccctctgcccgcttgtcagacggtgccaggtgcccccgacccccaggatggcccgggggccactgcgggaaggccgcacctatcgccctctgacctcgaggttaaccctgtgccgactcgacccgggagagagcagggagaagaggcccccgagccgaacggtggcctaaggcccccgacgaccagagttggccctttgcccgcttgtccgacgatgccaggagcccccgacccccaggacggccccgaggccactgtgggaaggccgcgcctgtcgtcctccgaccccgaggtcgtcggcacagaagacgagtgcgccccgcgaggccgcttggacgaagagcgccccagggatgcggcccctggcgaagaggatcggccccaccgaaaggtgcagcggcccgtctactttgttagtgaggccctccgggacgccaagacccgataccctcaggcccagaagatgctttatgctattctgatggcttcgaggaaactgcgccattatttccaggcgcatcgggtcacggtggttacgtcttaccccctcggccaaatcttgcataatcgagagggtataggacgggtggtgaaatgggcaattgaactttctgagttcgatttgcactttgaaccacgtcacgctatcaagagccaagctctcgccgattttgtggcagagtggaccccggctcccgaacccgtctcactccccgaggccagctcgggcccctcgcagctgcctcacaccgcccgctgggtgatgcagttcgacggctccctgtctcttcagggcgccggtgcgggggtcacgttgacctcgccgagcggagaaatcctcagatacctggttcgcctcgattttcgggcgaccaataatatggcagagtacgagggactccttgcgggacttagggtggcagctggactggggatccgccgcctcctggtgttaaccaggtctgtatggagtaccggtgctctgacccgcagatggatgcttacgtacgccaagtacggcgtatggagcgccatttcgacgggatagagcttcggcacgtgcccagacgggataacacgattgccgacgaactctcacggctcgcttcctcgcgagcccagaccccaccgagcgcctttgaagaaaggcttgcccagccgtcggcgcgacccgaccccttaggggagacggacgcgcctgaccggcccccgaggcccgtcggagtccaggcctcgggacccgaggggagcgctcccagctcccttagattgattgcttggatcgctgagatccaagcatacctcacagataagactctacccgaggaccgcgaagggagtgaacgcgtccagcgcatctccaaacgctacgtgctggtagaagggaccctctatcggcgcgcggctaacggaatcctcctgaagtgcattcctcgggaacaaggcgtcgagcttcttgccgatatccatgaaggcgaatgcggagcccactccgcctcgcgcaccttggttggcaaagcctttcgtcaaggtttctattggccgacagctctcaatgatgcggtcgacctggtccggcgatgcagagcgtgtcaattccacgccaagcaaatccatcaaccggcccaggccctgcagatcataccactttcatggccatttgctgtctgggggctcgatatcctgggaccgttgtcgcgtcccaaaacgactctaaaattcatcctcaaaattgtgccgagaataattaaaattcatgtgaaagcctccaaca

SEQ ID NO: 8843 - DNA, 11845 bp, Oryza sativa
agtccccctagccacctcagcatcaccccgccacattggcagggggacggcgccaaagaggctggcgccgtcctgttgaacgacggcgccagccactctggcgccccaaaaaggaccatttttcggataagtttttctaagggtctacttgcgaaataagtttttcaaaaggaccaaaatgtgaaaaatccagcaccacgcgacgcatccggtcgggaccatcccttccttccctccccttccctgccaaactcccagcttcgcgctgcctcgctgccgctgccgccgccgccgcgacccccacttctccgccagcaaagcgagctgctctgctccggttgccttcctccctaagcctgctctgctcgcgggcaccagattcggcgggcagcgaagcagacagctctctccgcccctgccttttctgtttcttgattagtataatatcaattaggaggcttttctttgctttcgatgggtgtgtgcgtgcgtgttggtaattttgattagttagcggcccatcctagccacgcgacgccgatctccagggcgcggctgttcttgccaaaccgcaaccaccactagcccccacttcgtccggttttaattttcaattatcttggcagttcgtgagcctttcgttttcttggggctccagggtttcgcgtctctctctggtttggactttgagacttgacgacgctctggtgagcggtgagtttcttggaaaattcttgctgcttgactgcttttttttttctatccgtttcctggagagattttcggtttactcattgttgattttgccgtgattgggttgggcagggttgatcggcgttgaggaagagattgggcggaaggttgtcgatggagccgccgtctgggattcgggcatctgcctggagcttcttcaagttcctgcctttcttccttggccttctcctcctggggatcatcaaaggtgaagagaaaacactggttgtattggttcatcttgtttggttgcttctgtttgtttgtgctaagaaagtattgtcatgagagtattagaggagaacttcacatagcagtgtctctgtaattatgtactgtggaattgtggcgcatttgttagtttttgatcagaatggcaagccgaagatctctctgggtgacccatttgcattttccttgcattagggtagtttggttgagtgggttggaattggaatcgctcagaggatgtcattgttttcctttttccttcttttttggctgattagttaaagttttttggattttagcctctctttttttttttgttctggttcagctggagttcgtcacttgcacttcatttagactgattgcaactgtccattgcaaaaggggaattgaagtacggtactaggtatctgtaaattccagaatgcaaaatcgttgtacgaacttaaatgccttttcagcatatgatcaaatactacttagtaatttttgccgtcccatgttcccatttttgaacctcagattctgacttgcaattcctccctacgtgttaattttgcctatgcaggtgctttgctcttcccatgggcatggcttatcatgatgatcggaatctctgcactcgttcttggcttatggcctatgcatgtgatctggacatactactgcatcatcaggtttaggattcacaactcagtacagatccgttccaaagagaattaccacataattatgaaaactgtacttatatatgcttgtcatctttttttcggaaagcagatccaagcttgtcgggcctgttgtaaagctgcttcttcttgtcgccgcatctgtgattttagtcttatggctcattgtcgggatcgtgggaagtgtcctaattggtgtggtgtatggttttctcgctccagtaatggccacatttgatgcagttggagaaggaaaagaaagaccactataccactgttttgtggtacattttccttttcgttgatttactctggcattttccttgttcttacttctaaagatttattccttcgaaaaaataacttctcaagttctacatcggtatatgcaacttgaaatgcaggatggaacatggagtactataacaggaagctgtacagtagttagggacctgaaagatttattattgcattcatatttttcaataatggatgaccttcgttttcatgcacctcctggaggagagccatatgaaataaggtttgttttctcctttcaaggttgcattttattgtcaggacatggaatcttcatctaagattctaacagtgcaaccttctcatgaattcagttattgtttttgctatctgggacctttgttcttacatgcatgaataattaaggtttgcaatagattttgaactgaaaccttaatttacaatgatatgtgggagttttccctcataaatttaacttcaccacgctacaatttcaaaattggtgctgtttatatttatttctgaatgcccgccttgatcttattttcttgaagaattccatataacaaagtcaaataatacttctacatctcccagagtgcttgacattcctggtgcattattcgctgctgcgtgtggatttctagtggatggaataatgttcacactaattgccttctacaagttccctgtgatgcttttcaaaggatggaagcggctgatcgaagacttagtcggcagggaaggacctttcctggagacagcttgtgtgccatttgctggtcttgctattcttctgtggccatttgctgtttttggagcttttctagcctccatcatctccagtattcctttaggtgcttttgctgctgttgtggtttatcaggtagccacttgctgaccgtgaatatttttttttcacttctagtataaattgatctgtctgaggtgaattcatgaagcctaaccatgtctctgtgccaggaatcctcgcttatcatgggactaaattatgtaatatcatcagtggccatctttgatgaatatacaaatgatgtgcttgacatggcaccaggatcctgctttcccaggtatgcacgatgctctttatgttttgaatcctccttgtctgaatgatacaagctaactctaacattctattactaggtttaaataccggaaaaatgaagcttcgacagagggtggttcattatcaaggcctgcctcatttaaggacaagcaagacgggaagaaagctccatcacgtgttacatcgtttaagggcagctttgatgagttcaatccatttaaggtgatctcttctaggctaaaattggcagattttgttgaatcattctactatattaggaggggcaacacctgttcagacttctagagattacactatcctgctcgatcgtcccattttcacttctcatttgcacatcccatgaaagtctgctttagactcgtgcaaatctgtctgattgattttttgaatgaaaaaaaaaatatctgattgatattatgatttagttgctagatcacctgtttgaggagtgtaagcaccgtggagaggttctggttgctgaaggagtgataacaccaaaagacattgaagaaacaaagtcaggaaaaatcgggattggagtacttaatgttggtttgccggcatatgttattcttcacgcactcattagatctgcaaaagctaattctgatggcctaattttaagtaagtaataaaatagtttttcatattcgaaaacaggtgctatgactttgcttgactcaccttttgaaatattatgcaggtgatggttctgaaataacatctgataacaggcctaagaacacaatctttgattggttctttgatcctctgatggtcatcaaagagcaaataaaagcccagaattttacagaagaggaagaagcatacctcaagaagcgagtgctgctgaccagtgatccgaagcgcctcaaagaggttgttcctcatctgccatcatcactgaatgagcgaaaacaagctgaaatcgacgcactttcccggaggtacttctgttcatcacccttcctgttttttaccaactaaagttcttttttttctaatctgtttttaatcctatgcaagattgcaaggaatcacaaggtcgatatcaaggtacccaacggccaagcgtcgtttcgacgaccttgtcagatcactctcggaagagctcgagaggacaatgggtggcagccaatctggcagtgtgtcccagatgcagaaactgagaagcggcatcagccgaatgctcagccagagatccatggggaagaggacgagcaaccgtggtgatgatcgggaggcgcagttgacaattgatccctaacatctccagaaagttcagacagaatttcttcgtcgtctttctagagctactttagctgtcttgatttgtacagaactgtttagaccggtgtatgaactaattctaaccactcttgaatgaaatggatgttgcaagattctgtgtttttggaatcaagcccacacatcttagaataatcggtgcccccaaatacgatgccacctggcaagtagattagtagtagtatgcctttgcatattcattgtgcttaatctctactttggacttgttcctggaatgagtagaatctggaattctggatagaccctgtctgcttgaaaggaacgccatctcaagaagaagctgtatccccaacaatacgggaaaaagagagagaataattctgaaaggcatactcaaatttttcgagttaatttcagttctttgaaatctggcgttacagtaggaaatcaaggactacaggttcatgtttcataatcagtggaaggaatataactcacgatctaaacactgggaatgtaatgtatctatgaagttgtacagcggagccacgtacttgtccaacatgctcaggaaacagtaaaatctcaaacaagaatgactaatctgaagcatcactgcgctttcttcttagcatctttggcttgccccttcttgcggatcttgatgcacattcccaggcgaatgctgtcaatgagtgactcggggagaatggagatcaggaaccacattacagagtgtggccagtacggtgtgcacctcggctcatagcctatgtgacgaatggcagcacgggcgtaggtgtccgcggatgggacaaagaacgaggatttcctgatagaggccatctttgttgccacatacaagggcacctgaacagatcacaagtcatttaagtgtgcaacagttcatatagaagaaagaacagtatctatagtaacaacaggcagggaaattattcagatgtttctttctttcttttttttgttggaccaccaagtacactcaggagacttcacactactgaggtgctctttgtttctcatttacatatgcaatttatctaataatctattttctttttgaatcaggaaggggcattttagataactaaattttcacatgacagataaggttaaaagtagggacagctcagtaatcagtaaaaaaaaaaagaaacgatcttaaaaaataaagtagatgatgagaaaataatggttttatttgagaaagcctttgtcggcatttggttgcatctatgtgcattatgcaatgatttatccttagcagtcttaccaacttcagaaacactctagttaatttagagaacatattgtataaagcttctaccataatatatacaggagaccgattaagacaagtggtgtattctgttttttgtttgaaatttcagttgctgacaagagatatgtaggaaaaaccaaacaagcacttaggtgattatggccataaaaggttatagtcttagataaccaaacgttctaatacaaggaaaatcagatgttgagcttgcaagaaccgcataatggagagatactttgagaaacagaaactagtaattacctggcattgcacatcaatacccttgctcttgtactcaacataaaggcatcttgagaattggtcaacgtaactgagaaacaaaaatttattagtctcagtcctatgttagctaacataggtagattgaaatgaagagagagagagagagagagagagagagagcatcactgttctctccagcagaattaacaattcctatgaaattgtaggaatatatatgctagtaatacatgttaatgtgttcaatttgcatggaaatgggcaaacttgcattaagttgtagagagtacacaagtttatacagaaacagcttcaactaaaaaaatatacatgaggagaaatggtgactttattcatctttccccgctatgtacctctgcataatgccaagatttacgcacagaaaaaagggagaaatgatccaactgttcatacgtgcgcgtggtttgctagcatattttttactcctacatgattgtgctagtgtgctgcaatatttcttggtcttggactcaagatgagccatatcccatgagaatagacccaccaggtactccagttttcaaagcatctagttactgtaacaaacccgtcagaaacaactgcaagtgattttattaatatactatggcatgttaaaaataagcaattcacattcttctaattcactaacagaccgctgactgatttcacaacagatctgaccacaacttcggcatatcacaagctaaaaaggcactaaatgatgtactattccagtctccagctacttctggattggcaccagaatctgatacgggtgtgacatcagaatttcaaaactaacagctcacaccaaaagcgctcggtttccctattcaaaccccaaaatcttcctaataggttggaaaatcaagtagtgaagtaacaagtatttgcactaccgccatctatcatcaggaacattcagataaattaaagcaccgcatctaaacttaactatacttcagaacacagagcaaactagcaaagtggttgtgaacttgcaattaggggatacaagaacacgagggagagctcacgctttggtggcggcgtagacggagtagagcggatcggacggcatgacggaggaggagccggagccgatgttgacgatggcgccgcgcttcctctccaccatggccgggagcacggcgtgcgtgacccgcgtgaggccctcgacgttgacccggatcagggtgcgcatgagctcctcgtccacctcgtggaggtagcgggcgtacgggtacgagacaccggcgttgttgacgagcacgcccacctcgagcccacggatggcctccctgagcccctccaccccggcggcgaggccgtcggcggcgaagtcgagcacgaacgtccgcacctccaccctggggtacctccccctgatctcctcggagaccgaggccagcttgtcggggctccggccgacgaggacgaggccgagccccgaggcggcgaggcggaacgccatggcgcggccgatgccgtcggtggcgcccgtgacgaccgcccaggcgccgtagcggcggcgcaggggcttccccgggcggaggaacgcggcgtagagccagagcgcgaggcggagcgcggcgcgggcggcggcgagcaggccgacgcccgccagcgccagcgcccacgccggctgcgcgcggaagaactcggcgtgcgcgcacgtgccggccatggcgtggctggcggcggctcgcgcgaggatttcggggggagcggagaagagagatgtgctgatgctgatgagttcgatccggcgcggtgcggaagcggtcagagctatattagctgggaacgtggggttggtggaaccggtgcaccatccagggtgatctgctggaataccgttgcacgctggctttgagttggtgaaagacccaaaaagaggctactccatctatttcatattaaatcgtttatttttttctcaaactttttaaaatttgatcaagtttatagaaaaatatagtagtatttttaacacaaaataaacatattatcaaatttaatgttaattaattaaatagaaaaaccacttaacagtattccataggcacaggataactactgccactaaatttctaactctcactcctcacaccatctattcaaccttatcctctcatcactttcccttccatctcctctctccctctctctccttctgactagcaccctcatggagcacggaggcaacggcggcaactggccttgcagggtggcgcgtcgagcgtggaggaagctgccatcaccgccgccgccattgctgctggtggaggcatgggcggagtagaggagaagatcgtgaagctgttcgtggggtaggtgcccaagcacatgatggaggcggagctgctcaccacatttcaggaggtggccatcgtcgacgaggtcaccgtcatcaaggacaagagacctctttgtgatctgtacacccagatctaggctcgcgacctccaagctcaggtgttgtcttgttctgtgtttgattttgggttctacatgttctatgggtgattctacagctatgatgacttattcatggtattgatttcctttattaattttattcaactctctcttgataaacatatgatttttggttctttattgccgtgatactttagtggtatcatgatactttggtacatgtaggtatcatgtttgatatccaggtatcagacatggtaccagtaggtaccatacttagtacctatggtatcatggctagtacccataggtatcagacctggtacctgcaaggtatcaagtatcagacctagtaccgagcacctgtaaggcatcaggtatcatggctggttgcgaggtatcaagtatcaagcacgacacgtgttctcttgtcttctgccttacctagactcgatccttgtctcctatttgctgtcgcaaccaaagtcctcctctcctgctctggctggggggaagtcttcctaggagtagttgcaggcggcgccagcgaggtattgcgtgcaaagcagggttctagctggttggaggaaggagcactcctgctcggagtagtcacggcggcagcgccgccggcgaggtttcgcacgcggaggcgcgtgataccgagccgggttttggctggggtggaatcgcgtggacagtgtggtcctcggtcaaaaaaaaatatgtcgggggatttagttatcccgtgactaccacgttgcaacagaatcccgtagggtagctgccctcttaataaaattaatttgatattttagatgttgctaaatttttctgtaaacttggtcaaacttaataaaatgtgattatgaaaaaaagttatacgacttataatatgaaacggatagagtaaataaattgtgaagttattcgatttaaatacaatgaaagaataaagttttataataaagtatagtaggtaagtacacagaaaagcacagggtggtatatatggcggttagagtcatggatctattactccctcgtcggaaccggatcctctgacgttgggaaaactacgtcagagggcagtagctcttcgatccaccatcccccaagcatccaacgctcctgatgaatagcgcaatgtggtcctcatttgcagctgcacttgttcactcgtgagggggaaatatcggcgatgccgggtgccgctacttgctcgccaccgtccaccgcgtcaccagctgctactcctctcttgtcgccattcatcacgctgtcggctgcagcgtctctcttgccgccgctgtttgggcaccgcagtccgccatctgcctggccatggccactccggactgctctacagattgcaggttcatcaacacttgtgtgtgcgtctggcttctgcatcaggcatgaagcagccgtcgattcattccctgtgtaggtgtgtaactcatcaacatcatttgtggaaacttcactttcttgccgaccatgttgaagagtgactagcatggcgggttgttggacctcgcaggcggcgccctcggcgatgagaccaagcaggcggaagcgtcacctatgccctcagcgtcggcggcgacgactgaatggtcttctgggttgaagatggagaacggactggcactacgaatgattggtgccgtcggatgcgctacgcacggtgatcccgccttgaacgtccctctgacgtagaggcttctacgtcagaggatctcgttcctcctccgtcagcttgaattctatttcctgcgaatgttgggcatatttgcgagctgaaacgcacctgatttttgaaatgatttttctagttagggatttctggatctccatatgataagagacacatccgtgggtgtggatgcgattgcgagtattgtgtgtgtcttttagtttaatcgggagaatatttataagagaaaatttaagaaaaaagggagtatcattgacagacacctaattctaagccatcgacaagtgtgaatttcatgcaatgtcatcgtacaagtaactttgtattacaaataccatcgttattaggattctgctagcgatcctccgttaattgttataggatgaacaatgtattttacattggatacattgtaaaatacatcctataaaatagaaatgttgtaagagaaatgttgtctaatgtcaatggataacggcaatctttacattggatagaagcatgggatagcatgacaccaccacgagttaaccacaaaagcagagccatgagctttatattgtttgaccacactctttaagcatgataaaatgcgtctactgaactacgtatgcactaaaccacttaccagtttggtgcacctacatctaaaactaaactagactaaactcttatccagcacagttactactttacaaattaaaagaagaaaagacacatcagactatttagtattcaccacatattacataaggaaccatgaaaattcaggaatttggtctttgaatctgctgaagatgaaaattaagtgtttcacgtaaaacgaggttgtaataatgtgtgattaattgagttttaattattacaaacttgaaaaatggattaatctgatattttagagcaactttcatatagaaagttttcacacgaaacgcaccgtttagcagtttgaaaagcatgccacaagtatccaaaatttaaacctatttatagagtatttgaacggggtaaaagatattctttctagatcttaaaaaagaaaaaagtaatgagttaccgtcgtctcacggtttgacagttaccacggtaatcgagtagttaaaaaaaaccatacggttataccgtgatttcgaaaactgaaaaggttactgcaagtgataattgtccgataactgttcggtgttgtaaaccgtacggttgggagtcaggatcagcggttgcaaccaaagttacaaaccggtccatggcgtgcgtggtgcactgcacggggagcgcattggcaagtgcgaaggggacaagacggattgggcttggagcggttggggtttggcgagctgaaactgaagtgagctgaaggaggaaggcgtcatcggctcatcgcggtcacagacggcaggcggaatatggaacagacagatcgatcaatcccaaccatgttagtgtttcctattggatcacctaggtttagatctagtcgggtggttctatttgcgatggatgattgaacaacaatagagaataagggaaagggtttagggatgtgaccggttgacgcgttggatgaagaggaagtcccagccatcgtcgttgtcgtcgctctgcttgacgtgggcggcggcggcgatggcggtcgtgacggcgacggtgctgcgcggcagtggtggtcgtaggggatcccggcgaggtcgtggcgcggcggtggagtcttcccgtcactggctgcgccccctcgatcggttagggtt

SEQ ID NO: 8844 - DNA, 21921 bp, Oryza sativa
ccactccaataccttcaatgaatttgtatgacaaagtacgcctaatgcatggatccccaataaatgtagctgtgtcctaactcctagttgtagccttgtagggcttcaggtgaactttgttcttacttctatgatgtaatgtatgagatgtcactcggctatatattaattttaatttgccatatactacatttcatgttcctctatatatctattatatactaaaagtccattaaacttcctacaaacgttcctaaatcaccacttggcgctctaataaattagagaaatcaaagaaattctgataaaaagcaaaacatcctacccttaattttcaatacggtggacctattattctttaccattagatcaaaatcaaaaaatctatccataaccccaccacctcctgggcctcctcctcctctccccatcacgtaggtacgtacgtacatccatctgtccatccatcccctcctccgtctcctatcctataccattatttccatcttttaattttctacctaccaaaatttaaaatttatgatgattaaaaaaaatcaaacattataaccaatagattataatctacctattaatatcctaaaaaaatatattaaacttcctaccaacactcccaagacatcacgtctgtaaacgctcctacgtcaccacataatgctctaatgaattagagaaaatcatagatattcaacgctccaaagccgtcacgtgatactctacaaaccctcctacaccaccatatgatgctctaatgaattagagaaaattgtagatattcggagaaaaaataatatgtcatctttatttttacttaaattgatggatccattattttagatcattagattaaattttacttttagaaaaattaaaatataatatttccattctaatcaccgtccacgtacaagagaaaatgcgtacattcataaagttcaccaggaaaaatgtacgtgagaaaatacgtatgtacatcaagttcgccacatacgtacagttcactgggaaaaatgatacagcccaaagcaaaaaacccaaaacaacatacttatagtatgatggaaaaatatactttacaaactacatacgtagatgaaaccttaaaaactgccaatgcatccgaaaatgaacgcatgagatttgtccaagtcactacatattttccttaatatgattggaaaagaaaattcaactttgaattgggatattccaggttagaggaagctaaaatatattacttcctctttattttcctataagttgaccatccatcttattaaaaaattgtataaatatgtaaaaatataaattgggattatagattttttatgataaaacaagtaatgataaaacaaatatcatttatatattttttaatacaaatggtcaaatgtcatatcaaaatttaatagtgtcatacattcaaaatcattacgagtacttcacatacattaaattggtaaacatattattttaggccattaaatatccctatcctaatagcccatctacgtatgtagaattcaacagaaaaaagctaaaaaaaatacattccaaacggaaaatgatacatacgcacatagtattatttagaaaagtaagcggtctttaaaactaaaattttctatgatttaaaggtaatattagtctataatcaaacacagttgaactatatcaaagataaattatactgagttaaactacatcaaagataaaatatcaaattaatggcctttaaatgtccttacttgaaattatatatcacaaaatttttatcactaaatgaactatgaacggattataatggttatttgtagggctaaatacatcacaacacatggtgtcgacatgtaataattatagacacaataacttttaaataattttacatcataatttatggtgcacaatatcacctaacaaatatacaacactaatttgaatatacgtatgtaaactaaaaacagtagaatttaatcatcttttttgaagtatatctaatttaattttgtttatttttcaaaactatttgactggtgtagatatgaagtcaaaagcatacatggtcaaaaaaaccagaagcatacattctatgtagatatgaaaaataatatcaaaaatatttctagccactataatacaaccccttaatacatcatgataattatggtcatatatgtaaatttgttttctttgccaagacagtattggcaacaaatgaacaattcagtaacattgacattaaagtactcatgatatattttctaatagtggagaaattctgacgtgactgtaagtgcactccaataatgaataagctatagtaaataagtttcagaaaataaacaaaattttgaacctagtaaatttgtctagaacaacaagtgttaaaggcaaaccaggggttaatcttagagattattagtgtggtatctctctttaaatatatttatcagtaatatccattgatcaacctcggtcattttttaaaaaggatattgtttctatagaattaaaatttgagtaatattaatgaacacaataaacaaactatgtctactctataccataaaacaactcataacataaaaacaaattattttcgtcaccttcgtcttctctttgtacttttctgaagggcaccatgcatgatagtagagcattctacgcaatcataagtaaagcagaggcatacatatggcgggctgaggtagtcccaatgagaggatgcctttagcaatagagctcaacttcctatttcaggaggcaattctctatgagggcacctataattaattaggcattaaaattatgctccacgctggtctagaatgacatggctatgagaaacccatatttcaaggtagcatggaagaaaacctcggtgcccgcggttggcttcacccaatacatgaatatgtttatctgatttaacgttgttagcctattaattgatagaaaaggtatttttagaatatttagacatatatttggaaataagcgagacatggatagtcatctaaataatatagatgatttttgtagttaactaataatgtattaatcttattgtaacggtatgatgtagtttgatctattatagactcttagctttcaaaaacaataataatgataataagtatccaataaaacaatataatcatcataagaagaggtgacaatagaaaagtgatttttattttaaatttaggaaatactcttatcatttagtattgttgagatagtataaatgttttttattataagataatatatagtagtctataatggatatggtaagttgacttattttattattcttttcataaataaataaataagatgccaaccttcttcctagaccaaaagaagcattataaatgatttcttgtaggcatgaattaaatactaaataatttcaagctaccaaatagtttgaaaaaaattactgagcgatgctaataaagaaaagttgtgaagaaatagtacttttaaagcatggcaggtatcatctggtttatattccagttatataggtttccgaaacacaacatgttatgttatacatgcgcgaccttcctagttaaagaaaaagttacatcacaatgtcacactgcatgcacaattattggattcggtattcggacatcctgccaagctgttggggttttgccttgtcgggcatgagattacgagttgttttcttgttgcaaaaaaggctaatgacccaacatacgtacgactctctactggtgatttagtaaccgaagagtaattatcttatttagaaattttagaattagaattcctcttttgctcttattgactctaaaggtctcatggacttctctacatggcagattttagattgatacaaagttagggagtgcctatacatctttcgaaagatttttataatcgtatcacacagatttttaatctttggattaaaatccgatagatataataaaaagcaaaagacaattaagaaacaccataatagacactaaattaccatatcctcaagaaaaaaatcaaatccaatacaaaatttaaaatttgcgtgcgaagattcaaaaattacagtgtaacttaccaaagttacagtgtaagtttcataaattacactgtaacttacaagaaaatgcaatgtaaaattgagagagaaaatcgagtgatagataagaaaaaatctttcgagtgagatatagcaaaatcgcaaacttattgcaacttttgagtaaggtagtcatagtcttttacacatagtccattactatttattactccctccggttcgttattagttgacgtcagagacttgactgtttgaatgaaaaaaaaatagcgtttaagttttggttttggtgtgatcagtttggactaatttattccccttcatgcatgcaaaacacattaagctagccacatagatgtatttaatatgagtacaacaggaaatagtcactctaattaattactcattggtatctaaactcttgtctaaagcgtctataaataatgaaccggagagagtactaattaaagtttatcgtggttactatctccagatttattttgatggtaagttgatgagtactaagaagcaagaggacacagcagacattgacagaactgacgtccgtgattacagaaatccatgcgatgaagatgaatatgtagactgttttgcgatgctcgaacttggtgagtcgtcacggatggggcgatgaacccgtcgagaagtgttctgcaacagttgtttgtatctgatagagatttgtcttgtgagggtttatattaccggttgaccactaaatttcgagcctcatcggtatcatgttttttgataaattttgatcggtttcggataaatttcgactgaatttcgaccaaatctactgtttaaccttcgaaattccaatcgaaacttaattttgagccgcgtcgaaacgtcgaaatttcgcggaactcgaccggttttcatcggaattgtgaaaccctgcttgtgaccatgcatagaactgtactctctcttctttgtttgatattatataagttttaattttctcaagtcaaattttattaagtttgatcaagtttataaaaaatttagcaacatctaaaacatcaaattagtttcattaaatatattttcataatatgtttgttttgtgataaaaattctactatgtttttttaatgcttaattagtcaaaattaaattggttatgaaaagtgacttgcaatatgaaatggagaaagtacagtgcatccgccgggtttttattcatacctaaaagaattaacagttaccctccctccaaattcaccaattcggttgaggcacatgaaaagtcctaaatgagctacagagcaaatgagcgggtcaaaaaggatgccaaaacgattggatccgtgcggccgatcggacggaaaaaaatggggtgcccgcggagccgtccgatctcatcacgcgcgttctactgtcaggatcttccccgtgtcacccgttgccagggtttcccttaccgccggtaatcgcgcggttaccgggcttaccgcggggtaggtaatataaataccgcggtaaccttcttaaattcaaataaatttaaaaaataatttaaatttttgataaattttgcacggtttcgtacgatttttcacatataccacggtaatcgtgcttaccgccggggcacggtaaccccggccagggcagtttgggaaaccctgcccgttgcaactgcccccaaattacggggttgtaagttgcaacatcccgtaacggcagtattttctcttttttccccctgcaacctcctccgacaaactcggttggagcggaggtgagcgcacaggcgacgagggtttcctcgtctccacaacggcggtggtggaaggggcagccaacctcggagcatacgcgccagttgtcgcctctcccgggcccttttatttttctttttcacactttttttttttgatcttagacgcgtttttttcactgtttctttctgttttttttttcaatctttcacacacctctttacaaatgtagaattgaaaattttttattttgacttaaaagttttaaattttgtgttaaaattttttcgaattttggctgaaagttttcaaatttgatcaactcgaatttgaaaactttcaacccaaaatttgaaaactttcaactcaaattttgaaaacttttaagtcgaaactagaaaacttttaactcaaatataaaaatttccaacctcaaactcgaattttaaaactgtcaactcgaaaatttaactttcaagacaattttttgaaaactttctatcacaaattttaaaatgttcattgtatcgctgaaacttttcaacttaactatttatatattattttgataataaaatctacaattagattaattcataagcttagcactgttattagcgttaatgacgtgtgatcgtaatagcccacgcgcttaacctgcacgtgcgacgagaaaaaagaagcggaaaaccaaaaaaaaaaaggagcgtgagaagctacggactcggaaatgcgcgcgacttgctaatccggccgtctgcgcggattagcaatccccacctcggggaaccggattggggtgggaggtgtccgggtccggtgatcgccttggagaaaagagaggaggaagaggaaggtcctcgccgttatgtagatgcacgtcagcatcattcgttcgttccatgcatctatttccagagaatccagatgcaacagaactacagatgcgatcgactcgactatcccaacctcccaatcagtcgatttttattgataaatcgggtggattaggactggttctgaagcgttcgaatttctttttttttaacaaccggtatgaggtaatgcgatatttttaatgatatggcaagaaaaaagtttatagtcttggcatactatagttaggaaaaggaaaaaaaaacaaccgcaccacacgtctatgttttattctagtgctaaaaacgaaatagacacacaacacctgtaaacaacacctccaaagaggaaacaacacaaaaagctctaccgccgctcgtcctagagaactaggacttgatttttcaccttaataacacattgggagaggagagaaaacgtaacaacgtcccaagggaaaatcagcgcctgcaggcgtcattgttgcccgtccgaaggctaagatctttgcccatagttcctactctcccgcgccaaagagtgcatgtcagattcagcagaaccactagctattcccctcacgcacagccaccacaccaacaccttgccgccagccggtcatcaaatgtgtgttcttccctcaaggttcccaaactcacctctttcctttttcacaggcacgcttctcaagctgctaaacggtattttttataaaaaaaatagtttctatacaaaatttgttgtaaaaaatcatattaatctatttttcaatttttaagctaatatttaattaatcatgctttaattcatcgctccgttttacgtgcgaaggggggaggttcccaaccctccaaaagacacagccaaagtagagtctaaacctacgacacgcttcaacttcttccacgtggttggattggagaggggaagggtgagagagaagaattgatcccctctcccccgcactagcccgtccagcgtggccatcttacggcggcaagccgccggcgcgaaaggactaacgcctagaaagaaacttgccgcacgcttcaaccccccttcatgcgctactgtcgttactgccttgaccaggctacccgtgttctccgcaacgggcaggctcaccaccgttgtgcaccagccatgccatgctcgcaccacaacattgtccgcgccggcctttcgcggcccctgtcgaccttccactgccgccactcacgcaccactgtctgcttgcagcaccggacacccacaaccccgtcgccgtggggcacgcctcctagtgccaccgtgcccgcctaccaccgccaccagcctggttcctcccatctcagccgtcgtttacaccgtcctccctgcgacggcgcctcaccatcatgcccttccacctccaaacgtccgtcgcctccacgccatcaccagctcaagggttggctacccgcgttggggaggccagatccgggcagagggggccggatctgggtgttcccgcgccgcctctacgcagctgtgccctgccgcctcgccactgccaccgtcggatccagacgggagggtgtcggatctggccggcgacgccacctcgccgtcatcgcatcacctcagatctggttggagtcatgggcatcgtccgccacctgatttccgatggcccacttgggcggagagaggagagaggcgggggtggtggagcggcagctaaacaatttcagctctacctaaaataggagaggagatgggtgaagtgctctcacaaatgaactagaaaggtgaagctggatttatactactccacaactccactctaaacacaactcttgtagctaaatataggagttagagctttaacaaacaaaccctaaatataacataggcttaagcagcttcacaacttcattttaaacctcgtaatatagagagggggtgaaatgggctgacacaagagcagcagcaaacgcaacgatgggtcgatggctgatggcccaaaaatccactggcagccgcatagtgtgtggcccaaatcccacgcggccacgcgcgagaggcctagtccgagtccgaggccgcagcgcgtgcgcgtgggaggccgaaacggcgtggatcgtgcggcctccgctgccgcgctccgtgccgtcccacgaggccacgataagctgatgttgttggaccccgaaaatctcacgcgcagcccacatcgcgtgttttgcccgaaatctcacgcgcgcgaggcccagaagcgacgtggttgggcagcgcgcggaatcggaataagatcactttgactccctcaattgaccaccgaatctaaatcgtatccctcaaccgcaataccagaaatcttgactccccaaacttacaaaaccggtgcaatttgactccctgggcggttttaggaggcggttttgctgacgtggcaccacgtggtgcctacgtggcaatattgaccgagtcttcgttccacgtggcgatgacgtggcacctacgtggcggtagaattaaaaaatatgcatgggacccattagtcattcacacaagaaaaaaagtgggcccactgacatgtggggcccacatatcagtccttcctcctctctctcccttctctctctttctgtcccattcttcccttcggccggtggcacctctctctttctctccccctcttcccttcggccggcggcgggtggcgagagcgagcagaggcggcacgcaaggcccagagtggtatggcggggagtcggcgcagtcagacgcggcggcggcagcaaagtcttcgggccccaccaagcccgtgccgccgtggcgggttcgtgccgcggcggctggaggacttcagcgacggcggggccttcccggagatccacgtcgcgcagtacccgctcggcatgggccgacgggacgtagaagggcggctcgaagatcctcgcgctcactgtcgacgccaagggcagcgtcgccttcgatgccgtcgtgaagcagggtgagaacgcggccggagctcccgctcggcctcctccgccgagtcctcccgtcgctcccctcacttgcgcgccgccgccgctcactcgcctatcctgccgtcgctactccgggcctcacttgcgcgccgctgccgcttgctctcaccgccggccgaagctaggccgccgctcgcttccaccgccggccaaagggaagagggggagagaaagagagaggcgccactggccgaagggaagaaggggagagagagagaagggagagagggaggaggaagaaggaggactgacatgtaggccaactttttttcttgtgtgaatgactaatgggtcccactcatattttttaattctaccgctacgtagatgccacgtcatcatcacgtggaacgaagactcggtcaatattgccacgtaggcaccacgtggcgccacgtcagcaaaaccgcctcctaaaaccgcccagggagtcaaattgcaccggttttgtaagtttgagtagtcaagatttctggtattgcggttgagagatatgatttagattcgatagtcagttgagagagtcaaagtgatcttattcccgcggaatcccgctgcaatccatgccggcccacgacggatcggtgtaccgcgccccgcgcgcgggtcatggatcacacggacgggtgggtggtggctgcgttgacggggcagtctcgcgcgcgcgggggagacgggagacggacggcgcggcgccgacgcagcgaaagcctgagaggagaggacaacgtgccgcttcgctggcgcagtgagtggcgaccggcctagtccggccggcatccaacctgctggtgctgcgcgcgccgcccgcccgcgtggccacggtgtgcagtactacagccggccacggccggcgcggaagttggtgtaagccggtaatctccttgccgatacattttttaaaaaaaaacttttttttgcctgtttttccttcttcggatagcggccggatgagatgctctagaagcagtggcggagccaccgcccaccgccgggcgaccccgggcactcgtggcagtgaacatgaagtaaaatatgatataatatagaactgtactccctccgtttcgaaatgtttgacaccattgactttttagcacatgtttgaccgttcgtcttattcaaaaaatttaagtaattattgattcttttcctatcatttgattcattgttaaatatatttttatgtaggcatataattttaaatatttcacaaaagtttttgaataagacgaacggttaaacatgtgctaaaaagtcaacggtgtcaaacatttcgaatcggagggagtacttgtcttagttagatttgcttggggtttaaaaattttctagctctactactgtctagaaaatctagctctgtatacatgctttcatcaaaatatcattctagatcatgttttgcttgccaatccatctgcggaaactgagacctcccaaacacttgtatcactaagggcattagcagtgcgacaacacattttgctgaacctcatgcgtcacataggctcaagaacacctaagaataatgtttaacacaagtttcacagtggtacctagtctcaagtggggtccacacaaataaaaaagtattttttttctctctcccttgtcctcccagtgccacgcctcccctccccctcctccggccatcgcgcctcccccttcctcctcctgctatcgcgccttcctgataagcgacggcgccgggcggcccaagcggcgacagatctggctgcggatcaagcctccccctcccctcctcctccggccaccgcgcccctcctcatcctccggccagcgtggagtggagctcgccaatgtggatctagtggtgggcaacctcgacctcctctccggtggtgcggatttggtggttggccggtggctacaaggggaaatcaacgttggcaccgccctccctcccctcccctcccctcccctctcccctcccactgccggccggcacctcttaggagaagatgcggaggcggtggtaggtcgatggaagcggacgcctctcccctccctctccccaacggatctgccagtggcgatggttggcgggggtcttagcggcagcggcgtaggtcggcgacacagattgggcggtgacaaaaatcccggtatgcccctccctattccggtcatcgtctctcccctcccgaagattttctctccactcctgacaaaaacctgacgaggaacggtgatccattttagtttcccattctttatttggtcacgggagaaacatacgaggcataaaatctttggacgtgataggttggaactgaatgccacctatatacactgtgaatggcctaataccgccagtttggcacgattggcatttatcgcctgcagccgtgcgtgcatgcccatgcagcggtaacagtatgtatggctcatggctggcgtgatctgacacaaaacagtgctaggatagtttggagagcatgaatccaacacgcgatcaatgggttgattaaattaatttcagctggatcgtcggagctagccatgcgcggccggcccggggagaatccaaatccgattcgagcctgcatgtggccgagattagccgatcgattagctcaaaaataatggagattccaacccccaaaatgctcgcgtcggagcacgttctgcagtgcaacatggcgcgacgccgatggctgcagcgcaggaaggttctcacgattaagaaatactagacactaatataattatagtaacaactagctgcagatggaatcatggatgcatgatcaatcatacatcgagatcgtcatccattccatcgatcgatcttgtttgtcgttgtcggatattggcgattaagacggtacagagtgatttcttgaattgttagtttgcccttgttatcgtccattctctcttatcaacttaaagctcagattattgagtgattattgctacagattatctatttaaattatagagattaactaaacatttttataaataaacttaaagtaaattaaaacaagtgatctacgtaatgtagtataataaagttttttttaataaattcgagataaataattcttttgaataattcgattaataatctgaaaataatcaagcctaagctttcgtaggagatggcaagctccataataatccatatatgggactgaaaaataccaacacaaagatcttaaattaagccccacaaggccaccttaaccacccctctaaagccacaaacaatggagatcataaacacatacctttagagctactcaagaaaacatgcacaccgtgcacacgtacgaagccggtctcacaaatcatcatctcccccctttgtgttcagcaagacggcaagcaaccataggccatgaactaactaattaagctacctgtgcatgttgcccaaccattctactatcatcatggcaataatctaattgagacgcttatgggctcgctaaccgaccaccccaattatcatgttcttcttctttccctccaagtcctatcatcaaaagctcatcattttttggcgccaacctcccatgtgcaacccccaaacttgctctttccatgcagctcgaaaaacatctcaacattaattaattttattgattgattggttagtactacagtactgtaggagtggtactcctcataatgtttaatagatgttgtcattaacttttgcacatacatttaactatttgtcttattcagaaaattacgttcacttattttgttataacttgctttatggttaaagatatttgcatatttataaattcctatataagacgaatgatcaaacaaatgatcaaaagttaacgatgtcatctattaaaaaaacggaaggaatagttctgtaacacgggcccttatattttttaattgggtcccattttggactttggactttgcagagattgcagcatgcgtcgttggactctttaagcagacgcacgcttccaaagtcccattctgaaacctgcctatatatacagcgcacaagcctccttggcactgtcaccacttagccagccttcaccattttcagacttcagagttgtgtacaagtgagaagccatgatcaagctgaggtactccaagaggctgttcaagaggagctgctcctcgtcgaaggcgactgcttgtgtcggtggcggcggcggcggccatggcaatgcggtggccgccggcggcggcggcggcggcgcgggggagatagggtgggaggtgaggccgggagggatgctggtgcagaagagggaggggagaggcggcgaggaggtgatcttggtgagggtgtccactggcttcgcctggcacgacgtgtccattgctgcgacctccacattcggtgagttcagagttctcagtctttgtttctctcttgagggaaactgaatatttttgtttgcttactttggtattgtttgggctgatgtgaggaaatgttcatgttggtttctatctctcttttttttttgaactttagagaatgttcttggaacttgttttggtcatggttttctttgggaacctcatcaccaatgcacaatctttttgcaagaacgataaagttcaggactgaatcactgcactccttttcatcagctcagatgctttgccatgcatttgaatcctagagtaaggtctattagtttacagctaaaagctggggggcaaagaagtgtaaaagaaagagaggaagaaaatttcatcaattttttagggaaattccactattttttgtttggtagtaggtgggtcattggttgcagttaagaacccatcacacctcccccacacactttgccagtttggtgtgaagtaaatatcggttcagttagtagtagcactcttttgcttcacattttccttgcaaaactaaaatgcttttcaagattgttctagtcagataatggctcaccaggtgttcataaagacacaattagcaaggttaaactacctttggtcttgactgttccatcatttcacctgcatatcctagacaagccaaaatgtgaccttcttccttttgcacttgggcaatgccaacatttttgttaacttgacaactaggagggttgcttgctttaattgaaaaaaagaatagcagtgtaccactactgctccataactgtacagaatggacttttacttgtaaaaagtcatacacgctaaagaaatttatggctgctaccggcactgccagcacatgctcatatatgtattgtatgcatctgccggtgcctgacaataataacatggcttggaggcagacaaaattgcaaaacttcctgctacaatttcctttttatttccaagcaagcaaacaatctactattataaatgaagcccaagcctgaatttaatgttctgtatatgtaacaacaatattctgcatcttatattgcaggtgagctgaaggtgaggttgtccatggtgacagggctagagcccagggagcagaggctgctgtttaggggcaaggaaagggaggataccgatcacctccacatggttggggtgagggacaaggacaaggtcctcctcctcgaggaccctgcccttaaggacatgaaggtccgggctgccctcgcagcagcccgggtcatgcagagcccgtgccagccttttatccaagtctaagggttagttggccgtgacccctgttctgttaccacgctaactattagagtactattaataagttgtactacaattttagtcgatcgacatctcaatttctggaaggttttattatatccggaataggtggggggttggtgctgttcaccccctcctctctttagtttactgtcagtggtgccactccatggtagggcaaagggtccctcaacatgagagtgtatgagagtgtgtgagttgtttaatgatgggttagttagttgcaagtgtccagccatggtggttgtgatgtgatgtgatgctaagctttggtgctgggctcctatggtccctggtactgtgctctggtctttttcccattcctacataggttatggacaggaaatgggggctaaagacgatgtattttgtgttttcttgaatggaaactgaatgtgtgtgttcgtttcgttgttcctgccttctgtcggattcctcatgattttgattgcgatgttgtttgtatggagaaagagccatgaatgatgcttcaggttgaagaaacggaacattggtgatatggaaaatctttaggtgataatggaaaatattgtgcggttgtgccattgagagttttgagacaatgtgctaagttgtcttgtgcggaaattgctacgtatacgacctaactgtccaactcacgtatgaatgaactacatcaacgattgcaaacggctgcaatacatatgaatatactctcctttgattgatacatggttgcatatctctagttgtatgtgagttgtataactgggtcgtacgtatagcagtactcgccttgtgcttagggcttatttggttcataggatttccaaaacataggattaaaagaagtaaattattaggatgacacatgcactctaatccttagaagttttttttatggaacaagattataaggatacaatccttacatattccgtaggatctgttactatgaaacaaataatgcacaaagaaaaaaaccatgaggtttcaattactacaataatcctttggaaatcttttgaaaggaatgagcccttaaagatttcagattgggctgtcagtgagtacaaaatagtcaccgagatgttccccatttacagacatcaacaaccaacatctgcactggaataaagctttcgcttatctctttcatgtttgaattgacagcattgacactgaaacactaaaaaagaaaggtcactaggcttcagaagaaagcaagtgcaaagaccagggcatggcctacttcatttataagctgttttaattctcaagtatttcacttctcacgctaagaccagggcaattgctaattaaattgatcctcgcagatccaaatgtaggaacaaagggaatgtcaaaaacagccaacattctcaaataccaagttcataagatttcctgaaaagtgggtgaaatgacaagttcataaaatttcgcaaaatggtaaacctgcctgaaagcttctgaataaaagggcagtgaaaaacagccacaattactagtaagatgcgaaatttacataagtattcttggagacaaggaatgcagcattcatagaactacctcatgcaaaggccaattgcttctggatgtacacttgacagttcagagaactgttcagcacttcagttttgtcaaacagccaagaggataagcattccccggccattcctgcactgggcagtacttgtgttgtatagtggagtagtacataaataaagctacgaaaggacgatgaattaggctgcgttttggcgccaaaaaggtgagaatttttcgctctatcttaactgcatgcatcgatgcctacccccagattcccaatctagtcttgttgatgcaaaagttgacctagtaatattctctgattctctcatcaaaggggggaaaaaagctcatgcctctttcctttctccaatccccatcatcatcagcaagaggaagcaagtccactaccactcactcatggtccatgactccatgggaagccatgcttctatccacaccacatctgccacatctgcggattgattgctcgccgatctcgcgtgctggtatcaacgtggaatagtcgcgcgcgcgcgcgtgcgattcgcgggtcctcgcgtcctgtgtgtcccgtcgaatcagcgtacgagcgcgcgtggagggagaggtggtactgcaggtctgcagcgttgcggtggccggcgatcacgggcggtcggtggcgggctccccgccgcagccgccgtcaaaatctgcggctgttgtgtgcgtccgcgcgaggctggtttctctctcgttgcattaattcgggtcggacctgagaggcccagttacggcccgtcagtcaggttagaatttttcactctcattgactaatactaaactgatagcactgtggtacgtaccaactgtgccgtattgacgtgtttgtatcaccgtatcaccttacgcctatcagttatcataatgtaccatccagcaaaaattacatgaaaatattgagctgatttgtattgaagtcaccttacattacaccttaaacacttttttttcaactttaatagtaagaaaaattagttatatgaaattgaaaattcattggttttcttatatgctattgaaaattcactgtcatctctctcactctccaaccctcgggacgttgttggcagtggtgccattttcatgttggtaacttcaatccctacgccaccaacgtcatgtcgtcctcccattgttgatttgttgcctattattctgcaccctatacacttcaatccttatacgttccactgccatttcattgtcccccatcctcccatcactatttcattatcccccgtcttgtcatcgctatttcatccccccccccagatccacccctctccacttcaatccttttctcccaaaaatctacaaccctagggagtcgtcggacgccaaatcatcgccccttgcttttgaacctttgcacttcaatcattgcgtgatctcccatcgtgccagtttgttgatcttgtctttctaccccaatctactgccccaagctccacccctacacatttcgatccttatgccactgacaccaacattgtcctcctaccaccagttcattgccccgtaatacatccctccgtactttaatccttacaccaccgacatcaatgttgtcctcccaccaccaattcattgctccaatccatactctgtcgatgctactacaccaccaatgttgttcttcgttgataatttgttgctctcatcctcccaccaccattttgttgcgtcatcctcccaccactagttcgttgccccatgctctggccctctgccaccgtactcccaccattagtttgttgctctctgctattgtcctccactgatgtatggttgttatccaaaatacatattggtacgctatcacattaaataggcatatatttgtataatatatcgtatacacttttgttctcttctcgtgttctcttctcgtgtgagaggaataatctaggtaccatagccctaccggttgataaggatttcatcaagattcagggggtgtttagatcctttattcctaggactaaaataagtcctaggactaaacacttcccgatcggagatccatgaatcacagacgctagtccacggctgtttggatatagggactaaaagggaaggtcattaattacactgtataatggccatgctaccctaaaagcatgtaaagagagatgcaccatgcctatgtgtgggggcagtgggtggaaaggagctattttagtcccaataagctcctaccataggaactaatggactaatgtactttaagtcatttttagtccctcctgtttgagactttagggactaaaagggactgaaactttagtccctccaaccaaacatggcctcatgctagtgcggaccgctttacataaaattaaagttatctaaccggttgactgtgctcgtggtgtgggaaattgatcttgtgtaccactgtcaactctttactaactaagcaagcagcaggtgttggttgtatagctaaaataaaattcacgttgcaatgacaatgttagtacactatagttatttgtaattttagtatatacgagttgctaatattattattttgaattaggatgtagcaaataaactacacaatatatgtatttgatatcatattatacgagagctcttaagggttgataacataattaaaaaaagccaactaatttcgattaagaaacatgtcaggtgctatatggacactctaataaggaaatagatgtatagttcattgaaactgatgattaggaatcctcccatcaagtgtgagtacacaaatagcaatacccgaatctcatgaaatgtctagggtttatcaaaccgtgcgattatcacggttatcacgtgcggtatccttttcagttttcaaagccacggtatacctcataataattacatagtttttatgataaccatgtggttaccagggtaactgctaaatcgtgggtggtactggcaagggtctggatcccctggagttaagtataactctaccgggtggagttggccaaatctgtgctatccattgtttcctacggctgagatcattcctcatcaatttaacctaataaattttttttgaaggaaatttcacctaataaataactccttaaattaattaatggttatgacttagttttttcatgtgtttgctcaataatagcgatttgattaagttctcacccccaaaaaaaaatgtaacagaacaacgttttgttattccccaaacaacagatatagtcgatcaactctaaagcggcagtcagtgtatatcaacatagtgctttcacatatatgcaaatagcaaaccatatcaatattaatgtgtatgattttttaaataatagatgaatcttgaattttttgtgctaattatacggtaaaaatgatctcgtgacaagctgttgatgcaagattatttgttgcatggtcagttactggtttttaagtataaattaatgtggcttaatcctagcccttgaagtatgccgaatggcacagatttgaccaactccacccggtagagttatacttaactctaggtgatctggctccagataatttggtaaacctggtcgggatccaaatcgcgaaagcttccggtgcttccctgcacaacggtttttgcaaacgaggctattgacatctttgtcttctttcccctgtccactgtggcctctcttctcgcagtccagaattcggatggcatgtgctccggtcaccacgcgactggatttttcatattttggtccttttaaaaaatttatttcgcaaatagacccctaaaaaaacttatcctagaaatggtcctttttggggcgccggagtggctggcgccgtcatccaacgggacggcgccagcctctctggcgccgtcctcctgccaccgtggcgcacgcgaaccgacgtggtaggaggagcagctggcgccgccccagggaggagggcgccagcatggctggcgccgccgcctccatttctgtttctctgtatggagttgcaacggtgtcatttttattttattttttcggatgttttttcacactcaggatcacgatacaaccaaccacaaaaaaaatttaaactcgaactaccacttagctaagtctgaaaatatctagcataccacttagtctactttgcaccttcactaaaattagaccataactcctttagtaaaaccctttgattagcatgttaaacataatgcactctaccactatatgaaattacttaatctaattcaaaatataatcatatgaaatgacatatataagttaaacagtacatagacatgcaatttttttatttttatttcatttttttgatatttttttcacacttaggagaacataggaaccaaccgtataaaaaataaactcaaacggacaaaatatgtgacatgtagaattttccaaaactctaccgaaacggacaaaatatgtcatctatttaaataggcgtaactttcttatacggactcgaaatcaggaaaataatatatgcacagacatctacagaaaaagttacatccaattctccccgctttgccgggttcggcgatattaaatcccccaaattccgtttgcaagattgtgttttcgaggagagaagtttttcggtggagctttggaaaattccacatgccacatatttcgtccgtttgagtttattttttacatggttggttcctgtgagttcctaagtgtgaaaaaaatatcaaaaaaataaaataaaaataaaaaagttgcacatctctctcctctgcactagttcggagagaagagaggagaggaaaaattctacatgtcacatattacgtccatttgagttcaatttttctatggttggttcttgtgtgttcctaagcatgaaaaaaaatatcaaacaaataaaacaaaaataaaaaatttcgggggggggggggggg

SEQ ID NO: 8845 - DNA, 1988 bp, Oryza sativa
agtcaacggcgtcaaacatttcgaaacggagggagtagtattttcctctgttcagacttcagagccgatggtggagccgcatccaagaaaaaggggttcggggtcgacgagggggagggtgctccggtggtcgacaggctcggcgaaggggtggacaaggacagcggcgtcgcggcgaagccggtgagggcggcgccgaggcgaggcgacgtcccgagcggcggtgacagtggagagagagagagagagagaggagtggcgggagctcggttccgagcgggtggcggcgtcccgagcggcggcgacggcggagagagagaggagcggcgcgagctcggttccgagggggtggtggcgtcccaagcggcagcgacgggcgacctagcacgccggcaacggcggagagagagaggagcagcgagagctcggcggcgacgagcgacggcggcggcatggattcgggggccacacggcctccgcacccctgggtcatcgtcgaggccaccgttgccgaggtcgtcgtcgcaagccgctgccaccgccgtcgtctacgccgtctccccgaatccacgccgcccgccgttgcccccacgttgtctccgatggtgtggagtgagtggagagagaggggagaagaaaagaaaaggtagagaggaggggtgaagaagaagggtaaggtggctgacatatgggaccctctgtcatagagttaaaatggagagcgtagatggagaggctgttgaagtaggtaaggagtttgacttgctaaatcagatagagagttggctatgtgggtgtttagagagtctaatttggagggactgttggagatgctcaccggccgtagtatccgtccccaatgcccaattccccccaccattgccgactctcttcctcgcttccggccgacggccgcacttcccatctccgcctcccctagttggctactcctcccagcctgcctccgatccaccggatggcgtgctcgtcgctccaggccgccggcggcaactatggtccatggactgtggcagctcgacctcagtcagatccatggcgaggtggccctcaacttcaggcggtcggcattgctccaccttgcagatccaagtgctgtggaccactgcttttttcttccctatggagcacccgttccttgtacaaggggtgctgacatcatgcgaggtcattcctcgttcgtcttctccaccacgctgtgcataagagtctacatgaatggtatccgatgcaaggccactcgttgtcgcctgggcaacgcgtcactgggaaaatgtcaaaaaggccgtggcagatgaaaacgatctggatggagatgtgatgccgattcatcagtttttcaggctttgaatcatgaaactagctgcaattttcctatacgtgaaggactggattggcaaaatgtggaaaattcatggcaggtgaaaacgatatggatggagatatgccgtaaatttttcccatttaagcccttttcgggacactccgaaccttcaattttttttagcaacactttttgtttgatcagtaacaccgacgtaacaaggtgccccccccccccccccccccgcctttgctctcttcgtgtttcatgccatacaattcgttggtcttatgtcaatctttacttattggatgctagcatgactatcgtgcgaacaattgataaacacttgggtagaattaagtgctatttttacttacacttcctcttcgtctttccaagatgatagctcgatcgcctgcctttctgggatgatagttcgcctttctttcttcttctttttttttctttcataatagacagataacaagcagctcgttttgcagtgaaatagcaatcgacttcaactgtcattgcaccgtatgtagtccagcttcatgccaatttgtcccaaaatatgctatttttcactcacttttttctctccaggaaacatgtttgtcccacatactgaggctgcaggaat

SEQ ID NO: 8846 - DNA, 4889 bp, Oryza sativa
cagcgtgacataccatgtatctcggccgtccaaaacgaatccaatggagatggcgcttggtcccgcacgcaggcaaaaaaaatctccgtttcggcctaacaggaagcccgcacgcgcacaggacgcgcttaacctcgccctcgtccgcgtacaccggcgcagcctgagacggactcaacttcgcctcgccctcaggtccgcgtacgccggcgcttcacctcgccctcgtccggccaccgccacgagtcagctgggaggcgcgtcgctgcgaccggagaggcaccaggccgccctgccctgccgccgcgaccgggggcgcgtggaggcggccggccgccgggcctgacggcgcggtggtgcaggcgggcagccgcgcagcccgagcccggcgcgtggaggaggccgcgctgctcctgccgcgccgcacgtcccgatttcggcggcctcaactccacgatggatttcagcgtccgagcccgcatccagagcccgcaccagtcggccgcccacttcgtcgccggcgagaggtgacaccgccgcccggcttcgtccagggtaggagtcactgctggttgagtttgtggagaacgacgcaccttttcctgtgcccgcgaggtgtttgtggaaatgccctgccgtctgggatgatgcagagtcctgattgaaagtgaattgttattgtttggctttgtgagattagaagcaaattgattctgtaatcttgattgagattgatttggttgtatgactcatatatgctgtaatttgaatgaatgaatgaataaatcagtaacttctggcgatgttttctaaaaaattttgagatgtttgagatgttgcccaggtccatgatttgttcaggtttaaagtctggaatggacttatagtattgtctggtttatactggacatgagttgtgctgccatttcctccttttcgctatctctgctgtaaatttttagttcatgctaggtgggaggttccatgtcttgttatgatcagttgtcctatgcagcaatgttgctctgaatctctctctctgaagatgctgaatggagtgccgtcgttgctgtagtgctatcgtgaaatttcatggtcagtagttcctgtgcatggtcgccctgatcaatagtgggtaggacatctttggagctgtttttatgcgagattcctgcaaaattcctagtacgaattcatgtgttgcaaacaagcccgtatgtctccttcatttcttgatacgatagggatggattgtgttttggttgacaaaatccaaagagagcaattttgtgaatgaaatgagaatgccagaatggggctgttgctttgagcgatctgatatccatcgtggagttgaggccgccgaaatcgggacgtgcggcgccgcaggagcagcacgacctcctccacacgccgggctcgggctgtgggccgcccgcctgcaccaccgctctgtcaggcccggcggctggccgcctccatgcgcccccggtcgcggcggcagggcagggcggcctggcgcctcccccggtcgcggcggcgccggacgagggcgaggtgaagcgccggcgtacgcggacttgagggcgaggctaagcgcgtgcgggcttcctgttaggctgaaacggggattttttttgcctgcgtgcgggtccaagcgctaccttcgttggattcgttttgaacgggcgagatgcatcgtatgtcacgctgtgacttgccttagctaagtcaccagctgagtccccggcggcggagggcggagggcggaggccatggcggtgggtgaggtggtggtggtcgggttgtgcttgtgcagcccagttgcagtgaaaaacaaggccgagcccaagtaaagcccacactagttcaactcggcccgcacatttaatcatcagagcaatgcaacccagggatgcaagcggtccaacccgcgaacctgcttataggtaaaatgagtgaataacccgcgggttgacttgtggattacctaataatttgatatataaataggtttatgggttgatccacttgcttctctacgacgcggcaaagccgagtcatgacgcgaaaacctgcggattaccctttatttaacatataagtaggttcgtgggttgcaccgcttgcatccctaaatgtaatgcagggtttttcgccaaaattagccttgctaaattttggcacactttgacgttaccagattttggtaacgttggatgtattcagtttgtggtcctgccaaaatttgatagtgtttgtattaggagaaactttcgaaaatgctaaattttggtgaagtggcaatgtcaagatttgtttagtttgttatcctaccaaaaaattgatactatcaaatattgtgagggttgagattggcggcgaagtgaacaagtccgtaatgcaaaaaataatcttgtgcttgtgtccaaaatggcaaaatgttactcaactcaccaagctggttgaaacttgaaactagtgctttcaatatactgcagcttgacttggagtggtgaagagcgaaacaattgtgtgccgaaggaggagtttcagctccttctcaatgtcagttggagatgtcaattcgtataaatggagtccggatttctattcactatctgaaaaatgtcaatttaacagtgaaaagtctataagtagcaactgtaccagaatctgctctgcacaccgtctgtatttctccaaatactcttcaactgaaccaagttttttaatagatggcaccgttaacttttggatacatattttactattcatcttttttttttaaaaaaaaacgtaattataatctagtttgggcgtgggaaacggaggcgggagcggtgaactctgggagagagccggatttgttgggcgtcgtcgtcgcaggacaaggaggcggcagcgcgagatgaggagggcgtgcgtgggggacaggtgctcatcgggatgcggcggaagcagcaggacagacgacggcctcggctcctctcccgtcgcccgttgcccgcagcctcctccgtcgccgcccgtcacacgcagccgccttcgccctcacccaccgcttgccgcccgccccggccacggctcctcgcccttgcccaccagccacctcctctgttcaccaagagagagagagggggggcagagaaggagtttttatttgttttttctgactgtatcgccacgtaggctgaaaaccgcttcgaatcaagttagggtggtaatttatccggtttgaagagtttgggatgctaaatgtccggtattatagtttagggggataaatcatactaccgtaatagttcgcgggggtggtaattcgtactttttcttggaaatttcggatccaattcaggatttttcttggaaagtttcgggaagaaattggaatggaataatataaactagcatggtggcccgcgcagattgcgcggctagcatcattatattttctctcatataatagcatatatgttttctcattatattattcaaatatattaaaatgacaacataattttaaattttgcaataactttacaaaactactaatgtgtaatattcatattatattttatatacgtgttagttattaattatttttaatatcaaattttaattatttgtaaattatatatattcctatatggactctagactcgtcttttaatatttcttttttttaattccgaattttctgtaaattgtatttctatatagactcctcttcttccaatattatttatttttatttctgaatttttattatttctaattgtatttctatgtggactctaaactcatatttcaatattctttaatttttaatttcgaatttcagtcacttctaaattgtattcctatattgactttaaactcttcttcccatgtttttcttaatttcgaattttagttatttgtgaattatatttttatacggactctaaactctacttttaattttaattttattatgtttattccaaattttagttagttttaaattcctatatgaactctatactctacttctaatattccttattttttaattccgaatttctattatttcctaattgtatttctttatgctctacttcttatattccttatttttaattccaaatttcagttattttctaattgtatttctatatggactctagtcacctcttctaatattccttattttttaattccgaatttcaactatgtctaaattgtatttctatatggactctagtctcctcttctaatatttcttatttcttaattctgaatttcaactatatctgaattgtatttctatatggactctagtctcctcttctaataatccttattttttaattacgaatttcagctatttctaaattgtatttttatatgaactctgcttattttttctccgattaatgtgagaatttttaggccttgagagcgaacatgttggcttctttttctatggatgatatataatagatagattcatatagacgaaagggttatctattgatgctagatgacagggacagaggaagagggaaacccattaaagcatctccaatagcatcttcattccactctccaaaccaaaatttagctattttgaacaaaaatcgcactccaagagtctctctatcccactctccaagccatccggatgaccaagttcctttcctcactagccaaacttggccaacctactccccttaccattcacttgctatatgtgggtcccaccaccttctgtactactccctccgtttcaaaatgtttgacaccgttgactttttagcacatgtttgaccgttcgtcttattcaaaaacttttgtgaaatatgtaaaattatgtgcctacataaaaatatatttaacaatgaatc

SEQ ID NO: 8847 - DNA, 20353 bp, Oryza sativa
aatgtggattatcccacaataatttgcaaggcctgatcccttctttaagtagccttcaacagcttagctatcttgatctttcatcaaataaccttactggggaaattcctcctactttgggcacatgtcagcaattagaaaccatcaacatggggcaaaacttcctctcaggaagcattcccacatctttgggaaaccttagcatcctaactttgttcaatctttcacataacaatttgacaggatctatcccaattgctctaagcaaactacagtttctcacccagttggatttatcagataatcatcttgaaggtcaagtgccaacagatggggtattcagaaatgctacggccatctcacttgaaggcaaccgacagctttgtggaggagtactggagttacatatgccttcatgccccactgtttataaaagtaaaactggacgacgacattttttggtcaaggtattggtccctacattaggcattttatgtctcatatttctggcctaccttgcaattttcagaaagaagatgttcagaaagcagttaccattgctgccttctagtgatcagtttgctatagtttcttttaaagatctagctcaagctacagagaacttcgcagaaagtaatctgattgggagaggaagctacggttcagtgtacaaaggaacgctaacccaagaaaacatggttgtcgctgtgaaagtttttcatcttgatatgcaaggtgcagatagaagtttcatgacagaatgcaaagctttgaggagcattcggcaccggaatctacttccagttctaacttcatgctcaacaattgataatgtaggcaatgatttcaaggctctagtgtataagttcatgcccaatggcaacttggatacttggctgcaccccgcaagtggtacaaatgcttcaaatcaactgagcctgtcccaaagaataaaaatagctgttgacatagcagatgcattgcaatatttacaccatgactgtgagaatcctataatacactgtgatctaaagccaagtaatgtcctcctagatgatgatatgactgctcatttgggagattttggcatagcacatttctacctcaaatccaagtcacctgccgttggagattcgagctcaatctgttcgatcggtttgaaaggaactatagggtatattgccccaggtatgtttctctagctgtaactttgtcacttatgtgacagacaactgattatttacatgaactcttaccttaccttgcacatttcacatgaactcagaatatgctggaggaggattcctctcaacctctggagatgtatacagctttggcgtagtactattggagttgctaacagggaaaaggcctactgatcctctgttctgcaatggacttagcatcgtcagtttcgtcgagaggaactatccagatgtgatagatcatatcattgatacttacctccgaaaagatctcaaggagcttgctccagcgatgttggacgaagagaaggcagcataccagttgctgttggacatgcttggagtggcactttcctgcacacgccagaatcccagtgaacgaatgaacatgagagaggcagcaacaaagctgcaagtgatcaacatatcgtatatatctggaatgtagagctaagtatactatacacttcattagtgcgcgtaccacagtgtataaaatggcaggtggcatttacaagtaactgtcttttgttatccatacatttgattataagggcaatgcaagtacaaaatttactcatctgtagacgcgggcagtctccccgtagctgctgtagcctgttttggaggagtttggtgtagaatgtaatctctgtagcttgattcaaaaaaaaaatgtaatctctgtagcttgtaactctcttgccgaaaaatcttaataaactttggctggcatacgccagcctgcgaaaaagcaaaatgtactcacctcaccaagctggttgaaaatagtgctctaaacaaactgcaattgtgactggtgaagagggttagagggaggttcagtatcttcacaatgtcaattggacagttactgcaatgtatttctccaaatagtctgtaactaaaccaacttttgagtaatatctatgtttcaggccaacaaattgcttgccagttctcaaaaaataaaaataaaaatgctgtagtagtttaagaaaaaaatggcaagtttttgtctttggaaggatccgtcaaatataaactgaatcaactgagcaaaagaaaagtaaaaaatattacattccgttgataaactgattgattactctctatgacagattaatcggttagttgtgaaagggtatgtaacctagtgattgcaatgacctgagtagcaccacaaggtcctgagtttaaatctttataggagcgaatttcagattaggttatttgagagctaagttccctatttgatagactaagtttctaattttaaaaggttgcatatatctggttggatgtagaggccagataaaaaatatccttctctaaaaaaaataaaaagaaagactaatcagtcagaatactgatataaggtagagtctctctacctttttgagtcaaaaaaaaaaaatcagtcagaagacaaggtcaagcttagcaactggactaagtacaaaaattttggaattcttttgaacagctgtaatggaaaacctgtctgtttgacggattagaattgttccctttcggagtcatctgttggcttggcatgtccacccaccaatcagctttttctcctacttgctgctttttgtgtgtttcctttgtttctgtgtctcagtacacgatgaagtagaagaaatatagcatgtttttttttgttacatttcaaaatcatcataaatacatataacctgaattttaaaccacccagaggataccactgtcaaactaagaatttccaggggggaaaagcatgcgcctcctatcatggtacacagatgtaaattcaaataaaatatgacacatctgatgagcacggctgtacattagacttccagacaatgaacatcatcttatcactatttaccaacataagttctgggttggaccaacaacagaagtatatgtagcacacattttttttttgaagcaaaagacggcaggagctctgccggatatattagaaggagaagcagttacagaggtcaagaaagagcagaccactaggtgacattttcagttttcatttttatgtagcacacatttcatatcagttaactccgaatgacttagatattatctccctacaagtcacttttctcagttaaaatattacatttgtacttcacgtttctctgatttcctgactagcactagctccacctctcctagagctagagctcagccaaacagttttagctccacccaaaatgggagtggagctgaatggaactctctcataaaatgaaccaaagaggtggagctgggtttaaacggctccatcaccccactccagactcaactcctggagttaaatttaggagttggagctctactaaacgagccctatatcatctaaaatttcaagcgcagtagaggagctgctaattgtacttccttctctttctgaacccaatcaaggattgagccctgaagctggacaggtgcgtgcgcagcccaaaggctgaggaagtcagagattccatctgtgcgatgatgcatcttatgatcctgttgtcgcaacagctttgatttcctagctcctcgaatggtcctccgtgtgctcagaatgttcacggtcgccttcacagcatgaagatatgcaacaccatgtttaggcttccaaagcatctgatacactgtcgctttcgcattctgatgaaaataatctacggccctcggcaacatgatctcttccatttgttgcaaggcaatatttgtatgcaagcaatgctgctcattagcattaatcacctctatcacagaaccctcgactgatgggaataggctttctgaagatccgtgaggcgtataggcaagtagaacattcagatgcggtccacgcagatattctttgagagaagatttgccctcgacaattgttccccgttctctgaacccaggcagtgcaacatggcactgcaaattcacttgaataactgattctagagagaagtctggtaattctatcatgttcatgttgccactaccacataccttctgatcatgatgcttgcaacacactgggtttgggcggaaccattcggtagctatactgtgaaggttgtcccaatggtataaacgagaatgtggtatccaggagaagtcttgtgtaggtagcagagtaagttctttcctgacagtttcagttacagactcgaaatgaggagcaaacaactgcaagcacttaattatagtgccaactatgtttgtactctctgaaatctgtagtatcataccaagaaaaaagttatcctcaggtgcagtgccatcattgtaaacgaagaacaccataccttctatcctctctgcaatgttattgggccgtatccaaaacaaatgttgcttgtttccctgaaccaatttgtactctagcatttcacctgcaagaaggtgcccaataagagggtcgaagaacaagtaacgacgcggtgtccctccagactccacagatctcagaaagtcattagctccatctgcaaaccactcgaatcttcgaacggtagatctagtcggctcgtcgatattgccataaaagatggacgatatcagtgacttggtggcatgggcaattcgcctaggaaagaaggaatcccttgctacttgtttggcctcttgttcttcctggacacgctgcctgcacatgcgtattgtgtcatcacactcttcagcaacacgtttcagcttcttctgccaacgtagcaacggctcactaatgatctgccacttcttggatgtctcaagtgcaagatctaacttgatttgtgccatctctaacctgtccatgtgttcctgcgcacttgattttcgctcatacttgtcaatcatgccagatatgattttgttcactgtctcatgaacgagagcagaactgaccacctcccccatcttcagtaatctgtaggattccctccctgatcaagaatcaatatatactatatcaatcactaaatcaaaagacagaccagtgaattcctaataagtactaacaaagtgcaatgctgtaggatatgaaaaggccagccttctgaattgaatcaattttgtgatataagagatattcatgcagggggcagtgaaatgaaataatgcatgattccatacagaaaaaagtgagaaattcaaagttcaatgtaaggcctaaccttctgggttgaatcaataagaagtaacttggggccttgggggtcagacaggtgcacccagagagagagagtacctagcacaagataactggactgcagttttcaagaatgaacagtcctgtaacacaaggaggtatttatgcaggggggcagtgacgtgcatgattccagggagagagaaaaaaaaagtgagcaagtcagagttgggtgctaagcgcgtctttgtttgatgtgtatggtggagagaacacatcactctagtctaatctcctgttgattcgtcaatcaacttaaaggactaccctctttttgagcttttgaccgtcctaggtgggattgatgatctgccacactcttttagaccggagatttgatggtttgcaatcttgggctaaagctaagcatcagtcgacactgcaaagtctgcaatcaattcagttccggctactaacctttacggcctgtttgaagagaaggaaagaggaatggaagttttaaggagggagttgatagtgggattggtcatgggagttatatttttagtccctatcctttcttttgtttcacatcgaattctctccaagtctcacgaattaacaggcctcctccaggtaagagattggtgggaattggacctcttaattccccatcccaaaccccttcgaattcccaaatctttcaatcaaactacaaacttaaacttccagatatcatacactctcattccccattatcaactcccaccaaccaaacaggccgttagtcctttaccatccctttcacctccttggttgtgcatatacttcgtcaatatagagcctggactaatgaaaatcctcgaaatttggtcggctccttcgctgacccggcaaaaagttaatgaaaatccattatcttaaaaaaaaaaaatctctttcacctcctaaacagaattacagaacagtaattaagcatggaaccaaagaaaaaactggttgcgagatgcggggaaactgagccgtaccacgggctagtgcgcaggcgcatgaagcggccgccgcgaggcgcgagcaaacagccgctctcttcttcttccctctccgcgtcgccgcacgcgccaccacatacggcgccacctagtggtggagttgcagcggatcgacgaatgcaacgccatgcccggacctccctgcgagcgccctcgtcggcgcggactatcgatcgaccagaaaccccgtcctccggcgacggcggcggcggcggccgcggccgcggaggccatggccagccgcggcggcgtgcttgtggtggtcggccttcatgcggcccaagtgtcagtggaagcttggccagcccatcgagggcccaactaaagcccacactaactcacctggttgttacccttcttgcttcgctgccacaatacaactttgtttacaaataaagtcatgcagaatattgtgtatgatcatcgagcacaatattatcatcaccaactggcgtcatcacaccattgtcattttcgcgcaacggtatatttgtgcaaaacaataaattacacataaatggtaccactatcaaactcagaatttcccgttaaaaaatgtgtggatacaaataaccccaaaagaaaggaaaatagaagtgcatgggaatatccaatagcagaaatctgagcgagatactgatatatgctaattttctcatcaccttcaaggcttcaaacatattacacgcatgtaaattcaaatagaatatgacatccaaatatccagtggtgaaactgtacattagatttccagggaatgaacatcaagttatcaccatttactaagttctgcgctgcgcaaacagcagcagcaaatatatggagcacacatttcagatcaatacactcctaataacttggagataactccctaagtcacttcccctgctagaatattactccctttgtcccaaaatataagcatttttatccatattcttagctaaaagtgcttatattttgtgacggggtagtacattttcattctttgaagtatccctatttccctgacaagtccctattacatgatctaaaatttcagatgtagtagatgaggtgctaactgtgcttccttttctttctgagtccaatcgaggattgagccctgcagctggacaggcgcatgcgcagcccaaagatttaagaaatcagagatcacatctatgcgactctgtgtccaatgatcatgtcgtcgcaatagcttcgctttcttggctcctcgaatggttctctgcctcagcatgttcttggataccttcacagcctgaagatatgcaccaccatgtttggacttccaaaccatctgatacactgttgttcctgcattctgacgaaaacaatctacagcccttggcagcatgatcccttccatttgttccaaggcaatgtttgtgtgcaagcaatgttggtcaacaccattaaccatctctatcacagaactctcgactgctgggaataggtcttctgaagagccatggggcgtatagacaaggtgaactttcagatgcggaaattctttgagagaaggtttgctctcaacaactgtgacctgatcttttaacccaggcagtgaaacttggcactgcaaactcacgtcaataactgattctagagaaatgtctggtaaatatgtcttctccatgttgccactactacataccttctgactacgatgcttgcaacacattgggtttgggcggaaccattcagtaactgtactgtgaatactgtcccaatggtatgaatgagaacgtggcacccatgagaagtcctgtgtaggtagttgactaagttccttcctaacagtttcagttgtagacttgaaatgaggggcaaacaactgcaagcacttaattgcagtaccaactatgtttgtgcactctgaaagttgtagcatcatacctagaaaaaagttattcacaggcacactttcatcattgtaaacaaagatcaacttagcttctactcctcgctctgcggtgttatttggccgtatccaaaacaaatgctgattgtttccttgcactaatttgtactcaagtgtttcgcctgcaagaaggcgcccgataagagggtcaaagaacaagtaacgacgtggtgtccctccaaactccacggatctcagaaagtcattagctccatcagcaaaccattcaaatcttcgaacagcagatctaatcggctcgtcgatattgccgtgaaagatggatgatatcagtgacttggtggcatgggcaactcgcgtaggtaaggaggaattccttacttgttgttcagcctgttcttcttcttggacgcgctgcctacatttgcgcagtgtatcatcacactcttcagcagcacgcttcagcttcttctgccaacgttgcaagggcccaccagtgatctgccacttactggatgtctcaagtgcagtctccaacttgatgtgcgccatctccaacctctccatctgctcctccgcacttgaattttgctcatacttgtcaatcaagccagatatgattttgttcactgtctcatgaacaacggcagaactgactacctctcccatgttccctccctgatcaggacagagcaatatatatatcaatcactacatcattatgcccgatagaatcaaaatacagacaaatggatacctaataagtacttaaaaagagcaatgttgtagtatgtaaaaaggccaaccttctgagttgaatcaataggaagcaatttgtggtcacacaggttcaccgaagagtacccagcagacaataactggattgcaatttgcaggagagcttagtgcgaaagacggaaagactgacaatagtgtaagataacagatatttatgcagggggcagtgaaatgcattaatgcatgattctggtgaggaaaaagtgagtaattcaaagttggtgtaagcgagtcttgtgggatgactatgtcatccaggagaatacatcattctagtgacctagtctagtctctagttgaaactgccgtctcttgattttgactgtccgatcctgggctagctaaagttaaatccttttgtcagttgtctcttgtcagtgaatggccatggcactggcttgcttgtcacctgcttacgtggtggtggtcaaaggggtttattgggccctttgtcagtcaaagcttggctggcctatcgaggcccaagtaaagcacatattaactctccatatgccatatggattttccctttttactactattattatgttaataaccctgacctcctctagtcctatagtaaaatggaagaaaataacttgagatagagaggtgtataatagtacaatatcaagatttcagcagaaaatatactcacctcaccaaactagttgaaaataatgatgtaaacagattgcactgcaagcctgaagaccataaatgtgcgtccagctggaaatggtaagaggagagttcagttcagttgcattcactgttcagttcaattcagctggaactgtgcgtccaaactagttaaaatgtcaattggagggtgaaaaggcattattacctctggtatttctccagatattctgtaactgaaccaacttttgagtaatatatgttcagaccggtgaaattgcctgccacactctgtttcacaggattgcaagtcttcttcctttgcgaaagggtccatcagcatcaattataaaatgaactgtacatactagtgacacaattaactattctgaatcatagactaccaaccggtcatgctttgtaattggaccaagtattgggattcttctgaacacttttaatggcatacctgtcttccatatgcattgaaattgttctatttggcaccttatgttggcttggcatgcccacctccacacagacccaccaacagacacaaaaaatgacttggtctcctccttgctgcattgttctgttttctgtttcagcacatgatgaagtcagaatatattattacatatatgcatgtgttgtcttctctcaattcaaaatctcctaaacatatagagtagtttgaactaccatagagatggtacaaatgtcaaactgacaatttctgtaaaaaaaatgcgtgctggatgcaaacaacccaaacaaaaaaagaagtgcatgggaatgtgaagtacagaaatttgagtgagatatgaaattttttcatcactttcaataacgatacatgcatgcaaattcaaataaaatatgacatatccaaatttccaatgatgaaactgtacattatattaccagagaatgaacatcatgttatcatcatttacaaacataagttttgagttagaccaacagcagcagcatatgtagcacacatttcatatcaatacactcctaatgacttagaaatcaactccgtatgagttacttttctctgctagaatattacatttccattcatttaattatccgtgttttcttgaccagtccctgttacatgatctaaaatttcaggcgcagtagaggaggtgctaattgtgcttccttctctttctgaatccaatcgaggattgagccctgcagctggacaggcgcatgtgcagaccaaaggttgaggaagtcagagattgcatttgtacgatgctgtgttttatgaccctgctgttgcaacagcttcgctttcctagatcctcgaatggttctctgtgtgctccgagtgttcatggttgccttcataacctgaagatatgcaccaccatgtttagacttccaaagcatctgatacaatttcgcttctgcattctcatgaaaacaatctactgcccttggcagcatgatctcttccattagttccaaggcaatgtttgtgtgcaagcaatgttgcttatcaccattaattacctctattacagaactcttgatttctgggagtaggtcttgtgatgagccatggggtgtgtagacaaggtcaactttcatatgcgggcattttttaagagaaggcttgcctttgacaattgttccctgttctctgaactcaggaactgggacatggcactgcaaactcacttcaataactggtcctagagaaacaccctgtacagatggcattcctagattgctactttcacagctgtggttctgaccatgctgcttgcagcataatgggttagggcgaaaccattgggtagtaatgctgtgaatattatcccagtgttttttgtggcatgattcagcatatggcacccaggtgaaatcttgtgaaggtagctgagtaagttcattcctaacagattcagctgtagacatgaaatggggattaaacagctgcaagcacttgattacaatgccaagtatgtccacactctctgaaacttgtagcagcatacacaggaaaaaatcatcctccagtgcactagcatttttactgtcaaagatcagcctagcctctattctattctctgaaatacagaagggccgtatgacaaacaaccggtacttattttcagacactaatttatactctagtgttttgcctgcaagaagttgcctgataagaggatcaaagaacaagtactgatgtggtgttcctccaaactccacaaatctcaaaaactcattagctccatctgcaaaccactcaaatcttcgaacagcagatctacatgagccatcgatattgctgtaaaataaggaggacactaatgacttggtggcatgggctattcgtctaggaatagaggaattccttacttcttgttctgcctcttcttgttccaggatgcgttgccggcatttgcgcagtgtgtcatcgcactcttgagcagcacgcttcagcttcttctgccaacacagtaatgaagaatcagtgattcgccacttacaggatgtctcaagtgcagcctccaacctgatgtgtgccatctcaagcctctccatgttctcctctgcgcttgattttcgctcattccagttcaccaagccatgtatgatttggttgactgcctcatgaacaaccacagaactaacaatctctgccattaggactcgatcacatatcactatgcccaatgtaataaagggacagatcagtgattcctgatctgtaatgaattgctctgattatagtagaactacttcagcctgctgagtttgaattggtagaaaagaacctgggatggaaggtattgccaaagagcacatgaagtggcactgtggcagtataagaatctacccagcaggctgagaccagattgcctgaatggcgagctcacaattctgtaatatatactgatatttggaagggacagaagaaagtgatcagattattgtggaattaatgaaatgttcaagtgggcctcttcggccctccgctgatggctcaaaaaagaagaagaaaaaactattgtggataggaatggattgtgatacccaggacttttgagggttaatgggtcaaaagtggttagcgagtcctgcactcagttggttttgttatattctcaaggagaagaaaatggccaaatggggaccatttgctacaacaatctcttgcgatgaggtgactggtctttgtcatttggttaattcttcaatgacccttgtcaaactctggtcattgtttaatcatttagggagaagaacggaataatatctagtccgatgcctggcatcacgttttcctcgtacacgaaagtgaaatcagtttccctttcataatgggatgtccttttctacagcataaaaccgattagacggtagtatcttatcactattgcagaaaatgtgaaagcaaacgtaagtaacttctaaagttgttgacgatgcaactacctataaagcacatccatggtggaaattaaattgacccctagctaattttactcccttagtatgaacagatggtagaaaaatcaaattgatccctcgctaattttactccctagtgtgaaagatggtagcatcattcgagcaggcggtgaaaaatcttctccatcatctgacgggacgccggcggtaacaacagtaaaccaaccggagatgcgagtgaaccgagcgtgcatacctcgagcgctcgccgcggcggtagtcggtgggtgcgcttgtgcttgcgcctcctcatctccgtcgcgccggggcgcagctagcttccccctccatgctccgcctcctacctccccgtgccgccatgcgcgcggcggctgcggcggcggcgccgccgctcgccgccagcgctctcggtcaccgcggcagtggactgggccgaaagcaacagcttgaaagcctcatttggctaggccgaaatgacagcccgcttacatagattaatacacgtgggtgggccagaattgaggcccatccaaataaggcccaagagataaatattgctcatctatttcagcaatgagatagtaatgccgattttgttatatatttgtcgacgtttttttctaaaaattatattgaaattacaatgaaattttttctgtcaacaaattttgctatatataaattacaatgtaattatattgagattgtactatatttacatttgtcaaacttttagtacaatctcaatgtaatttcattgtaattacatgtaactatcatgtaattttgaaccattcgatttgctttaaaattcgtgtatgaaaaaataactaactgtgacagaaaaaaaataagaactgaacaatagctagcagatgtaaaacatgtacatttgcattgaacatacaggaaattaattaacatagactggcttgtcaagagtcaagactaagatgggccttggctaaacctaaacacactggctcgtactagtacaatattatacatcttttaatttgaaggggaacatcttcagtaagcatatacataatacatgattaaactgtccgcccctaccaaaacttacactagttatgtcttgtctttgatactctcctggccttggatctgcaactagaattggttttgcagctccggatgcgcggcttcatcagacaaaggtatccataaccatgaactgaatgaaaagacagtgaataaaaccccaagtcaggttgacagacgaagcaatccattaccttgggcactaacactgccatctcctgcatttcgtgcagactagcatacatacacttatcagttgctccccgactactgtaactcccccgattggcttcagggtgcgagaaatgaggcgaaatattgatcaccatcttcaggatagaccaatccctcacaatattgcttgagttgtacaagtaattgtactcaacagccgaaatgtagctgctgcagcgcacatagataacttgttctggaatatcatatggtaaattgggcgagatggtgttgtcagcacaaggatcgagcctcttttctctgcaacaaaatggatcagggcgagcaactgtagctcgaaaggcaagaaagctccgatggtagtccacggcctgaagtgctagcagtggttcgaggtcttgaggatgtgagtgttgtagagcagcaagttgaccaattgcatctttagccaaacgcgtgaaatgaggcccaagtaactgcaagcaattgatgataatcctaactatgtccgtgctctctgagagtcgtagtatcagcaacagacaaaaatttttcagtggcattctgctatcctccttatttaactgtatcaatgcctctacgccacgcccttcaagagatacaggtactattgtaataccaagggttttgcttccttgcaatggcatgtcatacttgagatgtttcccttctagaagtggtctgatgagagagctaaaaaagttgtagtgccaaagtgtacggccagtctccacatccctcgcaaacttaccagccttctttgcaaaccattcgaatctgcgaacatgggagcaactcaaaagatattgcttgttcatgccaaggaaagacaagacatatgatttcatggcttttacggcttggacaaactgcttgggaaaatagctgtgtgttaccccttgctcttcagcaacttccaaaatccgcaccttgcatttctccaccacttcactgcactcctcataggcacgtttgaacatcctcctctgacgaagcaaggaaacatctgtgatgggtagctttgaagatctctctagggcgtgctccaattgagcgtgtgccatctccaacttctccaagttgtgcctctcggacaccttctcccggttgctggacaagtaggagacggctccgcccaaaacctcttggacaacagttgaggccaccatttctgccatgaggactgtttctacagaaaaaaaaaagaaaaaagggagcattttgacagaagacataaagtgaaagtgattaggttgcagagagagctcgaaatggggcaccatattcgcttaagggacgtagaaattatcacattaattgaagaaaaaaaaagtaaagatattggccatttgatcgtgataggtccaaattataatgatatagattgatcgatatagttgtatataaaaaatacagccatgtctatataaatagtagaaagtaagagttgtctatcaagtatcaaatccaattctaatgttagaatctgttatatacaaattacaattgaatctaagaaacttaagctaagaattgttactaaacctgatcctacttttgaaatctaggtctgctcaaaattgcgcagggaaatcctctaaattatgttacatacatacatacatacatacacacatacaatatgtgcgcgcgtgtgtgtgaagctgtttttaagaagttaaggacaaagtgatttatatttaaaaattataagatttaaaaggaaaccaatttcgggctctcaatttagtggtatcctattaatttaatgaaattaaaaattgacaattagcaaattgtaattgatgtctattcttctttcaatctaagcttataattcactcccactagacggatgaatggatagaaggtgagtgagaaaggaggaactattactagatatgtagtggcagcaatttattcactgcttttcctattaagatattttcttgaagtacccagttagtataagtataggtagatggtatgcataataaaattctcacctttgcctcttaggctcttactaaagaaccgagatactagccactgatcccaactctgagaagatttggaagctggccaggtcacatgcagagaattggcctagtggcgtactggtgttattgatttgtattgatggacctggacaaaccatgcatgtaggacagtaggagtaagcagctgtcttacaaatgaactaactgtctatatatgaagaagtagagcagattgagattattgtaatattactaaaccttaataatataatgagtattcaaaaaagtaatattactgaagttgaacatatgaaagacagaaagagacatgaaaagtttccacgaaggaggaggaaagttcctaattaagatgtcacattcacccgcaaaaccgtaggaagttgcaaacgagggtagatttacattagcatgggtttgtctaatctgtgtttatctacttaagcgcgtcatttagccaaaaattctgtaatcaactatgccatttccgcatttcgtttccaagataggagtaatcaatacttgaatcgttctcccaaaaagaaaataaaacaatccaatccttatcatgctcgctggcggaggctactcagtcatcgacaacaaatcttgaattcttaagatcatcacccaccctaccacttcttttatctggtgtttgttgttacctaatgatgatgggatcatgtgacagaaggtgccttagttccctgcaatttacgatcatatagataaataggataagaccctatagataaatgatctcaattaacgcgaaactacgctataatcgcatcgatgaaaaccaaagtggaaactaacacgcgcttatattaatttattagacccaaaactcagtggaaattataggagactactagaatgaatcaagcggaaaatgaaattgagaaatagtagttggtgcatgtacttgacgcgcggtggcaggtgaagcctccttcatcctcttcaccctttgcctccgcggcttctccggccgccggaggaccgcctcgcctcgccggacccgtaccccgtcgtggtcgacggcgccaccgccgccgccgccttcctcatcgccgttcctctctctctccggttcttccccttgtgactcttacggcctataatactatgggctttatctaatgtagtgtaatgatgggccgggcccattagcgcaatgggccaataaatttaccaacctcgaatgaatttccgagaatttcaggcaaaaatcaaaaacttttctccgaatttgaaatcccaattcgaatccaccggaaggggagaggcggcgcgacgcgaatggcgcggcggcggcgggagaggcggcagctcgctcgcctctgcgacctcgtcgcctgcgcactcctcccccacctcgtaagcagctctctgcactggcctctgatgactctggtctcctagtcctagcctatcactccgtgcgcgccgctcacaggaacccaagccgccggccacgcggctcacacgggaggacgagcggcggatcctcctcgcgctctcccgagtaatcctctcactagggttcgcgattgttactgctgcgctctattgcccttcccttccgtgatttttttgggatttttttaggtaagtaaggcgattcgaggatgggaagaggaagaggaggaagaggaggaggaggacgacgacgaagggtgcgaattggatcaggtattgcctccgatagcctttttttggtcagtttgattgttgaactgctgtaggtttagtcgaaattatgcgactgactgagcatttgctttatattggggttgaggaattagaacgtaatgataaaatctattattagcacatggctttaaccctgtagtgtaaggtatcatcacggagcagagagggagtggtttgggattgtgatgatgatgtagaatggcttgtgaaatgtctttatggcatcaaattacttagttcatgtagtaactgatttctgttttgtgagggaatttgtttgattctgtcactcaggttccaagtattacattcatttgtttcttaccctttttctttaggagattatttcatgttccgcggaagttcacagttgcagtttaccagctaaccagcattttgatgatggatttagctgcctggccaatattatctccatattggtaagaatatttcatatacagctttgttgcgtcagccatcaactttccaatcatagtcagcgggatcctcatatggtcccagttcctcataaccacctgttacagtattaaatatgaagtgcacaatattacccttcgtccctgccattgagcaatggctctttagactaaatacatctggcactttttatgctactatgaaccaataagtaattgttggggtctttgggaagcgaagggttctgggtgctagtgcctgactgcctgagtcattcattgtttatatagcaacacaaagacaatgagcaacactggattagtcttcattttcattaaccttaatcttttacatttgttcaggcatattggcatcaggatatataagtagggcataggcgttatcccgatcacctgtgggtctctatcaacaactttgaatcatgtcatttgatccgtaagtagtgttaatgtgtcatccactcttaccaatagaaaagggaggcatgaaaaaataacaacaaaattaaccagaggaagttgttgaaactgtggctccacaaaaattttaaactacgtatactgcttcagaattagatattattgacaattgtggtgactgtatactgttttattacatttcgtaccctcatgctttttttcttcaacagcttactttgttagtatatgacatcatccttttcaggttggcttctttggtttctgtagcagttatgttaaacactcagctgggaatatcctgattgtcatctctgactctctaatgaagtttgtaagcttctcatgctttctcattttcaatctgatccacacttctctctcaaaaatatttattattccatggttgttgctctattttaggaggttgtttggattcaatttgttgagctggtctggatagctatacatacagtatcaacatgcgctcatagtgctttaccttctttaattgactccatcagcagtttcagaaaagactcgatttgctattgctctgttatggaaagtctaagtcacgacattattatttcaagcaccaatatcacaagcttcgtggaattacttcagctacggtgtcttgatatcaatgggcatatggtggccagtctctttcgagtactgcacactattttaaagttccttaaacacactgataatgaactgaaagaggacttcatttgtatatctgctcatcatattcttatggttgattgggatttgtattatcaactcaatgttggagaacctctaaaccttgtcaaggatagcacatttagcttgagtgatgatttgaaacagttaggatttctttcaagcagtctcctccaactattgtgctctttacttgagcaaagtgacctggaagacaacaatggacaagatatctatgctaagcttgtaggtgtaattcctaagttagtggctatattaccagagcatcaggatgcccccaaaagtctctctcagtacttaaagcacaaatttctggtaatttcagacatgcaaagattttctattactgcactgacatttttgttgcttttcattttttacgaataagaattgtaaaacagtttttgattaatcaggtgcatataaagttcttctatgaaattaaacattttgtttttggaccatcatcagtctgctatttatttttcaatgcagatgataatgatgcggctaaagccttacatccagaag

SEQ ID NO: 8848 - DNA, 16896 bp, Oryza sativa
agaatccacaaaggggaagcagtagaaggctcggtggtgaacctgagtgagctcctgctttgcagcttcagcgaccggcttgaaactagggagaagtgaatccaagcacctggccacaatcccagtcacgttcgtgcttgctgtcaaacgtagaagaattccaagaacaaagttctcctctggcctctcatggttgttgtagcgaagcaacacaccggcttcttgccctcgttctgcgaaactcattggctttgatattaggtagtactgatttccatgagaactttcatactgcagtgctttgcctgcgaggagatgcccagtgagaggatcaacgagcatgtagttgatgctgcctattctgccaaactccatgaatttcaggaactcgccggcgccatcggcgaacctttcaaacctctgaatggttgaagtggagttcaggctatcaacattcttgtcagcggcgaaggaggagaggaatgatcttgtggcaagggcgatccgtttggggaaagagcaccgactgatcttctccgtctcatcgtcttccatggcgcggcgcttgcatctgtccatgacatggctgcactcgtcggaggctcgcttcagcttcttcctccaacgcataagcgaggaatccatggccaaaggccacctgctggacacttccagggcggcctccatcttgatgtgtgccatctccagcctctccaggccatcttcctcgcttgatttgcggttatgattgtcgatgaggaaggtggagatcctgctcacagcctcaccgacgaccgcagaagcgatgacctcagacatcaggatgttcttggtgatcactgctgccctctattaaaaagggaattaaaggtcaggtgacaattattcatcacagaactagagatactggacttcagcacaaaatatacttaccacaccaaactggttgaaactgaaactagtgctttaaactgatagctttgcagattgtgaacagcataaacctgaatccagatggaaatggttcagagtcttcacgataccaattagacagtgaaaagtcatgaaggagcatctgtacaatgagtgatgtcatgaagttgacagacattaggtaattaatgtgaccgtgatagcaagatgactagtcttcccttcacaacaccacaagtctgatgatttgaatgtacagttgatttgtcacaatcacacaaaacttaaaaagctgcctcgttgactgtcccaatcttgtaaaaagtctagctattgaagacaaattatcctcgtcaccgcaatccttttccttgaaaattcgtggtaatgcttcaatgtcatgttaatcatgatcttaaaaaactgtgtttcacttgcataaactcctaacagtttcagctgcacatacttaattatagtgccaactatgtatgtacttgctgaaagttgtagcatcaaaccaaagaaaaagttatcctcaggtgtgtctctatcattgtaaacaaagatcaacttagctcatgctcctcgttctacaatgttatttgcctgtatcaaaaacaagtggtacctgtttccctgcactaatttgtaatccagcgtttcaccagcaagaacgtgccccacaagagggtcgaagaacagataatagcatggcgtccctccaaactccacagatctcagaaaatcattagctccatctgcataccactcaaatcttcgaacaacagatctatttggctcatggatattgccgttatagatggataatactagagacttggtggcatgcacaatttgcataggaaaggatgaattccttactagttgttcagcctcttcttcctcgacgtgctgcctacacctgcatattttgttatcacactcttccacagcttcttttgccaacgtaatatcgggtcaccagtaatccgccacttatttgatgtctcaagtgtaacctccaacttgatttgtgccatctccaacctctccagatgatccgctgtacttgattttcactcacagctgtcaatcaacccagatgatcctctgtctcatgaaccacagcagaaacaaccacctcttctatcttcaataatctctacctgatcagcacagagcaagatatatcaatacatcaatcttttgcgaaatcgcaaaagaattgcacgtcaatatattagatcaatacatcattcaggatgctcaaataaaacaaaagatagatcagtgaattcctgataagtacaaagtgcattgttgaattatctgtgaacccaaccttctgagttgaattagtaggaaagatcttgagggaaaacaggtgagccacagagtatctagcagacgataactggtttgaatgaatggcgagaatgaaagtacatgtcttcggtggatagagaatcgagcaaaccaaaggtggttctctttcaagtttggttagtgctctagtctgttctccagttggtttctgcccactttgactgaccaatcgtcaatagtcaatactgaatgctgactgaccaatcttccagaaaggctagctaaagataaatatttttggaaataaacccctgtaggatttgttttcaacatataggtctccatgtacacactcccccttctgccgctgtaccacaccaaaactgaattttacatgtagctctctctcataagtcgatggttgggcgctcgcactcccctcttccggccctcccgctggggcgccgccacaagccaccagccaccacgccgtcttcgttgccgcaccagagctgagcgcggccaatgagtcggcctgcaccctgccatctctgttaccacattctccatgcagaggtaagcaacaccatggcaagacctccagaacacctcgtgcgccgacgattcatccaccgcctcgtggcacaggtgattgacggcgtttggcagcagcaactcctccaactcatgcaatccaacattggtgtgcacgggttgctcctccctcccatcgatcgccacaaccgtgacgctctcagccccggacagcagctgctctggtgacgcgtgtggcgcgaagacggccgtcagctgaagcagaggtggccccgaatttccagaaaaaccagatgacgatgaagacgatgattgcttctgtctctggctcgtagagacatagcgctgcacggccagtttgatcaccggctccgggaatgcacctgacggctcaaccatgtcactgcttctgcttcgaccatggtgctcgtgttcttcgcagtcgcagcatgctgagtttggtcgagcacggtgagtctcagcatggtggatgctccagtactctggatcagtagaatccacaaacgggaagcagtagaagcctcgctggtgcaactgagtgagctcctgctttgcagcttcagcaacagacttgaaattgggtggtagcaactccaagcaactagctacaattgcagtcacatttgtgcttgctgccaagcgtagcataattccaagaatgaagttttcctctggcctctcatggttttggtaccgaagcaataccccggcttcttgtcctcgctctgcaaaacgcattggccgtgctgctaggtagtactgatttccatgagaattttcatactgtagagctttgcctgcacgaaggtgcccagtgagaggatcaacaggcatatagtttatcctgcctatgctgccgaactccatgaatctcaggaactcgccggcaccattggcaaacctttcaaacctctgaatggttgaagtggtgatcaggctatcaactttcttctggccagtgaaagatgatatgaacgattttgtggcatgggcgatccgtttagggaaggcgcactgcctgacctcctgttccatctcatcgtcttccatggcacggcgcttgcatctgtccatgatttggctgcactcatcggatgtgcgctttagcttcttcctccaacgcaggagcgaggcgtctgtgacccgaggccacctgctggatatctcgagggctgcctccattctgatgtgtgcaatctccagcctctccatgccatcttcctcgcttaatttccatttatgcttgtcgatgaagaaggtggagatcctgctcacagcctcgctgactaccgcagaagcaactacttcagacatcaggatgttcttgtcgattaccctagcctgtttgtaaaaggggatggaaagataaggttacaacttacaattatattcacaacagaactagagatatagaggtttataagaatgtagcacggaatgtactcacctcaccaagctgcttgaaactagtgcttcaaacatactgcgattgtgacttgtgaagagcataaatctgtgtggtgaagaggggagttcaattgattcacaatgggacagtgaaaggtccttgagtacatctgtgctggaattgatgtcatgatatagaaatttggtaattaattaacatgaccgtgatagcaagatgacaagtcttccctccacaccgcctgtatttctccaaatactctgtaactgaatcaacttttgagtaatacatatgttcaggccgagaaaattgtgccatagttgtttcaaaaagagatgacaagtcttcatctgtggaaggatccatccgatataatgtgaattaaccaagcaaaagaaaagtctaagattgaacgatagattctggtgacaaattgattagtctcaatcacagactagtcagtcagaagaaataaggcgcaccgcacgacttgtcgacttaaccaaaaacaatgcttccgaatgttgactgaccagtcttgcagaaaggctagctaaagatgaatcctcttcgtcactgcaacatttttttttaaagaaaaaatcattgtcactggctcagtgcaatcacttccaggcttccagctactcctcttgaccggttgaatagatctcgcgcagtaaacgtgatcaggcagtgatatgcagggagacggagcctcacctcgtgctattgcgccgcggccgccgaggggaaacatcggtctcctccatctccgcatcgccggcggacgcgctcgtatatgtggcgccccatggagacagtggttgcagaggatcgagcaagggaacaccatgctcggacctcacctccttgcgccgccgccgcgggtccacgcgcggcgtagcctgcctcctcgcggatcgtccggcggcggaggccatggccgtggcggatgatggtggtcggcgaggagggtgaactggagacgaaggggtggcccagttgtcagcgaaagagagtccatcgcggcccaagtataagcccacacttacaccaggcaattacgcagcccccggatcagatgagatcagaaaatttacaaccaggtccctcagggccgttttggattgaagccaaaacgtgccataccaaaattttggtaatttaaatagaaaatgtgctagtttgaattgatgccaaacaattggtagtgcccatgttcaatttggctatattttagaatcttcctcaccatcctattaaaatttggctttatattggtcccaaaccaaacatagctagctaactttgctctacccaaaaagtatggtagacacgcatgtcaatacatgggtggatgcacgcccccttctaacaccaccggccgtcacattggagcacaggaggcaagcggcaccgtcgtctaccatcagaccagccattgagtcggcctagggacacaagcaagccgacttgcgagctcacttatagatcaaatatgtgataatccgtaggtttttatatcgtggtcccgcttgccacatctagatatgtaaatagatcaacccatatatccatttatagtttaaattaatagataacccgcgagttacccactaaattttgcctataaattaaacgagctcgtgggttggcccgcttgtatctcaaatcggcctgcattttgccatctcggtacccatcttttccacgcagaagttggtaggcgatgccatagtgggacttccagaatacctcgtgcgtcgacgatccatccacagcatcgtggttgtggctttggcgatcgacaacgagtcaatgactggtagaaagaactcctccacctcaaacagcacagcccaatgttcgttcatggcttgctcctcccttccatctatcgccacagccgcgacggccgacggtcatgtttcgggatagcaactcctccggcgacgcatgtgtcacttagaccgccttcatcagcagcatagatgccaaggaattttcagaaaatcaactactctcgtcgttgccgaccagataattgtcgcaccgagatatgtcgttgcacggacaatttaatcaccggccggctttaggaatgcacctgatggctctgaccatggtgctcttgtccttcgcggcatgccggttttgggcgatgtgctagcggctggtgggccttcttgaaaacgaaagggtagatgactattttttaatataaaatcctctaatttttttggagtagaacagagtctcttggagcaaaaagttgttattgttatagttcctttctttatttattattttcctcaataataacgtgtcactgatttataagttctttttatctttaaaaaaaagatatgcctacatatatctaatacgatatgaccgatgacaggtatagccggtgagctggctattctatttgtcaaaaataagtaaatattgtagataattttgaactataatataattttattttgatgatagccacgtaatagcagggccaaccttgctattttttttttacattgagtaatttgtattggtggtacacaaaacttattaggtgggtgcaattaagtatataaatttataaaatgctcgttttaatacacgaacttgtctaattcttgcgaatgaggatcaaaataacttggcaatgctaattatacgaaaccgatgttgattaggatgtgatgtgaatacgtgtagtgagtatgcataagatatgcaatatttataatttgatccttactttatccatgatgaatttcatatatttttaacccttatatcattgcttggtatttttaaaaatctttttctacaatcactatatcctattctatttttttattgaagaggtgtatatctaattacaaccttcttatatactccctctgtattttaatgtatgacgccgttgactttttaaccaacgtttgactattcgtcttattcaaactttttatgcgaatataaaaatacttatatcatgcttaaaaacatttgatgataaatcaagtcacaataaaataaatgataattacataaattttttgaataagacgaaaggtcaaacgtttgtcaaaaagtcaacagcgtcatacattaaaatatggagggagtatatgtttacatagtatcataatcagcccctaaatcaataagattagccatgtagtgtcattttcatctttctccgcacgtaccagacaagttcatgcaccaaaataagcattttacaaattcgtgtaccggcgatgcaatttactctttacattcatgaccctacccggctacttgcaacggatgtcagcaacccacaaatttacaatcaggtctgtcattggatcactaccacaatcaggtcactcatagagattacaaaatttacaatcgaaatccctaattttggcatttctttttttgcaaatcaatacctatcagtttttgttttttttttagaactagggccagagagcccccatttctcttactagaaatgagcatatccttacaaagtcagggaaacaaaaacaaatacgaggaaagaaagctaaagagcttatccagatgcctcacagggctcgatggctgaacacgaataacatcattcggtcatcaaaaggataaaacagatcacaaaaaactaataacatcttcatccttctatcctccagattccaggtctccatccatgtcttgagcagaagatgtcacttgccacctgtcttataagtctggctcccaactgcagtcttcttcgatttgcttccaacttctgcaaagatgcccaggaatccacccaggaacaagccataaagaccaaatcagtaggatctcttggaaatttattttcaaaacaagctttattcttggacttccaaattgtccaaatgattgcagctaaaccaatcacaatcaagtgtttcatgtttttatcatgtctatccagccaatgtccaaaaatatcctgatgattcaaagtaggcagtatatccaaagcacaacacatgatattccagagaagtttggccaaagggcattcaaaaaacaagtgctgtatatcctcttttttatcacaaaattgacacttttcattcccctttctccaaccttttttatacaagttttccttagtgagaattttgtttttaacaaacagccaaataaagactctaattttcagaggaatcttaaatttccatattttcttttgagggaaagacacctgatgcattttaagggctttgtaaaacgatttcacagaaaaaattccatcctttgtcaaattccaatagattttatcttcagagtcatcctgtaagttcagactttccagactgtttttgattctcacccaatctctcagtttatctccctctagatctcttctgaatttgatgcattgcaagcctttcattttcacctttgcaattgtcacatgtttggtcaaagctatattgtacagatttggaaactgaatgttaaggggttttccacctattcagctgtcctcccaaaacaaagttcttttcccattccccactttttttgaacaaaatttaaaaaaatcatcctttacttccatcaacccatgccagaaatgagagttaccctgtttaaagtttacctcagacatagttttatttttcaaatatttccccctaagaatctcctgccaccaaccttctttgttttccaaattccaaatccatttccccaacaaggccttattcataatgtccaggtccagaacacctaaacctccttgatctctaggtgaacaaataatgggccattgcactaaatgatattttctgatgccttggtcctcctgccacaaaaacctcctcctgaagaagtccattttttctttcactcctttgggtaacttgaaaaatgagatcatatacatgggaacactgcttaaactagaattgatcaaaattaatcttccccctattgactatcagttttggtttttacatagctctcatagatcgatggctgcgcggagtgggcgctttctcttccatcctcttgttctcccgccgccgccgccaccaccagccaccgcgccgtttccgccgccgcaccagagctgagctcggcgatgccacaacctttcacaatgacacggccaatgagtccgcctgcaccctgccatctctcttcccatcttcttcaagcagaggtaggcgacaccatggccggactgccacagcacctcatgcgtggacgacgacgacgacgatccatcgtacgccgcctcatggcggcacaggcgatcgatggcgttgggcagcagaagctcctccaccaacattcctgtgcacggcttgctcttccctcccgtcgattgcttcgacagcaacgctccgggctctgggcggcagctcctccagccaagcgtgcggcccgatcacggccgttagctgcagcaggggtgtcctcctatcgccatgaccagatgatgatgatgatgaagaagacgatgatggcttctgccatgcagagatataccgccgtacgaccaatttgatcaccggctccgggtatctaccatggtgattgtgtccttggcagcatgcggagtttgggcgagcatggtgagtctctgaatggtgggtcctcctcgagtactctggatcggtagaatcaacaaaggggaagcagtacaaggctcgatggtgcacctgagtgagctcctgctttgcagcttcagcaacaggcttgaaattgggtggtaacaactccaagcacctggccacaatcccggtcacgttcgtgcttgctgccaaacgtagtagaattccgaaaatgaagttcttctccggcctctcatggttctggtaccaaagcaacaccccggcttctagtcctcgctctgcgaaactcattggccatgctgctaggtagtgctgatttccttgagaaatttcataccgtagagctttgcctgcaagaaggtgcccggtaagaggatcaacgagcatgtagttgatcctcctgcctatgctaccgaattccatgaatctcaggaactcgctggcaccatcagcgagcctttcaaacttctgaatggttgaagtggtgatcaggctatcaactttcttctgtccagtgaaagatgataagaatgatcttgtggcatgggcgatccgtttagggaaggcgcactgcctgacctcctgctccatctcatcatcttccatggcacgacgcttgcatctttccatgacttggctgcactcatcagatgtgcgcttcagcttcttcctccaacgcaggagtgaggcgtctgtgaccggaggccacctgctggatatctccagggctgcctccattctgatgcgtgccatctccagcctctccatgccatcttcctcgtttaatttccgtttatgcttgttgatgaagaaggtggagaccctgctcacagcctcgctgattaccgcggaaacaactacttcagacatcaggatgttcttgttgataaaccccttcctgcttgtaaaagtggaacgaaaggtctagttagaactgttcatgacagatctagagaaacagaggtgtacaagaacttagaacaaaatgtactcacctcaccaagctgcttcaaactaatgctttaaacatactgcggttgtgacttgtgaagagcatacatctgtgtggtgaagaggggattcaattgattcacaatggcagggggacttgtcatccggtagcaggatgacaagtcttccctcaataccgcctgtatttctccaaatactccctgtaactgaaccaactttggaataatacatatgttcaggccgataaaatttctttccatactcgtttcaaaataattaaaagaaaaaaaagacaaatcttcttctgtggaaggatccatcaaatataaaatgaattaactgaggaaaataaaagtctaagattgaaagatagattctggtgacaaactgattggtctcaatcacagctagttggtcagaagaaataagtccatgactgacttcgtggagaaaaaggttagcaaagcaaaattgtgttttctcagaagttaagtgggtcatgttggatgtatggtctaattaacatagcacaaggtgagaagtgagaacacatcactttttagactctaattaacatagtctccgtatgatttgtcaagcaagaaaactgccctctatgaccgtccaatctcattgcaaggctagccaaagataaatcctccacgcctctgcaattaggacaatttaaagtaactactcgtcactgcaatcagtttcgggtactagtcttgactcttgtgtggtcgaacagatcttttgccaattctcactgaacttatctttcccctaaaaagaacagtaacccattgcctaaatctgttttgcaggttgtgtacagatcgatagccctgatgcagcgctggagggtgctccaaacaagaaaagactgcgccctgctagagctggacaacgtttttaagaagctgatggataagatgtacaggctgtgtctagtttcttccaaagttgaaagtttggattgaaattggtacgatgtgactgaaaagttgtgtgtgtatgacaggttgatgtaatggaaaaagttggaagtttggattcaaagtttggatctaaacacagccacagctttggcctggagatgccctgccctccgtccctaaatatttaacgccgttaactttttaaacatgtttgactgttcgtcttattaaaaaaattaagtacttattaattcttttcttatcatttgattcattgttaaatatacttttatgtatacatatagttttatatattttacaaaagtttttaaataagacaaacgatcaaacatgtttaaaaaagtcacggcatcaaatatttagggacggagagagtattagggaagatgggtgtgtgggggtgtttttggctggtttactctctgttctcccttcctggagatgggcaaagggcactgaaagctgacgatcccagtggtttaccatgtttccgatctggtagttttatttttctgttgtgtaagattctttcagtaagtttgaggctttctttcaaaaaacagggtaatgaaattacctgcagtttttttttaaaaaagaacagtaaccaaactgcacagaacaggtcgcgacaagcagcagtgaaattgaatgcgagcaaaatgtcgtacatatctgggatggagcgtatctgggatggagcgaattaacgcgaacaccatattacataaaatggcagatggcatttactaggaactgtcttttgtccgtacaactaagtaacataggaatgcgatgcaatagtggtgtggcgtcttgtaaataggtggtggctgcgaagcctcgccatctctgtgcattcttcaaattctcaatatactacggtcggcgtgccgacccggcgaatgcgatgcaataatctaccgtacaaaatgtaccaacctcatcaagctggttgaaactagtgcttagaatatactgtaattgtgccttaaccaaaagtttaagattgaacgatatattctgccattctggtgacaaactgattactctcaatcacagactaatcagtcagaagaaataaggaacacagggcttaaccaacctcaagctttgcaactgggctaagtaaaaatactgaaattattttaaacaataagggaatacctgtctgcttgtctgcttgatgattaaaattgtttggcttgacatgtccaccttcctcactcacccattcacagacccagcaatcaacttgttctccttcttgcaacttttttgtgtttccctttgtttctgtgtttcagtagacgatgaagtcagaataaatatgcatgtgttttaatgtttcatttcggaatcatcctaaatacatataatctgaaatgtaaaccgccccgaggataccactgtatgaaaattactgatatgcaaattacaatttttttacaaaaaataaagtgaatgggaatatgaaatagcaggaaatagggtaagtacaaaattttgtcatcaccttcaatcatggtaaacgcatgcgaattcaaataaaatatgtcacgcccaatgagtgaggatgtacattagattgatagagtatgaacatcatattatcaccattcaccaacataagtgatcagctggacaaacaatagcatatggagacatggagcacacattacagatcaacacactcctaaggacttctaaatttaactacctacaattcacttttcaccctataatattacatttccattcttcttaattctccctgtctccttaaccagtctctgtaaatgatctaaaatttcagacgcaatagtggagatgctaactctgtttccttttctttctgaatccaatcaaggatagagccctgcagctggacaggcgcatgagcagcccagaggttaaggaagtcacagatgaagtcacaggtcacaactgtgcgcctctgcgttctctgatccattccacgcagcagctttgctttcttggctcctcgaatggttctccgtgtgctcgtcatgttcatggttgccttcacaacctcaagatatgcaccgccatgtttagacttccaaagcatctggtacactctagcttttgcattctgatgaaaacaatctacagcctttggcagcatgatctgttccatttgttgtaaggcaatgtttgtgtgcaagcaatgttgctcattagcattaatcacctctaccacagaactctcgactgttgggaataggtctcctgaagagccatgcggcatatagataatgttaactttcaggtgcggaacttctttgatagaaggtttgccctcgacgatcgttccgcattctccaaacccacgcagtgaaacttcgcacttcaaactcacttcaataattggttctagagaaacgttttgtaatcctatcttgtccgtgtttccactgccacgtaccttcgcaccatgatgcttgcaacacagtgggtttgggcgaaaccattcaatagctatactatgaatgttgtaccaatggtttgaatgagcctgtggcacccaggagaagtcttgtgtaggtagcagagtaagttgctttctaacattttcagttgtagacttgaaatgaggggtaaacaactgcaagcccttaattatagtgccaactatgtttgtactctccgaaagttgtagcagcatacccaaaataaagttaccctcagatgcagtgccatcactgtaaacaaataacaacatagcttgtactcccctctccgctatgttattgggttgtatccaaaacaaaagctgcctgtttccctgcactatgtactctagagtttcacctgcaagaagatgcccaataagagggtcgaagaacaagtaatgacgtggtgtgcctccatactccacagatctcagaaagtcattagctccatctgcaaaccactcaaatcttcgaacaactgatctactcggctcgtctatattgccatggaagatggatgatatcagtgacttggtggcatgcgcaattcgcctaggaaagaaggaattccttgctacttgttcggcctcttgttcttcctggacacgctgcctgcacatgcgtattgtgtcatcgcactcttcagtagcacgcttcagcttcttctgccaacgtagcaatgggccactagtgatctgccacttattggatgtctccaatgcgaagtccaacttgatttgtgccatctccagcctctccaggttatcctgtgcacttgattttcgctcacacctatcaataaacccggatacgatcttgttaaccgtctcgtgaacgatagcagaaccgaccacctcttccatcttcaataatctctccctgatctgcgccgagcaagatacatcaatagatcgatcaggatgcccaaataaaacaaaaaatagataagtgaattcctgaaaactaataatgcgttgaagtatgtgaaaacggtaaaccgaaaccttctgagaggtgcaccagagagtacccagcacacgataactagattgaatgaatgctgagcctgagcatgaatgccatgtctttagtggagaaaaatcgagtaaatcaaagttggttgtattggaagttagataaccttttttttagccgggttggccataagaagaggccaaccaaatcttattaagattatgagagcaccttgacattaggtaacccttgacatatggttcgagaagaacaccttaattactattacactatgtgattctcctaattggaactattatactatgtgattctcctaattggaagcattaggagaatctgatgtcttttaatgcgttttttttgggttcttcttagccatggtaaggcgtggtgctatgtttggtgatcattttgccagtctgtctggtgtctgaacttgtaagcagagatgcgtttgacaggggtttgttagggggtagcaacctgaacttttgttgtgaaccttgtaatcgtatcgttttcattaatgaaagcgggaggggcttgacctctctttatcaaaaaacaaaaaacaaaaactatgtgattctccagttttttttaatgaaaacgcaacgattacagaagttccagagaagttcagcacgaagacagagggaacaaaagaaaaaaaaaacagaggacgattctccagttgatttatgctctctttcactgaccaaacgcaaattttgttattaagataagattgaaggcaaccaaaccaacaaggatggatgcttctgaatgctgattgaatcctcgtcactgcaacattttttttgtttggaaaaatcatcatcatcatcatcatcatcaatgcaatcactttcggcggctactcctcttgagtcttgaccggttgaatagatctcgcacaacaaacatgatatgcagggagaccgagccttaccttgagctggtgcgccacggccgccgaggggaaaccgaggcctcctccatcaccgggacgcgctcgcatatagtggcgccccgtggagacagtagtggcagtggatcgcgcaaggcaacgccattgccggacctcacctccttgcgccgccggcgcggcctgccatctcgcggatcgtccggcggcgggactccgcttcagtgacttagctaaggcaagtcacagcgtgacataccatgtatctcggccgtccaaaacgaatccaatggagatggcgcttggtcccgcacgcaggcaaaaaaaatctccgtttcggcctaacaggaagcccgcacgcgcacaggacgcgcttaacctcgccctcgtccgcgtacaccggcgcagcctgagacggactcaacttcgcctcgccctcaggtccgcgtacgccggcgcttcacctcgccctcgtccggccaccgccacgagtcagctgggaggcgcgtcgctgcgaccggagaggcaccaggccgccctgccctgccgccgcgaccgggggcgcgtggaggcggccggccgccgggcctgacggcgcggtggtgcaggcgggcagccgcgcagcccgagcccggcgcgtggaggaggccgcgctgctcctgccgcgccg

SEQ ID NO: 8849 - DNA, 69567 bp, Oryza sativa
ctgaacctgaattttctgagcaatcttcagacagtaaagaggtgatctttagacagatcactctagaggctgataacctcctctggttagctgagatcttagctgacagaaatgcagctgatgagctgacatcaatttgggcaagccagggagagctggccaagctgcattgcaggataccagtgatgcaccggcatctcatcagctgtgtcactgcaaggctcttcgtcgcggtagggaaaggcgaggcgttaccgtctaaggagacgaggcagctcctccttgatgtgtggctccagcctctgatggatgattacaactggttgcagcatggctgcaggtggtttgatcggaaggtcatcgaggaagggatagggcagaccatcctgacgctgccattggaggatcagcagagcattctgctcacctggcttggaagatttctcaaggttggagatagctgcccaaatcttcagagagcattcgaggtgtggtggaggagaacctttgtcaggccttacactgatcagcaagcgagttcttcgtcgcaatcgcgatggagctgatgaaaaatggagggtgatgttgcttacacgttgcataatatgtgtaagaacttggtggtattgttagttaggagaacatcagtaagggaagaagaaaaattgtgtaggattaggaatagtgcaggtgctcttttaactgaactgagggtgtgtgtgctgaattgctgattgttcttgtgttgtaatgccttgaaatgtgacagctctctgatttctttgttacaggaataaatcctgtatgatttactaattgtgagcaatactactatctttcatgtgttgtaatgccttgaaatgtgatagctctctgatttcttgttacaggaatcaatcctgctgtatgatctactaattgtgagcaatactactactatcttggatgtgaattattatgtcttaagttgcttgatgttcttgttgagtacaaccagtttgtctgctacgcattttggccatgaatagcaaaatcaggcaaaataaacttgtgcactcactactctgtcagcctgaaaactgaactattgcaatgtctcagagaataggctagctactgtccaatttttctcccatccatttgcaatcacatctgtgtctacactgtatatatgcaaagcatgcatgtacagttattgcctgaatacattttgactgtggccattggcactctgcttttgcatcggcttctctgaatctcctgtgcaatttgatcaggttgccagatacgcgtgccattcaagcttatgcatgcgagcattcacttcactgaatcctgaaggttggtgagccaaaaatgaatgaatgaatgcttgatcttcagcattaaccacccggagatccctctgttccctctttactactgtcactctgacattgtgttaaaatggtcatcagtgcaagtctgacaggtctccttgttcgtcatcagtgactgcatccatccacgtcagccaccaaatgtacaatcagcaagtgccaagagggcaatgtcacctttgaactgtagtactcctatatgcttgcatgctagaattgtgtttgcagaaacatgttatcctttcagctgcattagcatgcatgttcagaacagtgtaaagatagtgctacttgtttagttgtaatccaaatttatttgcacttaataaaggccagcttctgccggagacccattgggctgtgcacctgggaacgcccggggtgcgagggtggagcccccgcggtacggatcgtaataccttttagggttccatctcatatatatacctcttgtaagccgccgtgcggcgttgtaacctcacccgatatagtgaagatattttgctggctgatgtccgtagtttttttctcctgttttggaagggtttccacgttaaatctcgtgccttatgtaattgatctattgttttttatcgtttgtttgcctatcactccctaacactactatgtgaccatgatgttatttcagataataaaatttatcccgacctttacttcaaaagaactatatccaattattacataagttgcaggtcgaatgagtgtgaatcacaaaaattaactacttggttaacaacaaaaaagagctacttagaacactagcctaaagataagagataacacaaacttctgtctatggttgatgagaatatacataaccgttgttccactcggtggactttatgttataaatagctgtatttccttagaaattgttgctttcagatacaagaactttgtggtagtaattattcagcaaaaggagagtagcaaattaggtgatgcactggtgcatacctgcagcaacacgcctcactcttttggcaattatctcaccgaccatgctgtaactctgtaacttgcaacaaaactgacgacaaaattcacatccgtgagccaccgacctcacctgtgccggccgcagattaagaagcaataaaaccgggattagtcatgtcataaaacactcacacaccactatctattggccgttgctatgcaatccattgttaaaattcagaattagcttccgctatccattaatacatttttttgaaaaagaagagcttctaataatttcacattatgctttcttccactatctattaatacatactccattcgtccctaaatataagggattttatataacatccaatcaaaatcccttatatttagggacggatgaagtattttatataaaaaagaagagctcctaatagtttcacattatgctttaacaaatcaactttctcatgcttaactgatgcacattcggtgagtgacatcgttaggcattattgattataagccgtcaagcttattagcgataaaaaataatttataggcaaacatttatatatgtgttcttagcgacttaacgatcaataccggaaaaaaactacgataaaacatcaaaattagctctaaaaataagatttaaaattcaaattttgtatacagctaataagccgaagagcaaattaaggtcatgtgctgctgtcctgacattcgaagtttttaaatctaaccatgcaaccctcgcccgctaatattgaagcatgtctcatcttttggtgaaaagatgattgaaaaatttgggccttttttccctcacattgttccttctttttgccttttctacaaaattttcttttctgtctcccttgtgggtatatgtattgaaactcttcttttttcactttctccctttaagcctcttgatcccttttggcttttgttgcatgggccattcattttgattttttttttctcctcttggtgttggtttttttttcatgtgtctctgtgagacagtgtgtgcacaagaaaaaagtttgggcgcacgtatcattggccttttctgcttttacgtgcatgcatgcacactgtagggtgcagcacgattctcggtgagacctatgctaatgctaatagtactaattaagattcacttaggcttcctaattgtagggttaattatagtggttatttcgaggcccttgaagcatgctgccaattgtacggattgagagccaaaagttcttgctaagcataagaccaatgtcatttggagtaattgttttgcttccactagtattggaagtatttccaattaatggaatattgttgtcatgactcatggtaactattgtggttactgtgtttaattatgtttttttacacaggttaaaatcgttaaaatggagtatttccctatttgtaatttcggcgtaaatttctgtgttccaaatggagtgctatactcctaataacaaaagtaacacgcatgggtacattttcaatagaattttagtggggatttgccgctggtttccaactctttgagcgagtattggggagacgcatttgtaggtgtgatatttgtagtgacgtgtgtatatgcgtcttcagtgtaattgaaacaaataaaataaacaatctcatccacaacaactgccactgcaactgcaatgtggagaaaagctatcagccaaagccatccccttttcatgtgttctatagaaaatacttaagaagggttgtcatttgggatggtaattacgttactattagctagcaacttggttgtatggcattagagtggactttgatagaagacattggattcgcccgtcatttgacttcgaagtaaactagaagaaaaacggtgcaaaaacctagaaggagaccttggggagactaaaaatttgcacacttgaacgcagttgcacttagataagatcaagcttatcaaacatagtgtgcagagaaccacagaggaatcttcttttgcttatagtaaacaaatattttcagtttttggagtttggacatagattggttaaatctgagctgatccatttaaagttgtattacttctttggctatattttcggatcagtaattattttcttttttggtccttcacctcaacatatttttctttaattaagagtcacctgaagaattaaggattgtttagcatctgaccgcaagtttatgaaacagaattaggtatagcccttcttcagtttaggtatcaaacctcagatctgaacaagatccatgtgtgatttgacgatgtaaatttataattctacagattccaagcctcatctgactgcaggcatatgtccggctgttttcctgtctgtcgatcttgttatcttcttgtggctggctggcaaataaatatttctttcgcatcatcttataatcattagaacagttaaaggacactggtgatgctaatggacataaaccggtaacatgaatgataactcgaattgttgttccattctgtcgatctgaattctaatatatactattatattatcaatattcccaccccctcctccagaaattgtatattatggtccttgggttatatatttgttgaaaaattagatatgctgagatttcgcaggacataaacacttgtatgaataatgtgaatctcatatgtttggttgtaaattgattgggattattactgaatctagtactactactatacaatcagacaagtggaattaaccttgctatattaaaaacttaatttaggttcaggtaagtccaggccaaccagccaaacatagccgaatttatttgtcctacttagcccatgcatgtttgaaagtgaaatgcaaattcagagccccacaaactcatccaaatgagacatgcagagacaacattccacaacaaggattattcttgtgacaagcaagaaggtcccttagggcagaggacaagtacttagttgtattggggctttcttttgagaagagaagaggagagaaagcttagtgagtgaggtgagcactagtggtttctagtccaaaacaagaggaagcacccaacagggcaaggcttgttttccttggggcacagctacattgccccctttatccccactttcatcacttttgaggctaccccctgcaccttttcttccattcttttagtttcatgcacctgaagaaggtttaaacattctttggacaaaacatggttttgtctttaatgactgattttctcttaagtagtgttggcctactactattttcatattctggtgtctttatttaacagttctagatggactccttcaccaatatggcaaaaaagaaatattttgaataaataaatgaataaaatgtaaaaaaataaatttggattcatagttttaaattcatatattaaatccaccaaagttcagaagacattttgggcttgtttggtttagtaccctaccaatatgttggtagtgccaaactctaggcaagttttggcactaccaatatattggtagggtagaattgtaaataagtgcttttggatttatgggcatgtttggattgctatcataccaatttgtttgtagtgccaaattttaggcaagttttgtcactaccaacattttggtagagatttctattgatttggcaagttttggcatcaatccaaacatcacacaagtactatttagactaccaaaaatttggtagggcaagatttggcactaaaccaaaacagccttatgtaaattaagagccaaattttaaattgtagtgaagaatattcaagaattgtgccaaattgagtataggcattaccaaatatttggcttcaaaccaaatcatcacatttactatttaaactaccaaaaaattggtatggcaacattttggtatcaaaccaaaacgccccttttttggcacttgttttgctcttgatgtaaacatacagtactacattgaaattatgaacatttttttaacaaaaaagagagaatagtgcaaaaatcttgaagctatatgaggtggttaggttacttaaatgccacagtcaaagacctagaactcatactccagccctgcattcatatcctactcttgttctcttgtccatcaatgtcacaaagatttcaatgtgaaagggaaatgaaataatactggaattatgaatgaaattctacttctgtttgtcacatccgcaaacctaccagtgaaaatgtgtacaacaagtaccagaattaatcataggcaagagtttaatatgctatactttatcaatgttcttgcctttattttccatagcttcatgtcaccatgtgaccatttagtcctgctcactattttgaagttgaaatcttgattagtttggtaggaaaagagagatgatccgcgtccctaattctatcgtttgcgttgtcatttgtcagaaagcattggctccattagggaagaggagacaacaatcttccactaacctaattgttatatcagtgctccactgtacctgaaactattgttatgtccaggtcaggagcagtgattaaaaataacagcacacaaataaccaagcacaagtttaaaaagtgcaaccttttcccctagttttccatagctgtgtaacaaaaactactagtattaagagcttgcattgcatggcaggagtaaaattttctgaccaaggcaaaaaggtgcagtagttaatatggtatcatctactactattactgtaccatctactactcacaacaaggaagcaaaggcaaaagcttatgtttttttaattaggtgtcatggtcaatgcctttttgcaggctaacacactacactataacaagccagttgtggatgctgttttggggggtttctgtaactgaagatgcagttaaagaggccttttttccctttgcaaaatgtctacctagcctaacactttgacctggagaggaggagttggtggtggtagatagatggcacattggcagtgatggctgtgtacagttgcaaggcttcttggattttagtgtggcttctctgctctctgaatccaccattctgctcgcctgcatcattgggagctctctctccttcccttcttttctctcttaaactctcctcaaagttttgagcaagctgggaataattgtgtaagttattcttgtgttcttcctgaatgcttctctccacctggtttctgggcttttcttgatcagttgtttcttactgccatggtttggttttccatgttggtttcagttcttgattggttccagaaggtgttcttttgaagaacagagatggagatactggagaagaaagggcgtaaatccttgcccaaagcaatgaagccctccaataccacagcaaagcacaatcgttcaaagaggttggacatatgaacttgcttctgaaagtttctcgcttttttgttgttgttatcttaccaacaataaatgttaatcaagaaatttttatggttcttgtaatgtcagtgatttggaggataagaatgctaaagatgcgttgtgttcttcactgaaagcatgcaatcaacctaagctggtaggttcttgtgtttattgcaagattccttctgttacttgttgctgtaaatttgagccatttctgaggttttctattatttttccccagcctggtagaaactcaaaccctcatctgaagagtgaaaccaagaagggaattcagccatccaggagtgaggcacaaaactccttgagaaaagaggcaaggacaagaaaaaaatttactgttcttcattgaacctatccattattattggttgttgtactcacatcaagaacagttcactccaggacttccaatgttgacctgcctgtacttatctctctgaaaaaaccaaatcctaagtcaagtctttgcaaggacatttggttaatctccatcttaatttttttactgaatttttttctgatgcagattctgcagctggagagtcacctcaaggatcagcaggtggtgcgcggcgcactggagaaagcactgggccctgatcctgatcatcctgctcctgtcaatctctcgctcgagagcccaatgctaaaggtgaaatcatttcctgtgtttactatcttccattctcttttagcttgatccatccagccatgaacagcatgttcatcggatcatggtgatgtttcaggttcaacctgcgaacgagctgattagggaggtcgcgacattggagctagagatcaagcacctggagcagtatctcctgacactgtacaggaaagcatttgatcagcagcagcagcaagcagcgacagtggcgtgttcagatgcggcgaggctgtcggtgagctcgcggtgctcgcagcttctggaggagacgcccaaggcgaaggcggcggcggcggcggctccaggcaggagaggcggcgacgcgatccattacagctgcccgccggcgccggtgagcaagaggtggaataatggcggcggcgcggcggacgactgctcgccgtcgacgtgcccgaggaagacgacggattcgtccgaccagtacagtggcctccgcagccagtccgcgctctcgttccggggagtgtgttcgtccaggatctcgccgtccgaggacagcctcgcgagggctcttcgctcctgccactctcagcctttctcattcttggaggtgattcctttttctctcttcttaggatgcaatgaaaatttctcagattgctcttgttagattactgcatttctttcagaaatcaactttacagagtgttcagaagttttttttttttacacaagaaaatatcagcaggaacttcactgactgttcagtctgtaagaatttctttgataattcatgaaatttgctcagattgcacttgtttgattgctgcatttctttcagcaactaattttacagcttattgttcagaagtactaagattaacaaaagtattagcagaaacttcactgaaactgaatgtgtaaaactagcattcagtattagcactgaattttgttacattgtaagatcctgaattctgatattaactgacagtgcttgtgttcatgagcaggaaggatgccgtgaaatttgcttagattgcacttgttagattattactgcatttctttcagaaattaacttcactgattgtttagtctgcaaacattttttttaaagaaattctgcaagaaattatcttgataattctaggatgccatgggattcagattgcacttgttagattactgcatttctttcagaaactaattttacagtctagtgttcagaagtactaagattaacaaaagtattagcagaaacttcactgaaactgaatatgtaagactagtgttcagtattagcactgtaacattttaagaatctgaattctgctattaactgacagtgtttgtgttcataagcaggaaggagaagcagcaccatcaggagtggtaagcttagctgactatctggggacaaatgtagctgatcatatccctgaaactccaaacaacctctctgaggagatggtcaggtgcatggcaggggtgtactgcaagcttgctgatcctcctctggtgcaccaccgcgcatcgtcgtctccggcatcatcattctcctcaaccagtgtggtttccccacagtatcttggggacatgtggagccccaattgcaggaaagaagcaactctcgactcccggttgatcaacccgtttcgcgtcgaggggcagaaagagttcagtggaccgtacaacaccatggttgaagttccatcgatttcccgtgatcgtcgaagattaagagaagtagaagatttgctccaaacttacaagtgagtggttcttgaaaatggttcacgttgcttttttactctcaatcctcaagtgggttcagtactctgaactgtgatatctgtagtactatacacttataattagcattggttcttcaggttaattttgtatcggttggagaccattgatctgagaagaatgacaaatgatgaaaagattgctttctggatcaacatacacaacgcattgttgatgcatgtaatgttccttctcatttcaaattatgcacagtgaattgtaactgctactgttctgcctactcattctctgaagtctgaatataatgacaattggcactaacttccacaggcatatctcaagtatggcatcccacagaaccatctgaagaagacatcacttcttgtcaaggtaaagtgggacctcactcctggcagaatcgtcaaaatgacctcgagaacaagtaaaagttttttttccttcttgatcttgttctgagactgtctcgaaatgcttccttcaggctgaatgcaagattgccgggagaaccatcaatgcagcagtcatccaggggttggttcttggatgtagcactcactgtccaggacaggtatgtgtgtgtggacatcatttggtcaagaacctagtgaagaacagaatgttcctacatagtacttgatgagatgtttaaacacaaatttttaacctgaatttttgttgatccttttaatgcaagcagtggctgaggactttgcttcacccaaggatcaaaagcaaagcgagcaaagcaggaggggaatggcaagcctttgccatccatcaatcggagcctcttttgcgctttgcgctttgttcaggaagccattccgatcccgcggtaaaaaaaaagaacacaccatcccatctcttaattttttcacctgacagaaacagtaaccaagctaggcatgccatttcctgaacactctaaatctgaacttctgaacttctgaacatgaacataatcctagtagagtacagtacgcatgtttctcaaagtgttaaagctatccatgcaaagcaaatcctgacatgacacaatcatgaaagaaacttgacaagtagtatatctcctctcttttctttctcatttcttcacctcgatatgagctacctaccttaattacctagcagctgctgctgctggaaacttgtaccatggaatgtttcagcagcagcagcactgcatccactgcactttgttcatcatcatttctgcatcgaagtaagcatactccactacagtagtagaagaggaattcatgattggtgatgtgtgttcatggcgatggcaggtgagggtgctgagcccgaagcggctgtcgcagcagctggaggcggcgagggaggagtacatccgggcgacggtcggggtgaggaaggagcagcgggtgacgctgccgaagctggtggagtcgtacgccagggacgcgaggctgtcgccggagaggctcgtcgacgccgtgcagaggtgcctgccggagagcctgagggcggcggtgcagcggtgccgccagagcaggccggcgagcaaggtcgtcgagtgggccccctaccgccacagcttccgctacctgctcgccagggacctcgccttcccccacctcacctagctcaccgatcttggcgtccgccatgaatggcttggcttgagctgtgtcaagctgagtctgagtgagtgagattagaagaagatgattagttcatgtgttgatagatttggttctaggatgttacacctaattatctaggattgtgtttgtgtgtgtggggggggggggggagagagattaattgagctgtgcagagtgtgatctgtgcgcttgtaaagataaaattcttttttatttttgtagatacagagaggaaaaaaaatagaggaaagttgagaccaagtgtcagttcagttcagttcagttcaaatctttaatctgaaactgaaagagaaacataagtatcgtttagttcagttccagttccagacacagttcagaaattcagatttgaatatgcaaatcaaagtcgccccctttcgtttcaaattccttctacgatctgtgcgggtttcgtggtcaccgccacatccaataacatgacatgcagatcctctgcagaattgctgaaacagtaagcaatggataatatgagggtccggatccacacaataggttgagttctttgggttgtgtttcaagtggccaactcaccttcgtttttctcgtgcacgttttccaaactagcatatacttaattaatcatgcaccaaacaaagaatcatattaatacatttttttaaaaaaaatagcatatacttaattaatcaatcatgtactaataagtcactctattttatgtgtgagagtaattagcttccaacgataagcaaagaacacagcctttagtgtctactactacatcagcagtactgcagacaattgaacacaaaatatgtcgtgcgcgctcctgctgatggtggcgacggtggataggaccttttcgtgactaaaatgaaaaatacagggactgaagcttagggtgatctaaaactctaaactttccatcacatcacatcacataaaaacttttctactcacataaactttcaactttttttccaaactaccaactttccccaaacttcggaactaaacacagccttaaaaatccaagagagggatgataatgaaaatgttctgttccgatggaccagatcgcaaagcagcccatcacgagagtatcagatcgaacggccagcatcgactcggggcccacctgcaggcggatgtgtcatgcaaagcttcggattcggatacgcccacggcctcctcaccaccacagccacgaggaggagaagacgacgcgccgccgccacagctcgcgtcgcgtctgcgctctcctagcgccgtgcgggggtttagctagggttttccgcttgcggcggcggcggccatggaaggggaggagattggcctcgtcctcgcccgcgcctccgacctccgctccaggatctccgcctgcgtcgccgcggccggagccagggagccgccggagggcgagggcgagggcggggaggcggtgaagcggctgtgcgatggggaggagggggaggaggaggaggaggtggagagcctggtcggtatcagcaacgcgctcgagtcgctcgagcggcagctcgcctctctgcaggtcattctcatctcatatctattcttggtgtttcgttccatgtgtaaatatgctaatcctcattttctagtagagattgaggcttgcattgaagattgtgggttagtaattttgtactgcattattacttttcattatataatatactccgaatgatgcaaatctataataatcgcatagtagaaggtttatgagaggggaaaagatagataggtatcaatgccatacttgcaaataagggcattttgaagtttgaaatgattaaaaacaaatgatattatcataggaacagggtatgactggagtgactgtgcaaggtgtgcagagcgaacgaagttgctgtccattagttaagctcatataccaaacctgccatttcttagctaggaatttctctgctttcgggggagaagggtgcttctggtaagaggtgtgatgagttgttgggatgcagattttcacttttagttataaccaaatggccaaatttaactgtaaaacttgtgaatcctgtttacttgctttgctgcactaggttggtatttaactatttaagatgcatcccttactattgcttgtgttagtgaatttcctaagaactaggattggcttccattgcattatccccatgagtttgtttagttctgttatttatttccatctgagtttaagtttaaataagtcttcttctatcacattgaattgttaggacttgaatgtgttctattacaatctagattgccatttttcattgctaaatattttgctttctacttcctctgtttcacaatgtaagtcattctagcatttcccatattcatattgatgttaatgaatctagatagatatatatgtctagattcattaacatcaatatgaatgtgggaaatgctagaatgacttatattgtgaaacggagggagtacatactaaatgcctgaacaacttgctgccactcccaggacctccaacaccaacaaagatatgaacgagagaccattttgagccagattgatcgcagccgaggatgtcttcttaacaagctcaaagaatacaaggggcaggactgtgaagtaatacatgaggctgcttcttttgctggtgaaaaaattgaacatgatgatggtctcatgctacctccgtactcaaatcatgtcaccaattcgtttgttcttgatgatctgtatcctccaagttacttggccaagttaaagtgtatgcacaacggattgggttctggtgggactaaccaagatgttacaaagacaaacaggctggagaacaggaatggtagcatgccaaacggcaattcacaaggaggaattagatcttttgttggatggcttgctaaaactgcagtaatggttgtaggtgctgtatctatcatgaaggctgctggttacgagccagtgataggaagacacagcataaaattggatatggcaggtttgttcagtaaggaggcaaccagtggaaaagatcaggctactgtccaatgccctcctggtaaagtaatggttctcgaagatggcagggctcactgtgttgtgaaggaaagagtcgagatacctttcgacaccaacctcgcctctccaaatgcaagttatgggttaggctgaaattgggcttttgtcaatattaggatttagctagtctttgaggccctttatatgatcttctgtagaatgtgccgagcacacttgtctaaagattgaagcctatgtattatatctatctatgatcgtccatgtcttgctaattgccctcgttggtgaactccatcagtatgctgctcagttgataccagtattatgtcatcagcagtttggtttcatgtgttgtgtatgttgtctcttgtattggtgatgcggtggagggatagatggcgattttactctctccgtctcaaaaattgaggaattttggttagagggtggcatattctatgagcatgttcagattctaggatgtgtgtcattcaaccaaatcttttatattttaggataggacgaagggagtatgttagtacctgtcattgtatgtctatgtcaggtcctgaaggcacggcatattgaggctcgaaaagggccaacctgtgccttcgaagctgtgcaacaagaatctgaatccagcacaaaatttctcaccaggaggaaacaaggtagtagtacatgtttctgacgatcctttcgaggaatctcatctcttcgctgtcatgtgtcgtagtagaatcgctgtgtgaagcacaggaaattaagctgtttgctgccaacggaatgaagctgcgtattacagtacttacatacaaactctggtgcgcatatgctagctgcagaacagcaatggcagttctttttttctgaacttggttaatttttatttccaaataacttattccatttccaagtgaaggaactaagctagatggatgaacgagtttccatcaagttacagcacagttgacaggatcgatcgagttatacattgttttgaacagcaggtaaaaactcgtgttgctttgcctataaccttaagcatgtggacttgcgaagcactagtaattaaaccgatgtccaatggattagtgagtagagagtatatgggcctggctaagtagcataggtagatttagaacatgggccggcgagcgcatctgatggatgatggatggggaattccatggatgctcgctagcgatctaggctgggactctatacgtgcatgcctaattgggagtaagctagtaataaatactatctccgtccgacaatataatgaatggttatatagagaaaatctcttatattctcggatagaggttgtagcggattaattttcatatgaaattaaaaaataatcataaatttagattgtatcactaaaaatctataaattcgaagcataaaaatttctctaatccatacatgaaaaatgccatttaagcactgtagtggccaaaaaaaatcagtagcaatcattaagcgctatagcgaccgctaagtttctatatatcatgtttaatctgtcgcctctataatattgttattgtgattgctatgaacactatttattgggagcaatgagaaaccgtgagaaataaaccacttgacataaaaattaaagcgggttgctgcatcgtctgttcgccgcaccctagctaagctaaaccattgatgccacgaccgatgtagccttcaattcaggcgcgggcagcatcgatcgtgtgatgtccaccgcaaacacgaaagaaattaagagatctatagcaatgttgggagtgatatataggcagcatgcacgccattgacctgctgatcgatcagatcccatatccgtgcaatgcaacaacttgcaaaagtggccgtggttcacactttcacacaccacaaggccggccggccgtccgtcggttcacatccccgtgtgcctttgcacgcgcctactcgtttcgttccataaaagtccaaatgtaaaactgaagaagatactataatataatacaaatatacaacaaatctaaacttcatcttaattttaagttggtttttcttttacggaaaaaagaaccagacgagacatgctcgctcagctgtaattacaggtcgcttttgcgtgacctcaccactgacgttaccgctgtatagtaccagcaacaggtagccgcgttaaagcaaggataataataaagccaactgcttactatctatcagctcactcatatagtggttaactcttcactataaatatatggtccacctgtctatctcacatattttcttggttcctgtgcctaagccggctgtaaacttacagcccgcttctcatctctcccctctcctctctcatccaattcagcattcagtcttcttatagccctctattatacttgacctcaccactgacgttaccgcttcaccagcaacaggtagccgcgttagagcaaggataataataaagccaactgcttacttatagcctatctatcaactcactcatatagtggttaactcttcactataaatatatggtccacctatctgtctcacatattttcttggttcctgtgcctaagccggctgtaaacttacagcccgtttctcatctctcccctcttctctctcatccaccttagcattcactcttcttatagctctttattatacttgctcttacacggtacaaatcgcgcgcctcctggctagtagctacgactccatagctgcagcctgcagccttgctgtaatagccagcagcagagcaactattctacacaaaatcgaagctcgttataagaaaaaacggttaataacgaatgaaaaacaatttactttctccatcctaaaatataaatatttttagcattgtgtcgagtcaaacatttttaactttaactattaatagcaaaatataaaaaaagatcaatcatgtaaaattgatgttactagatttatcattcaacaaactatcataatatgtaattctttttatttaaaatatcttatttttatagatgttgttggttaaagtaacgtctcgaagactgtatagaagtccaaaaatatattttaggatggaaggagtatgatacagtgtgtcttaacgagccgtaacgatttaaaaaccaacactacgagataaacttataattaaaaacatcaaaaatcaactcttcaaaacttaagttttagaaattaaatcttagttgcgagtgaataagctgaagaatctggcaaagctaccaatgcccatcaagctggacaccacacactgttcaactccaacacgaaaacgccggccttttcatctcctgctctgcttgcacaccgctgtactcagcacgcgaatgaaccgtgtggaggaaccaagacgccgaaaatgtcgatctccgtgtgtacttatatggattatttgtcaggcaaatgaaagtgatcgatcgtcagatcgcgatggtttttcacgtactttaattgctccctgaaaacgatcgggagattaattgatagctgcagcgcgctaattaaccctgctctgaaaacgaacgatttggactagactatatcctctgtgatcgatcgattatcccacccaattcagcatttacaatgctcttcttttggcacatttttcccctcaaaattaagacgatactactcttaataattaaaacatcacaaaaagagaaaaaagttggactcactttctaggtccttccttggatgactcgctggttcctccaattgatactaaaaatattacgtatacaattactaatttgaaacacttcctgtttcatcacaacttttgtctctacgtgtcccgtcaatctgtcatgatgcgctgccctcaatttttggagtattagctcaaacaagacgacgaaattgatcgttgtttagtcaattgtcttgtagcactacaggtttctttgtttgttcagcatacaaattattgggtttcaaaaaaaagcatacaaagtggagtattgctaggtatggaccagtattttgagaggttgagacaaacacgtggagaaatcaagcgccggagaatttctattcacattttttttttcatctccatactctttatgttcaaacatcaactcaaatctatcaccaacaaaattcctactactaattcttcgagaggtaattactagtaatttgcagtgctaatcaatttcctcatcgatcggcagcatctcagccgatgatatcctcgtccgtccgatcgggatccgacggccgagcagcgccgggcccaccagcagcatcagaggttttccactgttcgcgtccttgctggctgttcccatcggagtggttcgacatattttatcgaatccagctcgcatttggagatcgaattgggggatttgaatccccaaatttggtttcgatcgattcagttcaattgtgtcgtcgtctcgctcactcggtgatcatgtcgagttcgggaatggcggtgagatcggtagcgaactgcctccccttcccgccgccgcggcgcgccgccaccggccgccgcttccccgccgccgccgccgccgccgacgcattgctcttgcagtaatcagacgcgtcgtactcgtactcctcctccggcggagcgaacacgagcggcgccacggacccgcgccgccgccggccgccgccgcatccggatgtggtgctgctgctgctggcggcagcgagcgcggcggatgccttgacggcgagcgccgcgacctcctcgcggcgcatcccgcgcctccgcacctcgcccgggagcacgaagtagatctgcccggggcggagctccgcggcggcggcgacggccgcgacgggtccctcgaagcccatcttgtcggcgtcgcagaggaagaagcgccgccccacatcctcctcctccccctccgccgccgcgacatcctccagcacccgcgccgccgtcgcggggcgcgggtactcgcgcagctcgcccgtcggcagcagcaccatcgccgtcgacgccgccatccccgcctcggccatcgccgccgccacgccgctcgacaagcagagccccatgccgatgcgttggtagtacaagtagtgtgaggaggttgaggaagaaagaggagagagcaatggagattgatgggtgagatgagatggcgatggagaggtggaggtggaggggcgcggctttatatacacgggggaggaggaagacgagggggttttgtcgtgttgcttggagaaggggagcatgacagcctggcggtttgctggtggggccagcgcgcgcgaggaatcggggatttttttttcttttccttttttccttttttgttttttttaccgttttactgctactgctccggtgtgtaaatacgtggtggatacgaaggttgcgtgggcggcacgtagcgtagatggcggcgtggcagcaaagggtgccaaacatagagagctttaaattacactgaaaataagtaaattcattatacttaattttatatatgcgtcgagaataaccgaggtagattagttagcgaataataactgaggtggttaacttaggtgaataaaggtaaatatagcggcagtactaattatcctccaaattaagcagctgataattaagatagcgtgcagtaaaaagagtgatgcatttggcacaagacactaccaacttttatgctttgaagatggctatacgtatgaaacgtgtgtatgcaggagcggatccatgcctcggatcatccggcccatgcatggtccgagtcctaggattgaatgcacattatgcaatataaaattttaccatgttcattcaagtttatcctaaactgtaatgggttggccgagaccttgggtcaagctaggctggatccgttcccaaatctatgtccgactcaacaagtatatagatatggctgttgttttcgtaaactcatatgaagagaaattgaacgcatgaattggtggattagacgaggtcggatactaaatatataaggtatagttgtatgtgtagtaggactctttatgttcgaattatggccctgtttagatttcaacttttttttctttaaactttcaacttttccgtcacgtcgaattttcctacacaacaaactttcaacttttccgtcacattatttcaatttttttaaactttaaattttagcatgaaactaaacacagtctatatgtgttaaatagagtaatgggagataaagccgcgctagctagctagcttttgtaaaaacgaaggcgccagtatattgcggtggtgctatacatgctacgtactgctacttcctccgtttaatattataagactttttaggattgtcaatatttatatatatgttaataaatctagacatgtatgtgcctagattaattaacatctatatgaacgtagacaatgctagaaagttttataacctgaaacggagttagcagctagctactcagctactcgtccggctttacaaaagaaacgtggaaataccatggcacttgctttgctactccgtagctagttgactcgtaaaggatcagcagatctcaaatcgtatcacgatcgatttttattggggcaagcaaggttcgtcgatgtcgtcatagtacgtagcagtacgtactactacaagtatgtgtatgcacagttgcacactctataactataactagctagggatagtagttgataaaaaatggtgtcgacatatatacatactccctccatcctaaaatgtttaacgtcgttgactttttttaaaaatatttgaccgttagccttattcaaaaaatttaagtaattattaattcttttcctatcgcttgatttattgttaaatatatttttatgcatacatatagttttacacatttcataaaagtttttgaataagatgaacggtcaaacatgttttaaaaagtcaacaacgtcaaacatttagggaaggagggagtatatatatatatatatatagtgggaaatggaaaaaaaagaaaaacagtgggcacaacaaattgcgcgatacaaaagtataaacacgaaagccgtacgtgtgtcaatagagcctaacgagctagtaccaaaattaatggggagagctaaggtagcagatagatagccaaattggaggccagtcaggacattcatcaatgtcgatcgatcatatcgtacatggttttgcagaaaatcgttggcgttgaagctagctataagctagctacgtactgtacgtacataccctagccaaaaggtgacctgaaagcaccataggtatacgtagttcgtgcttgcagctggtgtggtttgtttcctcgggagcagaagtcactagacgatgcagctagctagttgagaaaaccaggtcaatctatctctatcggttcatggttctttggttcaaccacggtcgaagcgatgaaccagacaaatcaataatattatattttactagtttttatgagttttaaaaggtgcaaatcaaatgtattttattttttagcagaagaaataaacctatatgaatatctttgagtgcacatgtactgccttgtcttttttaataaatgacaccattaactttttgacacatatttaacaattagctttattaaaaaaaatgtaaatttggtttattttattatgagtttttctagtatgatttatatcttatacatttgcacaacatttcatataatacatataataaaatatgtgtttaaaagttaattaataacattatctattgaaatacagagagagtatttaaatctggtccagttttttcaaccatatatggatccgagtggggacgagacaacgacggtgaagcaaattgtgtgcatgcatctaaatatgatatggcgcaccaatataatccatgcatgcaccaaagtgggtactcctatcaaacacgtcccaagggtgcatgccgcatgcacgagatctaactatgcgatggagccatggaggggacgacggccctgagacggacgcgtggcggtgtgcatgtggaccttgagatgcagggtcacgtggctgcccccgtggcccccgccctccacgctggcacctgatcgatatatcagtgtctctgtgctttcaatgcttttgtatatattggtcctgcgcccacaaaaattcggtgcattcgaatattgtggttacataacatggatatgtgcgatgcattcagctaggtctctgctgctgcatatgcatatgcatatgcttctttcttttcttcgaggtgcgctgcattcggcgtgctatagctggcacgtacttacgttagttcggtcactgtggcctaccactactcctgctgtgccacgtatcagcatgcaattgcactagctcatctgaaaacaatgttatgttcaattgagctattcatttaatcatgggaaaagaatacttagaatctgtttaggatagataagattctaaaaacaactgattgatatatatgccaacttttaagaatttggattctgacttcttgttttctttttattctaccactacagttaacctaataactactccagcatgtacgctaataccctgcgacactgcgtgtatagttaggtcgcagatcgatcgatcttcaaagttgaaacttcagtcaacaaaaaaaaaaggaaaaatcgccggtcacatggtgaggctccaaaaatgaagggcatccatacaaatgtacaatgctatgctagctatagctaccttatccatgttagtcctacatactaacatccatgtgaccgtgcctttgttattttacattgcaatcggcaatagctcgcgtgtctctgctcgcgtcgcacgaagccgatatgttttatataatctgtctatcactaatccaactactaccacccaacgactttatcgatcccatcaaacagtgtcccaattagtagcagtaataacatactcaatataatgttcaattgtggatgacgagacctgatgtacagtacaattcatcatcatcgatccggaatatattaaaaattctaaaaagggagttcgagagctccggattggaggaatgaaaaacatgtgccaataattgtaaccctgctgacccactgtagcacgcagtacgcgcgctggaggaccactgttgatctgtcggcccctgcctgcaaggccaagagaggccaccaataattccaccaccatacaatgatacaaatgcatgtactattatattgtgtatatatacgcgtgtccaggtgaatgaacacaataatattctgaaaacgaattaaatatcccctccagacacgcgcacattttaaaatttaattttcaaaacattaggctaacaattattataatataaattaatttttgtttgttgaaataatatcatcggattaatatttaaatttacttttgtatggttataatattattaaaaaaccttatatagtatacagttaaatattagttttagagattgtattaaatttaatcatatcttatattatactatttcttttttaaatgtacgatgttattatttttaataatatctaaccattcgtcttattaaaatctaatataaatactccctccgttttaaaatgtttgacatcgttgactttttaacacttgtttgaccattcatcttattaaatttttttttgaaatatgtaaacctatatgtgtacatgaaagtatgtttaacaataaatcaaatgatatgaaaagaataaataattacttaaattttttgaataagacgaatggtcaaacatatattaaaaagtcaacggtgtcaaacattttgaaacggagggagtatataaaaagtataagttaagattatattttgtttgaggataaaacaagttacaataaaataaatgatatttataaaattttttagtaagataaatagttaaaacatatattttggaatggagtaagtattatataggagtacgatccaaaaaatacacgcagaaaagcagatcgatcgatcgatcaataatttcattcgcaggtaaagcggcgtgacacgtcgacgagcagcctgcaaagcaggcgacgtccgtggcggcgtgcatgcagctacgccaattaacgccaccacccaatgcgcgccaattccagattccccgagtggggcccacatgcagtagggggggtctagctagggggacgcggggggcgtctcgaccatgttcggccacgtcgtcgctgggtcacatggaccggacgcgaacgcatgggtccgatccggtcacgtctcgtcccgggagtgtgggactcgggcctgggtccgacccagggtggcagtgcatcgtgccaacaacaataattgtgggttggatggatggatatgtccaaaggacatgcgtgcatgcaaacgttaggcaaaaaaagaaaaaaaatagaaacaaaagaaagaaatatatatgtgatcgagcgtgtaattggactgtcatgtcgaattggtacgggtacaacaattcgtataccttttgtatacgtacataacaaaaaataaacgattttgctaacgatcactcgcgtgattttttttctgacatttcaccttttttttcaggctcgtcagccggcgcgtcggacaccagcacgtcggccaccgtgtcggagaagcacgatgacacggtggcctttgaccgccagccgccggtagcacggccaacactgatcggtgagagacatcgtttctctcagaaatataaaattacagtcctatataactaaatttatatttgtaaattcagttaatttgacgtgtaagtgcactgtaattttgataaaaataatatgtaagtaaatatgtatttattattttctttaaaatataaaattacagtcctatataactaaaattacatttataaatttagctgagttgacatgtaagtgcactgtaattttgataaaaataatgcgtaagtaaatatgtatttattattttatttaaaatataaaattacagtcttatataactaaaaattacatatgtaaatttagttgatatgacatgtaagtgcactgtaattttgataaaaatattgtgtaagtaaatttgcattagttattttatttcaaatataaaattacattactatataactaaaattacatatgtaaatttagttgatataacatgtaagtgcactgtaattttgataaaaatattgtgtaagtaaatttgtattaattattttattttgtagtccgttggatgtaaatccaaggaaagaaaaaaatctgggcacccgagtgatgcataggcggtcccaaaaataaatcgtaatgtggatgattaactgtagcaacaaccgaccaatatatatcaatcagtcaccctaatcatgtattgcctcatgcattttggctacgcgtggctggctgtctgaccattcaaagatactgtgactgtgtgcaagcgtgcgcatgtacatacgtgcagcttccgtgaacgtacatacagtagtacgtatatatacgcgtatcaatgtatgccattttgtatttactagtatggagtagcattctagcaagatccagtcgatttggttcagggaaatctccgacaatatatcgatttggtcctagctcgttcaacagctgctaataataataataataataataataataataataataataataataataataataataataataataataataataataataataataataataataataataataatttttaattgttttaattttgatttgcggggagatgctcatgttatgacttagatgatcattcgtgtttatattgtttggaatatttgtggctagctagctgttggatctcccgggaataactttttttttaaaaaaaaatgttcgggagcagtaagtgagagaatcaacactagttagtaggagtgtgtgtgtatatatatatatattactctctccgtcttataatataagggattttgattttttgtttggaacgtttggccactcgtcttattctattttttttgaaatgattatttattttatttgtgacttactttattatctacagtactttaagcacaacttttcgttttttatatttgtaaaaaaaaattgaataagacgagtggtcaaacgttgcaattaaaaactcaaaatctcttatattttaggacggagggagtaatatgattaatctagagctagccagctacccgatcgaatccaacattatgttgtcctaccacctgtacgtactccctccgtccaaaaaaaaggcaaactctgggtttctgtgtttaactttgaccgtccgtcttatataaattttttttataattcgtattttcattgttgttagatgataaaatatgatcaatattttatgcttgacttgtctttttaatttttttcataatttttttaaataagacggacggtcaaacgttggacacggaaactagggttttcctttttttggatggagggagtacgttctgtacatgcgtgcatggataattaagcaagaacaaacaaggaaccttaagaattaatcagcctagatttattttaggaataggttagttaacacatgatggttgtttaatccttgtgcatgatatgggtatcccagtcgatcactaatggtttagattagttgcatgcttcctgttgttagtggcatcatctggtagctaccagttgttagcaatggttggttcatcatcatatcagatcgacagagtgagcagcaaagtcgatctagctggtagtagtgctaatcatctagcaaagcaaaagatagcatacatacgtgatctaaatctgtcaccagaagatagtagtactactctagtatcaaacagagcaggatctaaaacaaaaatcatactgtatgcattattatgctgattaatttggcctggttatttggatgcatcgaagagtccacgagagcgggagacgggcctggcccattgggccccaaagtggtcgggcccataggagggtcgtggcgtggcgtgcccaggtgtagcgcaacttgcagttcggcaggtagctgcatcgggccgcgggcgccaccacaaccagcctggaaagcgcatacacacgcgagtacgcaaaacgctgtactactatgcagctacagtgcaaatgcaaccagaaacagacgggttctttttttaaaaaaaaaaagaaaaaaaaagcagaaacagacggagatgctcatctactctacggagtatagtgtactcctacttgccactagtgtggtacgtagttttatactttattgttgaggggaataccacgtgtggtatttgcaatatgctgccaaacgacaacggaagtctgtggactgtgtggcatgtatgctgaccttttgttttgcttcactacactcgcaacaaaaaaatgtcatatttgtttggctggaccgccgtataaaagtaaacgagacagcaaaaaaggattttatatttctactctataagcgtcatgaaagtaaaggccgaaaagaaagataaaatatctactggttaacgaggatcattcttttgcggtgaatgcttaattaagtatttaataactactggcaaaaataacttcttatatatcgcagaatcactcacatcagtgtcagtaatttgccctatgtttttagatcaagatttgagctccatatgttcctgtaaaatactaaaattacgcgaagatatcagcttcgctacactcggccttcgttcaaatttcagcccgttaggcttcgtatgatgcccattaggcccacaagatcgtatgcgaagccatggcccaaaaggcccacttatattaatctcaaagtattctaaaaaaaaaaggaatagtattcgacgaatccccagcgacatgagcaaccattgcgtcggcggcggcgccgccggagtcgatgacttgacggacgacctcatcgccgagatcctcctccgcctccggccgtccgagccggcgtgcctcgtccgcgcctcggccgtctgcaagccctggcgccgtctcctcaccgaccaggccttcctccgccgctaccgcgatttccacggcgcgcctcccctgctggggttcctccacaacgtcgccggcggcggcgaagaccggtacgtccccttcaccgcctccccggtctccccgccggacatcgcgtgcccttgctgggtcgccctcgactgccgccacggccgcgccctcctcgacgagttccccttcagcgccgacttcaccgtgtggcaccccatggcgggacgacggcgccggctcccccggccggacctcccctacttcatgtcctacgccgccgcggtgctctgctccgccgtcggatgtaaccacctcgactgccgcggcggcggccccttcctcgtcgtcgtcgtgggcatcgacgagccggagcagcagaactcgcggccgtgggcgaccgtctactcgtcggattccgattcgtggagcccaacgacctccgattacctcaacctaaccctaacccccaattgcgacgtcgacaggaagcccgccgccctcgtcggagatgcgctccacttcgcccttgcggaaggttctggaatcatcaagtacaacatgggagagtgctcgctttctcggatccatccacctgttgtgtacaagggaggcattgtggtgatggcaatggggggcaatctgctcgggctcggcggcatcgagggttccatcctctcaatgtggtctagtgatgtgagcctggatggtggtgtcagatgggagaagaacagggttatcaagttagagagcttgctaccaagtatcgattgcgtagaggcagtagcatgtgagcttgcacaaccagcaccgattggctttgtggatggtgctgatatcgttttcgttagaacagatgctggcatcttcatgattgagctcaaatcaatgtgtgttaggaaggtttgcgagagaggatacttcaaagccgtcttcccctatacgagcttctgcactccaggtacttgactctatcttgatgtaaaatttcgacttctacatgtttcttaggcacgattcaggaatagtttgtttgtttgctttcaaattggccgagtaataaaggaatatatttcaccagaattggcttggcctaaaaatgtgttcatcctaagtggcagaccaatcccatcacatcgatgaggcgcagctcattgtaccaatttccatttgaatgaataatctgttgagcaagcttttattgcagtgaatatgtgaataacaaactaatgagtgacatgggtgatgcacacttgaatggtttgatttgctacgttcattctgcactagtttttctacaagttggtcacaatgatgtgatcagcctattttaaggtgtgaaggatcgccatattgaattgtgacatttccctaacatatattgatgatttcggttgacagcatttattttttgtcactttgaacttccttattatagtttgaacttttttttagatgtgtaacctaagttcgcacctttatcactcaaatctgggctctgccactgcttgcaggcgtccatctccagcaaaacagagttcagttcagtaggaagcggttgctggaactaagagaaggcgatgtggcaacaggtatgcaatccaacggcaagagccacaaggggcgacagccgtgacggccaaagaccacctacaaggatggtgctggcaatgggcagcgagctctgcagcattttgttgtctgcgtcagagtaaaaatggcagggaaatgtttggacatgggagagagccgattgcttcttcccatgtgagtgaaaaatttcatttcaaatatgcacggtttgcttgcatttcaactaaaatgtgaggtacttcctccgtttcacaatgtaagactttctagcattactcacattcatttagatgttaatgaatttagatgttaacaattagcccaaaagcctggtacaaggattgaaagctgaaactgaaaggtgtgtaactgtgtaacgataagcctagaagtaaacatgaaccatagctctgaaagtcatggcttggcacaaatggatggagggaagaaacacggttggtaaggctaaataactgcttccttagaataactgttggtaaggccaaccgtaaacaaaatactattgttttttttcctctctgtatctgagagaacttagaattctacatttgtagtatcataaaccatcttttcaatttttattcgaaattgtcccttctttattcctacaggccctgtgccttgatgaggggaacctcatcgttgttacgaggctgtgtttatatccagtggagaaaagttttggcgtgtcacattggatatacagacacacatttgaagtattaaacgtagactaataacaaaacgaattatagattccgcctgtaaactgcgagacgaatttattaagcctaattaatctatcattagaaaatgtttattgtagcatcactttgttaaatcattgggcaattagacttaaaaaattatctcgcaatatacacgtaatctgtgtaattagttttttttctatatttaatactccatgcatgtgtccaaacattgtgacatggtgaaaattttttgcgtgggaactaaacagggcctgaactccttaatggaatgacacaccatgcttttgtgtgtctgtgtctgaactccttaatggaatgacacaccacacagacacacagtacacacacaccaaaaataagaaatcgtctcttcatttagcagtgtaataaagcactcacagcaacaccaaaagaaatttctgaagaatcctctcaacctatcaaatttcttatgactactaaccaagcagcaaagaagggatgcatcagcttcagtcaacagttttgcacatcactagcttcaagtaatcaaccaagaggccaacagctagaggctcgatctgacgtattagcataatttggacccattttgtttgctaaattgatgctataattgttggagatggcaatttgtttctatcacgacctgaaaaagatgcagaaaagttataatcgttttacaaccaatattcacaaagtattttgagagagcattcctactactgacaaaaggtaccaaaaacaagcattgtcaacagacagaaaatgataacagaacaaaatatcttgcccattctagttgatcctcgacaagttaaagtacccagtgtcacatatacttttccccaagcacattatcatcaccgttttgttaatgttgctgaattagtattacttatgaaccaaccatatcccatcagttttagcaaacagccagaacgtcttacattcttcgacatcctgaagacattgtgctagttttgcaaattattacagcttgacagcaagattgacatgaaataaagtgaaaacaaccaacttgaactaaggccaagatcagcaaagatgggatgcatcaccttcagtccagagttttccatatcactagcttcaagtaaataaacaagacctcctaggataccaacaacaagacgcttaattgaacccaacagattagcaaaatttggacacattgtttgctactagtttactgctgcaattgctggcgatggcaatttgtcctatcacgacctgaaaagggtgcagacaagttataatcgttattgtcaacacacaaaaaaggtttatcagaataatatatctgcccattctagtggatccttaacaagttaaagttccaagtgtcacatatacttctctcaatccattatcgtcgcccattctagtattacttgtgaaccaaccaaatatccaaaaaaatgttttcatgtcactctctgaattctgaagcatactgaatctagtactgaatatcaatgaatctctcttttatcagtgttatcaattattttcagaactttttataactatctgattgatgctaattatgagccaaacaagtatattcaacattgttttcatgtcaccgtcagaaacatactgaacattcttttttcctttcggaaggtctgagacacacagaaaagatatccctgaatcacgattggtgaattgagcaagaggcatgctccattctgaaactttgaactgaacgatccccaaatcctaatgctagcaaattggtaaaggatgtacctggaacgaagaagctcatgtaggggaagatattgaagcatctgtccttctcccacagcttgctgatctgcagtgacttgagctccatcctgtagtcgccatgaatggtgtggaggaagatgatgtcggtgccctccgcgaagccaaccagggacagcgagtgtacaggatcaaagaaggggagaacagcgtagaggtcgatcacattgcgccgcacccaccctgcacccgccaccctcgcccagaggtggatggaggcctcgccgtcgaagagggcgagccccagctcgccgtcctccgccgtcatgaggagagcgtcgccgtccccgtacgccaccggcgggaggatcaccgagagttccagcttggtgaggtcgtagcgcaggatggctttgccgaagtaggtgaggaagtggaccgcgtctccggcgaggacgctgggcttgctttcgagttcgagggaatcgtcatggtggacggtggaagcggcggtccatgtcccggtctcggacgagtaagaggatgccgacgcgatctcctccccgtcgtcgtcctcgtcgttgccgacgaagaccaagacgaaggggcctccgtggcagtcgtggtggtcgcagccgggcacggcgcagagcacggcggcggtggcgaacgtgcagagggtgccgtagggctcgcgctgccgccgcacgtcgccggtcatggggtcccagatggtgagctcgacgttgctggactggaagagggcgcggccgtggcggcagtcgagtggccaacaattcttgtgctccagttcggcggggcggaacgcggtggtcgggacgaactgcgcgaagctggggacgcggcgggcgggttcgtcggagacgtggtggatgaagcccagcaacggaggtgctcgtcggcggtggaacgcgcggtggcggcggaggaagacggggtcggagaggagacggcgccagggcttgcagacggcggaggcgcgggcggagcacgagggatcgtccggcgggaggcggagcaggatctcctccacgacgtcatccgtcaactccggcggcgccatgccgccgcgcggcgaggtcaggcgttggattccagatgatttggggaagagaagggttgtatgtttcagcttagaccctataaaactcgatatttacgactacggctgtgtttagattcaaaaaatttttttgaccaaaaacgttacatcaaatgtttggacacatgcacgaagtattaaatgtggacaaaaaaaatcaattgcacagtttacatgtaaattgcgagacgaatcttttgagtctaattacgccatgatttgacaatgtgttgctacagtaaatatttgctaatgacggattaattaggcttaataaattcgtctcgcagtttacaggtagaatctataatttgttttgatattagtctatatttaatacttcaaatatgtgtccgtatacgtaaaaaaaaaattgtccaataaactaaacacggcgtacatacaccaacacaggcaattcttacagcatcaccagccatgcccttattcaatccctaatcttattcttttgggattttggtgaaaaaagaaatccaacagctatcctattttgatgctaatattttgaaaaccatatcatcacatccatcgctctcttcatttgagggggagcgatgtggcacgcgcgtcccggtggtgtggaaagaaaatcaagggggagcgatgtggcgcaagcgtccgggtggtgtggaaagaaaatcacaatcagggatgaggaggaataagggggtgtttagatctaggggtgtaaaattttagcgtgtcacatgttgtattacatagggtatcgcatgggatgttcgggcactaataaaaaacatattacagaatccgttagtaaaccacgagacgaatttatttagcctaattaatttgtcattagcaaatgtttagtgtagcaccatattgtcaaatcatgtagcaattaggcttcaaagatttgtctcacaaattagtcgcaatctgtaattagttattttttagcctatatttatactttatgtatgtgtttaaatgttcgatgtgacatggtgaaaaattttagggttgaatctaaacaggcctaacttttagttggtagtttactatgggtttcactttctgggttagagattcaattttataagatcttttggaaggatcacttttttgacatactaccttcgttttttaatatatgacgtcattggttttttttgacaaacgtttgactatttgttataaaaatatttaaatcatgcttaaagaatacttgatgataaatcaaattacaataaataaatgataagcatataaaattttttgaataaaacgaatagttaaacgtataaaaaaaatcagcgatgtcatataaacgtattaaaaaaatcagcgatgtcatataccctattaaaaaaacggtgggagtatcaaattctgattagcattatcaaattcagatttttggagattgatgttacctattccgttggtgatgctcaaatattagtattaagaagccatttggaaaatacgccaggcagtgaagatcacccagcaaacaaaatagaaaaaaggaaaacgagaactaaacttcataatgtttaacgagaactaaactattgtatatactacaccaaaaaatttagttcactagctatagtttaatttgcttttttcgttgcgagacgtagaatttgaaatttgaacttatatgtttacgaagtgatatatcacatattaatacatcttttcaaattttttcataaccatttaaatgacatgtaaataacaagaaaatatcccttcgaggatcaaaatccactcccataaaatagagggagtagtaaattttcaattataaaattaatttagtactcttaatatatatctcaaatagttggagctagcaaatttagttatacctcctgatgcctctcaaaggagtcaaggacgtacagtaaaaatactaaaatgacttatcaaagaatagagaagtttgagaagaatagggactgaaaacttctccattggtcattgcattaaccaagagtattgcattttcctcatatcaccaatacatccaagcagaaaacataaacagctgaagcctcaaaacatccgctcttgaggatatattccctcctttttcacacattgtctatcggcgcgtgagtgacattgtttgccagccagattaatcaattacagtgtaattgctgaaggtggcaacttgcctttttgacgacctgataataaaaaagaaaaagaaaaaaaatacagtgacaatacttaaccaaaatcactaaaaaagaaacctacttactccgtttcatattataaattaaactttctagtattgtacacattcatatatatattaataaatctagatatatatgtgcctagattcgttaacatctatatgaatataaacaatgctaaaaaattttataacaatatttaataaaatcattgaatcgaacatatgagtcgatcgatcatgtacctgggagaaagaagctcatgtaaggaagaacacaagaggcgtagcactcgtccaacaccttcgtcaccttgagtgtgctgagctcaatctgctggacaacctgggcaccatcatacgtagtgtccacgaacaccatgtcggtgccctctgcgaagcccaacagacgaggtcgcatggcgtcgccgggaatcacgaggtcgaggtcgatcaccctgagctgcacccacgccgccgccgccgacaccggcttccacgaccagagttggagggagtgacctgagaccaagcgggcgagccccatcccgccgtcctccgtcgtcatgaggagatgattctcaaagtcgtcgtcgtctatctccggcgaggcgatcaccgtcaggtccagcttgcgcaggtcgtagcgcaggatgttcctaccgtgccaggtgaggaagtagacggcgccgtcgccggcgaggacgctgggcttggggaagggttcggcgttgtggtggcgaacggtggaaggcgcgctccatgttccggtctccgacgagtacagccatgccgacgtcggcgacgtgatctcctcctcctccccctccatgacatagttggcgacgaaggccacggcgaaggggccgccatggcagccgccgtggtcgcagccggacacggcgcacagcaccgcactggcttcgatgttggtgcgcaaggcaagggtgtcagcaggcgagcgcagccgctgcacgtcgcccgacatgggatcccagacggtgagctcgtcgtcgccggagtcggagacgcaccagatgtgcggaagagggcgcggccgtggcggcagtccatgggcttccagccatcgtggtcgagatcggcagggcggaatgcggtggtcggggcgaaccgggccaagggggagccggcgtcgtagatgaagcccagccgcggaggtgctcggcggcggtggaacgcgcggtagcggcggaggaagccggcgtcggcgaggaggtggctccagtgcttgcagacggcggacgcgcgggcggcgcacgagggatcgtccagcgggagacggaggaggatctcttccacgacgtcgtccattagctccggcgccggcgccgccatgtcgcagcgaggagatccgatcagtataccgaggaacggaacctattgacaaattttggactttcaggctttcacagatctcatcttttttttaagcagttttttttatatgcaatattttctcgatccattcaggtggatcaatcggaactagagtagagataagatttatctcctcctagaacccctatacatataaggacagagtgagacatctaaagttgtcatgtactccagacgagatatataatgaagacatagctcttctctatatatattttcattgtctacttctgcaatgttcttgagggcaaaaagaagggcacgggtgttttacatcatctcacgtctctactactatagaagggatagggaacggatccggtgatccgctaatagacgcgtggtttacaacatgttatcactttaatttgactagaaaaaatacccgtgcgttgcaacggctgaagtctattttaattttattattgttatatggtttagttaagatgaaattcactgtgggagttcgcttggatatataattttttagaaaatcatcagctgcagttaggagtccgatcgtctcaagttagcatgcgagttttttttaaacatatttcttatatgattctttctatattaccaaaagtaaacgatcttagaaactgtcacaccccaatctggcatcgccgtacaacggcacctgacaggagcgtgtcgtaggaaaaacggtatgaaccgcttcctacgaaaccgcgatctcagtaccagtcccaggacatagcgctggtacccacggtgacaaatatgaatcattgcaatccttaaaataaatagaggacttatttaccttaacttaggttgcagctcagaacagcccgagaatgcaaccgacgacgcagacgaggaaacaccaacaacagcagcagcagcggaaccaacggactaacacccaacactacaggcgacggctgggaactaggacgaaaccctaatcttcacttcacttcatcttcacttaaaggcagaggaactatatatatatttatatagagtaagggtgagtactttcgtactcagcaagtcacaagaatttaggtgtttaatgcaagcttggaagagaggcaaggttgttttgcaaatcctttgtttgaaatcatttttgaaatcactaagtgatttatttctttttaactttgggtcgaaaggagactttcatctcgattcgacttaagagatgcttttcaacaactcaattgataatgtaccgacctcctgggtcagatcattacttctcggctctcggagccatttcacttgattaagcggctcccagagcctttttcattttctcggactcccagagtccagctgcccagtagcacaacaatctgcttccactcaggaagcctagtctatgatgcccgcagacatcccgaatcacacagatttgtttccgaccactcaggtcatccatctgccacataggctgattctggtaacgattcccacaccacaacaacttttcacaaagcacatgcaatcaaatctacgcaacgggaaccacctcacatccgcccatgaccgtgggcacagctgttcgaacagttagttaacctctgcagagggatacactttacccacaagacacgaacttactccagacactggacgatgtcagaggttcgcgacaaagcctttcccaagccgacccagggatacctcatgccacatagaaggatcaaatcctcacataaacataggccattttaggcgttcacaaatcaaactccaaccacctcgatcggtaattcaacaagcttctcgttcttacattaccaggaacccggtttggctccaaccgaccccgccccggcgttcccaactattggcatgcgaggtttccctgaatcaactagttatttagccagggtgtcccattccaccttgtggttgcactttgattatgttcgatgagtttcccacaggaatcggtccttatatacgaatacgggacagtgccacatagccacaacccccgcatcgcgagttttcacaattcattttattttcaaacacaccgacaccacatgtcgggttttgaaggcttcacaaacccatttcccaagttttcaacaaacaacggtgtatgtgggatatttggtatacgcgctcagagagcacgaataccgaggtaccacaagggtggagcaacaaggaatcagggtagtacgacctacggaaattagtgcgactactgggtaggtccgtcggtttggcacgcaaacagaggccaagcaagttaagtgtgtgattctaataatgcaagttgcaaacaaaataataatgacttttcaattataggggcaattgatcaaagggtgacttgccttgctcaaggtcttcacgaagcttcacgaatcttcgagaaaaccacgatcgacgaaaaatccggtaaccgcaactatacgcaaacaatcgaaaacctaaacaaaagaccaaaataaaggtcctatttagactaaataatagtgccattaaatagatctcaactttacggaaatactggaagctgaacggagtcaatcggacttacggatcgagatatatgaatttcggaagctcgaatgggattttccggacaaggaaatgatttatcggaattttctagattacgagaaatggtttatggaatttatagaaataatattctcaagaatattattgatggtcattgatatgagggaccaaaggaaatgattcatggaataaagaattgatttatggaacgagggaaaaggatttaataatccctttggaaacgaaaaggaaggagggatgtcaatcagacttcctcgggcggcattggtgtggcccaaggggatttgcatgcgcggccgagctgattgggccggacgcgggcgctaggaggcggcccaatggggctcgggtggggagagagaggcggttcggtggaccggatccaccgcgtggggtccagggacggggcccacatggcggcggcctggtccacgaggaataggtgcacgcgagagccgcggggtgggtcgggggaccgggagaccttgaccggtctctgcggggccgggcaggtagacgtggcgtccacgtggacagccacgttggcacgggcgagggaggaggccgggcggccgatccgacggctggcggcgggcggcggcgaacctggaggggcggcgtgcactggaagcaagcggaggtcaaggggaactagttcaacggtgcggatcatggagaggaggcgcgacggcgggatgggtggcacggcgcgggcgcggccggcgaggcgggcggccgcggcggcgcgctgggaaggttcgagggggttcggggatggtggcggcgccgggaatcaaggagaggagggaggctgacggcggaacgcaactgcgcacggcggcggcgaaaaaggcgggtggcgagggagcgagaggaaggggagacggccatggcagcgcggcgcgtaagcgagtgggaaggccggcggcggaaacagagcaacggcgacgacccagctccgtaatctcccgtgtaaatgagcatgcctagagaatttatgccgtttataggggagaaggggagcggagctcaccgggaaggaaggaacgcgccggcggcagggatgtcctcggcgggttcgacgctgaggcggggcggatggcgttgtccgctcgtggcaggacggtcgccgcgacgggagcggcacggcgccaagacggcgcggccggggaagaagagaggggcgcgaggatggggcggtcggcaccacggagtgtctcggcttctcgcgcttgtcggcagaaggagcggcgacagcggcgagcagccaggcggcaacgatggcgcggcagcggtggagagtgaagcaggagggattgagagggggctcggctttatagtggaggcgatgtcggtttgggaggcgtgggcgagttggttggtgctcggctggtgatcacgggcgacgcgagaacggcggacgacgaggatgcgttgggcggcgaaggcggtggatcggacggcgaaaatcgaatcccgggagcgggaggagctgcgcggcatggtcaaagtagaaaaggagggggaaaagggagctctgctccttgccgatttgggcgtgcaaaagggaggagagagggcgcgtgagagaggcgctctgcctctcggttttggaagcacgcggcgtggtgcgacagcggtagcaggactgtgggggtcggcggcagcgcagcgcatgcgtggcagggctgacggcagcggcgttcgggcgacgaccaccacaagggcatgcgcacgtgggaaacggcggaggcggcgaaaattgaatggcggcggtgggagggttcaaaccgcggcggcaggaatcggcaaggcggcggtggtcgacaggtgagagagagaggaagagagatgacgctctctcgggcggcgcacatgcacagcacgtgcaaggaggagggaggagataggcagaggggagatgggctagggggaacatgatcggcccactaaacttgagggaggcaaatagactttttcagagggattgaatggttgaggttagggtttggattcgaattcaaaatttgatattcgaactcgagggtttagggaggaatcaagggagactcgaggagaagtcaaggaagagattcaaaatgagattttgatatttttgggaacggggacatgtatttggcgaggatttcaagataggatttgaatttcggaatttcatttggagacttgaatcggaattggaatcttgaggtgggcgattttgatggcgacgagagggaacaacgatggagattgaattgagatctatggcacgacttaaactcacactcaaagaacgaaattttcgcaattaggattttgccgaattagtttttaatgtctgacgaaaagcggagcgttacagaaaccgactcaaatacaaatatgtatttccaaaagcaaaaaaaatttaaaaaccaactcatacacggatgacgtaccaaaataccagcaaaaacatcttcaatttttataatagttctctatatagattaaaaccaaaacataaaattaaaaccgactaaacagggatgacgaaccgcggaaaaatcttcaatttttataaccgacttaaacacggatgacggaccgcgaaaacatcttcaatttttataagggaaaagtacaccgaaggtccctcaacttgtcatcgagttacgaaatcgtccccaaaccgcaaaactgggtatataacatccctcaacttacgaaaccgttcactttaggtctttcagcggttttgatcccggttttgtctgacgtggcggctgagtcagcgtgggacccacgtgggctccacatgtcaggctgccacgtcacacacccctctctctctctttctcctcctctcccttccccctttctctctcacttttcacctcaatgggcatccggccggcgggtggagagatggtcatcggggcaaggctggagaggatgtccggtagccggcgatgcgggagaaggggagggtggcggcggcgggagcacagggggagcatggcggcggcggcggcctccggtctccccgtcttcaacaccgagtgccgccgccgttcttctcccctgccggccaccggccacgccgtgaaccaccaaggtcggggacgcggcggccaagcgtggaggagcgaagggtcgaagcgaagcccgtcgatgcagcggcgaagaggaacccattgaggagtgctaggaccacgtcggtgctgacgtgcacttggtctcagtgaagaaaacggggaagccgtcatccccgtagccaggccgcctccacggcgcccgctccacctccacaaccatcgctgcgacgcccgcctccatgccaaccgccgcggcgcccgcctccgcatccaccgccgcgacgcacgcctccgtgccaaccgccacggtgcccgcgtctgcactcaccgccgcagcgcccggccccgcctttgcctctgcgcccaccaccgcaatgcccaccgtggcacccgtcgacgcccaccgctacgtcgcccggccccgcctccgccgactcgtcgccccccgcagcggcgcccgtcgacgcccaccgccgcgtcgcccatccctgcctccgccgcctcgtcgcccgccgccgaacctcctctcccaccttgccccgacgaccctctccccacccgccggctggctttccgttgaggagaaaattgagagagagtggaggaggaagaggaagggagaggagaggggaaagagagagagggggtgtgacgtcgcagcctgacatgtggagcccacgtgggtcccacgctgactctgccgccacattagacaaaaccgggatcaaaaccgccgaaggacctaaagtgaacggttttgtaagttgagggatgtcatatacccagttttgcggtttggggacgatttcgtaactcgatgacaagttgagggaccgtacttttccctttttataatagtagagatagagatagagatagagaagagaagagaagagaagagagagatttgctagctcttccaggcaggcggcccttggctgggccgagtgagagagaggggaaagggctgggctgttgaggttgaggcccaagcggagggggaaggaaggggagaaaggattgggctggggagaagtgacggaggtagtggaccggtgagggaagtaaagggaagaaggagatgggttggagtgtgacccaattgcagtgttccttcatattttccacagggaattgtttggtgaatgtttgaatatttgttgagaggagatttgcacgcaaattggatatttgagttccaataattccaggatctcagaggagagaatttcagctgtatttttgtggtatatagaataggatgataccccataaataccatcagataagatgagttcacgccggcaatcctctgatctgtttgtgtacaaacaacattgacagcgatcgaatcgtaataggccttgcaagtttagcaacgctgatacggtatcactggcagatttcaaacggggaaatactatgatcagatacaattgagttggatggtagtccaccatgaactcactcaacaatcaagtcaaccatcaatttaagacacggtttgagctctgaaaaggtaaaaggttcatgcaatccctattggcagttcttctgagaaaatggacatgcagcagtacatattaagcaagacaggattttggcaccgaatagattccattaagttactacctagggtaaaatgcattactttgatacagaatcatcgccctcttgtgctggggtatgaacatctgagttgttgctgctatcaccttttactgagagcgaatcagctgcagctctcttgggaggaggttcagcagagattggcttgatattagcacgtttgatacctctaccaacaaccccaagatcggttacagtgcttccagtacttccggttgtagctgccgtagacagagttgacgaatcaaagccgttgcttgatccagccatctgtgaagaagaattgaaagaagcagccgctggcattgtgtcagtagcattctgttcaccacctgcctttgaggcaatcctcttcataatctcatccataacagagcttggggtagacattgcttgttccaagtcttccagctgaattcaaacaattcatacatattcaagaacaaaatgaagttggcaatgtgaaaggcgtatttgtatgaagaaaataataaagcttattttcacaaatgaacgtatttagcattcatatatgaaagaagaaaataagatggcaatgtcaaaggagtattcatatagacaaaatcaagtttattttaccttcttctcaagttcactcaaaatgccactgagctgctctatctcaccctcaggagcggacttttctgagcctccatcagcagctgatgcgttatcatctttaccagccaacaaagcatctttgtcattttttaggctttgtatgcgtgacttgcataatgaaatagccttagcgcaatatggaattgcatctgaaatcttcgacaccaactcatagaccaaacatatgcggaagtttctaggactgaattaaggcaagcaaaggaataaaaactgaaaataaaagatactagtgtcacctttcctatgaactggataccacagttcatgtccacatttagacaaacacgtacatgtaagaaaatgaaggtaaccatgcagatttgggtggaactcccattgaaaatatacatgtataacaatatttaaaacacaccttcagctgcctaactctttaagtcgagaaggatgcaggttgcaggcactacagcattgggttgcaaatgttgttttatacttgctatatggcagaaggatgcaggttgcaggcagataatttggtagtattatgtttaccaaacaagaaggatacagatcaataattcgacgatgatcaggctcaaacaatttctccaatatggctaaagctttaaagtagtcaccgagtgagttatcaatgtcctctgaaaatgaaatatggggcattagcaccaaaaccatttaccatcaaaactagagagtaactaagatagtggagacagacctctttccatggagacttcagctagagcagaaaagatttttgctttctccaaagtgtcatctgggctcttctcaactatagcccttgcaatatccaacattttccaggcctgatccaaatcagaatcatcttcatctcccaccatctcatcatcatccttgtcactgtcaccgttttcctcctcttgaccttttccagttgagttttgccctaaccaaaactatatcagtacttaccacagaaaccaggaagaaaagcacatggagtgtggccatcatttattatagtacaatagcaacctgctacagggagcagttagatgcatatagatgcacaaatgatcccacccaaccaaatagtgaccaataagtttgttcaattaaaattaaactagtaaggtttcttatagaaatgcaagaccaattatttaatcttgagcaaagtaagaagaactatttacattattgcacgctactataattactcaaataaaggaaactcgtaaatttgcaaaagcatcctgtgcaagtgcttaatctgtttaagctgccatttctattccaagtgcacaagtaagaaaggaatacagataaataaacctaggtgtattcaaaatatggcctggccatataatggttttttacaaaccgcaaaacattttttctgcctctggaatcacgcattatcaatagcacaaaatataattgccctttcagaccaaccaatatatccactgtgaccaaatggcctcctatggaatgataatgataatttgactaatggaggaaataagtctgaacactttccaaaaaataccattactttataacaagaacatattaatgatattgtttttatgcatagtatataagaacagggtaagacaaaaggccataagtgtacaataacaactacataggtacatggtacaataatggtataccttcttcagcatcagctttatccgtggatggagcatcctcagtattgctaccgggggtctttgagcttccactatcatccttgttagtagtactcttcatggactccttattagatgaactcttgggaacattacccaaaggatcagcctcatcctgagctttgtatagcaaggcacatccatacttaaaatatgtgctaacacattccggagcaagttctccatgatgtgcaaccctgatgacaacaaaaggcataaatttgttagggcgcaagcactgaagttatagtacaagttcattgagacataatgtaaactgagatggatcagtagttcgagattggtagctgctctgtctatttaccaagcacaaccacaaactaatataacttgacctcagtgaaatatttccaactagtcagtagtggagcagcatacatacatatttctgagatatcaagaattgagtaatcgcactttgctgctatggtagtcgcaattcacacacaataacaagagataaaacaaactcctagctagtgctatcaattaacacgaggctaagaggagaattgactgattcctcaacacgatagcccaatccattgcgccacgttgataaacaagagaaatccaatcgccaatcatggcctccagcttgctgtagaacctcataaaccctacccgactcacctccccaattacacaagacaaaataacaaacagcttgctgtagaacctcataaaccctacccgactcacctccccaattacacaaggcaaaataacaaactccacatgacagcaacaacacaatcaaatccacagcatcactgaaccaaatattacgttattcccccacatcgaaccagccaggtcgggaaatggaaccgtagaagcggagggggtgtagcggagaaagcccctcacctgatctcgagggcgcggctgaggcagtcgacggcgtcgacgaagtccccctcctcgatggccttggaccccctctcgaacagctcctccgcccgctctagggttttcacctcctcctccccctccccctccgcctccatctcctcgcccgccccggcctcctcgctagggttcggcggtgacggcggcgggtcgcgctgctcgtctcgcggcgcctccacgttctccgacgaggaggccatgggctgcggcggcggcggcggcggcggcggaagcagcgagtggggagagagagagagagagagagagagagagagagagagagagagaggaaggaaatggggaaattttggggtcggaagcgcgaattctcggggatatgtaggagttgccgccaacgggttccgcgtattgggactgggcctacttgggcctacatggctgcaatagtgggcctagttgggctttccaacttaggcccaaatcttgttcatgccattttagtcctcgtttcgtttgttttttttttattatttttagagaagggttttttttagggcctctacatccaattgaatttgaactcaaaccttataatgctactcaagtcactacaaccactatactacatgcgctttcgcatgtttcatttggaatggattccaaggacaaaatttgtgagaattttatgcaaatttgatcgatttctacgctaatatttcatatagaaacttttttttaaaaaaaaacaccgtttagcagtttgaaaagcgtgcgcgtggaaaacgagggagaggggttgggaagaggctcaaacgaacacagccttattcagtttggcaatgttctggaatatggagggatgcccaaatttcgccaaaatactgtatctttggttcatctcaaattttcagatgtctttttttttctgttgatgtttgctttgtttttgaataaaatttggtggattcaaataggctgctaaatcagatgtgaaagttgctcatggtttaggactggaaaaaaaacaaaattaaagatgtcaacgcaaaaaacgtgttgccaacttgcttgcaacgagagccaacacgggagtagaactgagacatgtatctcaaagtaatagcaaaatcaaatcaaattaactcaaattcctatatctataagagatctcgaataatctcatccatgatccatatatacatctcgttcgctgcagcgattatacatatcaaaagtataaaacatgaactaaaaagaaatactccaatttggaatataatcagtggccgaagcagtcgacgaggatggacagggcggtctctgcgcccaagccgccgccgccaccaccagccgccgagctcgccggcggcggcatggcaccatcgccgccgccgccgcagtcgagccctttgtctgacaccgatccatcgcttggcggcgacggcgacggcgccgatctgatggcctcgaggatctttctgcagctccgtatcctcccggccagctccgacgaccaagcatccatcagtctcgatgcaagctgaggagatcgaattttgagctgaattagcaacaaaagatggaacttttgagccggattcgagcttcttctcgggctctccctttctttttcagtacaggagggggacaaagaggaagatatgaaagcgtggtcggcaccggcaaagcaggaggagacatcagacgggtggatttatacaatgagaggagaggagaattgaagtcagagaaggcgaatcaggggacatgcctctggttttggagtagtttagcccactgaatgtctctgaattggaaatctggaagtcttgcacgactttttgatttttgatgacacctacgtggacgatttccaagccaaatattctactctctacttgagttgactgttcatcggtttgcagaaatggaaccaatgctttcgattgcattgttcttgtcgtcgctgcaatgttttcagtacttcattcagtatatagtgcagaagagaatgtgctgctaatctcatcctttctttgatcttaatcagtctatatgtatctagcagtgcaaattgattgattatctctttccctattacttcctgatggctagatgtacaggttcaggttgtcggcgagctgaaacctacaagaatagataggtttctcttctgatgttcacaaggaatcaagaacagtggcgtcgatcacaatcttcgccgtgcagaggacagaggttcctatggcttgccgtgcccgacctgtcggagttcgtcaatttcatgggattcggtcagattcatcgggtaaattgcatgcgaatttgctccctgatcgattggttgcattcgttcgtcttcaggaaaagaaaagaaaagaaaaaacaatcccctcttatggaatcaccgaactcgccacgctctgctctctatttgtttggctgtcggaatatttatctccgaccctcctagtagaattctttttaaaaaaaaaacaattataggtgctcttatgcagaagtgagctgcgcgaaaaaaaaataaaatgaggcactcttcttctgctgcaggtcgccctgggtgatgatgggtcgatcacaatcttgctgccgtgcagctgttccaaaaaaaaaaaagagatttggatggagagacgttgcttcaaacatttttcaagaagaaatagtgagtgtgttgggaattgagccgcttgtcgttgcatctcccgtgcagctgttccaattgcgccaccggagtcggcaagatggtttcgaccacgctaattgggttttggtcgattgcatgcaggattgctctctaatcgattagttacattcggttctctgcagggagagagaaaaatgaagcgataaatcatcgttccactcaaaaaaaaaaggtgagggttagaggagtcggagttttaatctccgaaccccttggttcggttttttctttttttaagaaaatacacgacccattcgtcggcacgtttcctcgccgatcatccatggcggagccgccgacgtggtcgctgccgcagaataatctgggatcgataagctgcgccggcgagatcgcctgggcatgacgtttccttcctcgatctgcatggagcacgagaaaaagaacggcaaccttccttctcctgcacaagcaacattactggaaagtgctagttataatttgtttcattttccagggaatcatcatgatgggagagggactaatcaagtcttttattatcttaatgaactcttgatcaagtcgtacctcggtttagaattttttttttcttctagaagggccgtgaaatatcagtgatagaagaaactagctagaccagtaaaacgttggacttgttttcagaattttcatgccattgactgtgcatggaaatctgaaatgccgggcaacaggttgagtacgaaatagtaacagccaacaggttgagactagagacataaactatatatcaatatcatcatcacactttcaatgatggcaaaagattagacaagaaaaattcagataaaaagaacgattacccatccagtgaacggatttcttgcgtaatatttcaacaccatgttattaccagcttgcttatatgctgagctgaacagactgtgcttcactttcatgaaaccctattgtacataccaagttattgctggcttagaaattaagactgaacaaggctcatttctcatcatgaagaacttcctatccattccccttgttaccctcatcgatctctcttacatgatctagaattctagaatggtgttggcgctaactgcacttccttctctttctgaatccagtctacaattgagcgctgcatctggacaggcgcacgctcaacccacaacttgaggaactcagagatcacatctgcccggctctccagatcaagttcctgtcgtctcgacacagttgcttccctagcagtgctcaatgtgctcggcatattcattctcgtcttccccaaatgaaagaatgcagcttcatgttttgacttccagagaagctggtgtgctgttgcttcagaattctgattgatgctacctattgcctttggcagcatgaccttgtctagctgttccagggtaatgtttctgtgataccaaggctgctcctcgccattgatcacctctactgcagaactctcagctgcaggcagaaggtcatttgaagagctatgaggcaaaaaaagaaccccaagtttcagatgtgaaggccttcttggataacatctttttcctcgtacagctgctctctgtttattgttttttccttgtatagctgccctctgactgttgcatctaaattgtgtgatttgacgctccaaatacacttcaatgattggttgaagagaaacatctagcagttctgccttgtccatgctgccactcccacacatgctctgatcttgatgtttgcagcatattgggtttgggcggaaccacttagtagctataccatgaatgttgtcccaatggtatgaacgataatgtgacacccaggagaagtcttgtgtagggagctgagcaagttccttcctaacagtttcagttgtagacttgaaatgaggggtaaaccattgcaagcacttaattatagtgccaattatgtttgtactctctgaaatttgtagcatcataccgaggaaaaagttattctcaggtgcactgcaatcgttgtaaacaaagatcaacttagcttctactcctcgatctgcaatgtcattgggccgtatccaaaacaaatgctgcttgtttccctgcacaaatttgtactcaagtgtttcaccagcaagaaggtgcccgataagagggtcaaagaacaagtaacggcgaggtgtccctccaaactccagagatttcagaaagtcatcagctcccttagcaaaccactcaaatctttgaacagttgatctacttggctcgtcgatattgccgtgaaagatggatgatatcagtgatttggtggcacaggcaattcgcctaggaaaggaggaattccttacttgctgttccttctcctcttcttcctggacatgctgcctgcacttgcgtagtgtgtcatcacactcttcagtagcacgcttcagcttcttctgccaacgcagcaacggctcactcgtgatctgccacttactggatgtctcaagtgcaagctccaacttgatttgtgccatctccagcctctccatcagctcgtctgcacttaatttttgctcataattgtcaatcatgccagatatgattttgttcactgtctcggtaacaatggcagaactgactatctctcccatcttcagtgatcaatccgcaagagctgcctccctgatcagcacagagcaaagatgtatcagtacattgatcatgatgcctaataaaatcaagagatagatcagtgaattcctgataagtactaacgaagtgcattgttgaagcatatgcaaagcccaacctttctgagttgaactagtaggaagtaatggagctacacaggtgcaccagagagtacccggcagaagataactggattgcatgaattgcacgaaagtataagacttcaggcaggaaaaatagcaaattacagttgggttcttctggaagttaggctggtctaatatggcacctgttgagaaaactattatcggtgactttcaagttgatttgtcacacacagacaattttaaaatcaaaatctgctctcactgactgtcccaatcttgcggactagctactgaagaaaattctcctctcgtcactgtaatcatttttcttattagaaactccagcttcttgtcttgactcttgactgaatggaatctgggaatctgtaaaactatattatcggcgacttaatttgttgggtctgagaaaattattatcggcgactacgaattatagctgggaatctcgggttatgttgcttgtgtagtgcgagtgcctctcccctgaatagaacagcagtaactaaaatcaagctggtcgcgagaggcgaggaaaccgagccgtaccttgatctagcgcgccgtggccgccgcgaggaagcggcggccttcttccctctccgcatcgccgggtcgccgcacaagcacgcgtgtatggtggcggctcacagtggaagcaacagcggcatcggatcgaggaaggaaacgccattatggcaccgccttgcgccgccgatccacgagtgggcgcggcctcgctgcggacccttcggcggcagagcaatccccatctggcggcggagaggccccgtccggccatggcgtcagtggcgtgcacggtggtggttgccatggtggtcagcgactcagcgtggagacgaaggtgtcgatgcggcccatatgtgacagtgaaaactcggacaagcccacagaggcccaagtaaaggcccatgggctgcttaggctgcacagcggccttcgactgcgttcttttggagggcccaagtattaacgcatggttaattagtattagctaaaaaattgaaaacatgattaatatgattttttacaacaacttttctatagaattatttttgaaaaaaataccgtttagtaatttgtgaagcgtgcgcgcagaaaatgagtcatgagaggcagaggttgggaacattgagcgaagaaaacaaccttggcctactgcagaagttggggcagaagcaacactggagtgctagttctatgttaggttgtttaattcggttcatttaccagtagatgatcatgatgggactaaccaaggtttcggtatcttaaaatcttgatcaaatgaaagcaacctagaccacgtaaaactttgtctatttgaagaatttttcatgaaatgagccaatgactgtctgatcacctgatataccatggaaatctgaaatagaagtccacagggtgagacatgaaaaattcagataaaattcaatcttggttgcagcatatacgtgcaaatttcacataaaaaaatattgattacacatccacttttttttacacaaaaggtagagagactctaccttgtaaccattgtattaatggtggtcaaaccagatgagatctggtaaagccaaataagagaacaacaggagcattacagggggagaagaaggataaaaaggagaaagaagaaaaaaggaaaacaggagaaaatacaagatgtaaagcaggaagagaaaatacaaaaaatacaaaaataatacaaaaatacaaaagtggagaaaagagggtggttaatcaaatttgaccacccaagcagtaatgtgtgctcgaaggcaaggcttgaggcggtgctcccataattgcagattttccttgatcagattcaacgttgcggaggtgctttgctgagaagaattgaaggtactgtggttgcgggccttccaaaggttatgcgaacaagcagcaaagcaggccggagggagtagaatatttcctatccattactttcatttccccttgttaccatgatcaatctctattccataatcttggtggcaactgtatttcccttcaaggccttgtttgaatgagcttatagcaacactagcaaatctccagctcgcctaaacagcttatattcttcctccaggttaagaaattaagtagccaccaaatctagattttatgaacctagtaaccagaagctaggtttcaccaacttcctccagattcccaacagctacatgctcatcagcaactttttagaatctccagcttccccaagtagggcctgaatccagtccacagctgcgaactgcatcatgacaggagcacgatcaacccacagcttgagaaactcagagatcacatctgctcggctctccagttcaaggtgatcatgttgttgcaacaacgttgatttcctagcagtactcaatatgcttgacatattcattcttgtgttccacacatgaaagaatgcagcttcatgctttgacttccacagcaactgatgcgctgtcacttctgcattctgattgaagctatctattgcttttggtagcattatcctgttaagcttttccagtgtaacatttttgtgacagtaaagctgctcctcaccattgatcacctctactgcaaaactctcagtggcaggcagaaggtcggttgaagaaacatgaggcaaaaggaatactccaagtttcagatatgatggtcttctgggagaacatatttttccttgtacatctgccctctgtttgttgcaactatattggaagatttggctctccaaatacacttcaatgactggttctagagaaacatcacaaaattctatcttgtccatgtagccactactacataccttatgaccatgcttgcaacacagtgggtttgggcggaaccactcagtagctactctgtgaatgctgtcccaatgaactgaacgagaacgtggcacccaggagaagtcttgtgtaggtagctgagtaagttctttcctaacagcttcagttgtagaagaactgaaataagggctaaacaactgcaagcacctaattgtagtgccaactatgtttgtactctctgaaagctgcagcatcataccaagaaaaaagttatcctcaggtgcactgcaatcattgtaaataaatatcaacttagcttctactcttcgctctgaaatgttgttgggccgtatccaaaacaaatgctgcttgtttccctgcaccgatttgtactctagagtttcacctgcaagaaggtgcccaataagggggtcgaagaatgagtaacgatgtggtgtccctccaaactccacagacctcagaaagtcattagctccttctgcaaaccactcgaatcttcgaacagaagatacagttggctcgtcgatattgccgtgaaagatggatgatatcattgacttggtggcatgggcaattcgcttaggaaaggatgaattccttacttgctgttccacctcctcttcttcctcgacacgctgcctacacttgcgtaatgtgtcatcacactcttcagcagcacgctttagcttcttctgccaccgtaataacggcccactagtgatctgccacttattggatgtctcaagagcaatctccaacttgatttgcgccatctccagcctctccatctgctcctccgcacttgattttcgctcatacttgtcaaccaacccagatatgattttgttcactgtctcatgaacgaccgcataactgactatctctcccatcttcagctgcgagattagcctccctgatctgcatagagcaagatatatcgaaacatcaaccatgatgcccattaaaatcaaaagatagatgagagaatttctgataagaactagcaaagcgcaatatcgcatcgttgaaatatgtaaagcacaaccttcagagaatctgagttgaattagtcgcaagtaaatcgaagccacgcaggtgcgaccagagagtacccagcagataataactagattgaatgaatggtgagcatcaaagttgatgactttggggagaaaatacgagcaaagcaaagctgggctctcatggaagttaggcgggtcttgttgaatgtatggtctaataccacacctgttgaaagttgagagcacactgctctcattgactgttcaatcttgcagcgtggctagttattgaagaaaaactgtcctcgtcactgcgatccttttcctaaaagaaagctctcattgactgtccaatcttgcagcgtggctagttattgaagaaaaattgtccccgtcaggccgtcactgcgatccttttcctaaaaaaaaaaatcctagtgaaatcagttccggcttacttgtgttgactggtagggatctgggaattcgataactatattatcggcgacttgaagtcgtcttttggtctgaaaaaatcattattggcgactacgaattatctgcgacacgttgcttgtgcagtggactaacctatcccctaaacagaacagcaacaaattaagctggacgaaacagatcgcgggatgcgatgaaacctagccgtacctcgatctcaacgcgcctcgccgtggccgccgcgaggaagaagctggcctcctcctctccgcatcgccgggctctcgccgcacgagcacgcacaaatggccgcccccacagtggcaggctggcagcagcagcagcggatcgaggaaggcaacgccattcccccggaccaccttgcgccggcatggcctcgcctggatcgttcgtccgcggcggcggcggaggcctgctcgcgcggtggacggcggtggttgccgtggtggtcggagtggagagtggagagacgaagggctttggtgcggcccaagtgatagtgaattagtgatagctcggcccagtccactgaagcccaaatttaagcccactaactcatgggcttcttgagccgccctaggatgtactttcactaccagttgggccgaatgcacaacccattcgtctacaccatatgtctccttccttcggatgtgtctcaggagaggaaaatatacaccaaatgatacaagtcattagcgattgattaattgagtattaattatttaaaaatattaatatgattttttaaacaacttttatatagatttttttttaaaaaatacaccattaagcaatttggaaaacatgaaaaaaaaaacaaagtttttcttcccctttcttctcggaactaacacagccttcctcgatcctacagaagcagcattacgagatgctagttctatgttaggctgtttgattcggttcatttgccagcagatgatcatgatgggaataatcaagtctccagtatcttaaactctttgatcaaatggagactagctggaccatgtaaaacctttgtcgtgcttgaagaattctcatgaaattgctgtctgatcatcacctaacaaatagcataataaaaagacaagttgcttggagatctgaaatactaaaaggaaacagggtgaggcatgcaaaattcagacaaaatgaccgattacacatcaaagcttcaacaccatgttgagctcatatttacataccagagcaattttatggttcttgagtaggtactatgaggtaccattttttctattataaatttggtacctcttggtatctaggtactatgatgtaccaaattttacactaaaattttggtacctcatggtacctccttaaggaccgtagaattgctcttttcagaatctccaccaagtagggcctccctcctctcttggcataagtcggtctggcttaatgcgttgtgtatcgaatattcttatcttctaatatattaacgtgcaatccttttgcgcgttcgagaaaaagccaaatagggcctgaatccagtccaccactgagaattgcatcaggataggactaccctgaacccacaactctagaaattcagagatcacagctgcttggctctccagctcaaggtcatgtcgttgcaaaaacgttactcattcagggcttgaggccaccgtcgtctacctttacacccgccattgagtcggcctgcaccttgccatctccgtgcccatcttctccacgcacaggtaggcgacgccatggccggatctccagaacacctcatgcgccgcagcctcgtggcacaggcgatcgacggcgttcggcagcagctcctccatctcacgccatccaacgttagtgcgcaccgcttgctcctccctcccgtcgatcgccacgacggcgacgctcttggctccggacggcagctcctccggcgaggcgtgcggcgcgaagacggccgtcacctgcagcagagtcggccccgagcaacccatgttggcatgaccacatgaacatgaatatgatgaagaagacgatgttctcttgtgtcgtgtagcagagacatggcgttgcacgaccaatttgatcaccggctccgggaatgcacctaacggctcaaccatgtcactgcttctgcggcgaccatggtgctcgtgttcttcttcgcagcatgccgggtttgggcgagcacggtgagtttcggattggtggattctcgagtactctggatcagtagaagcaacaaacgggaagcagtagaagcctcgctggtggaactgagcgagctcttgcctcacagcttcagtaacaggcttgaaattggaggtaagcttctccgagcacctggccataatcccgaccacattcgtgcttgctgtcacccgtatcaaaattccgaggaggaagttttcctctggcctctcatggttcttgtactgaagaaacacacaggctactactcctcgctctgcaaatcgtagtggccgtgccgctaggtagtacccacttattccaggaggattttcaaactgcagagctttgccggcaagaaggggacctgtgagaggatcaacgagcatgtagttgatgctgcctatgctgccgaactgcaagaatctcaggaactcaccggcgccatcagcaaacctttcaaacctctgaatggtcgaggttgtgattaggctatcaacattcttgtcgccggagaaagaggagaagaatgatcttgtctcatgggcgatccgtctggggaaagagcatcgcctgatctgctgctccatctcatcgtcttccatggcgcgacgcttgcatctgttcatgacttggctgcactcttcggaggcgcacttcagcttcttcctccaacgcagcagcgaggcatctgtgaccggcggccactttccggacatctccagagcggcctccattctgatgtgtgccatctccagcctctccaggccatcttcctcacttagtttccgtttatgcttgtcgacgaagaaggtggagaccctgctcacagcctcgccaactaccgcagaagcaactacttcagacatcatgatgttctgttgattaccccagcctggttataaaaggggatggaaaggtcaggttacaacttataattgttcactacagaaccagagatacggaagtttataagaacttagcaattagcacaaaatgtactcacctcaataagctgcttgaaactagtgctttggtcatactgcaatattgtgacttgtcaagagcataaatctgtttggtgaatatgggggttcagttttcttcacaatgtcaattggacagtgaaaggtccttaagtaacatttgtaccagaacacacgttgtgacatagacatttgataattaattaatgtgatcgtgaaagcgatgacaagtcttcccttcatactgcctgtatttctccaaatactctatcactgaatcaacttttgagtaatacatatgttcaggccaagaaaattgcttgctgtagttgtttaaaaaaaaaggattagtcttcctctgtggaaggatccatcaaatatataaaatgaaataactaagcaaaagaaaagtctaagattgaacgatatattctggtgacaaactgattagtctcaatagcagactagtcagtcaatagcagactagtcagtcagaagaaataaggtgcaccgcagctaaccgtaaagctttgcaaatggactggaaattattctgaacaactgtaatggaatatctgtctagttgatgaatagtcttgtgttggcttggcatgtccaccactcaccccatccacgggctcaccaagtcaccaatcagtttgttcaccttgctgctctttttttgcatcttcctttgcatctgcgtttcagcacatgacaaagttagaataaatattcatgtgttttctagtttcattttgaaattatccaaaatattataattttaaaccacccagaggttatcgctgtcaaactgggaatttccagtaaataagccatactggatgaaaataacaaaataaaaagaaagtgcatgggaatatgagaaagcaggcaattgagtgagaaatgataattttcttatagcccacaatcatgatagactcatgtaaattcaaatgaaaccagacacatcgaatgagcaaggctggtacattagacttctagggcaagaacatcatgttatcaccatttgccaacataactgacgagacaaacaacagcagtatatgtagaacatttcagatgaatacactcctaagtacttagaaaccaactccctacatgttacttttctcccccattcttttaattttaattatccctgtttcccttctagtccctattacatcatctaaaatgtcagtagaggacctgctactttcttctccttccgaatccagtcaaggagtgagccctgaagccggacaggtgcatgcacagcccaaaggctgaggaagtcagcgacctcatgtctgtgattgtgtgtccggcgatcatgtcgtcgcaacatctttgctttcctggctcctcgaatggttctccgtgtgctccgcatgttcattgttgccttcacagcctgaagaaatgcaccaccatgtttagacttccaaagcatctgatacgctgttgcttttgcattctgacgaaaacaatctacagcccttggcagcatgaacatttgtgtgcaagcaatgttgctcgttaccattaatcacctcaatcacagtactatcaactgctgggaataggtcttctgaagagccatggggcgtatagacaaggataacattcagatgcggaaattctttaagtgaagatttaccctcaacaattgttccctgttctctgaacccaggaggtgaaacttggcacagtaaactcacttcaatgatgggttctagagaaatatctgttaattctaccttgtgcaagttcccactaccacatactttctgaccatgatgcttgcaacacagtggatttgggcggaaccattcagtagctatactatgaatgttctcccaaccgtatgagtgagaatgtgacaccctggagaagtcttgtgtaggtagttgaataagttctttcctaacagtttcagctgtagactcaaaataaggagtaaacaactgcaagcacttaattgtagtaccaactatgtttgtactctctgaaagttgtagaataatatcaatgtaaaagttgtcctcaggtgcactgccatcattgaaagcaaagaacaacttagcttctattcctcgctctgcagagttattgggccgtacccaaaaccaatgctgcttgtttccctgtattgatttgtactctaacgtttcacctgaaataaggtgcccgataagagggtcaaagaacaagtaacggcgtggtgtgcctccaaattccacagatcttagaaaatcattagctccatctgcaaaccactcgaatctttggacagaagatctacccagctcatcactattgctgtgaaagatggaagataccagtgtcttggtggcatgggcaattcgcctaggaaaggaagaattccttacttgttgttccacctcatcttcttcctggatatgttgcctgcacttccgtagtgtgtcatcacactcttcagtagcacgcttcagcttcttctgccaacgtaacaacgggccactagtgatctgccatttattggatgtctcaagtgcgaactccaacttgatttgtgccatctccagcctctccaggtgatcccgtgcacttgattttcgctcacaccggtcaatcaacccagatatgatcctgtttaccgtctcttgaacgatagcagaaccgactatctcttccatcttcagtaatccttccctgatcaacacagagcaagatatatcaatacatcgatcaaaatatagatagagttaattgcatattggaccggctttctttaccatggtcgcagcttggactaggaacaagctattattttcactttgggctagtaatttttacaaaatgttacacttaggacctagtgttcttcttccagctctgcttcctcactctctctaccttcagattgagattcacatacctggctagttggttttagtagagatagagctcaagctccaccagtacagtcatgctcgagctctactcagccagtcagccttcgctgcccctgccacattcattcgtgctcaagatttaatgtgcagccttgattaagtgccctagctccaattaagctagtactgccatggatgaacttgggctagaatgggacctattgactagttggtggagcataagtgtggagtgataacatatggtgttagaatttcccaccgtgccaccgtgattcattggctatgtgctaattgagctcaagctggagctctgccgtgtgccgtgttgagctcaagacggagactaccacacactcaagctcaggcgctgacgtaggtcaaacacgtagatggaacctgaggaagtgtggtgagctcgaactaaaacagggaagagaagagaaaagggggagatctagaggaagaacaagactggttcaatatgaaaatttttgcaaagatttctggttcaaaccgaaaagaatgtcctacctctagtccaacatgcaacaatggtcaataaaagtggcccaggatgcaattttctcatatagataagtgaattcctgataagtacttataaagtatacctttgaagtatatgcaaacccaaccttctgagttgaattagtaggaagaaacttgagggaacacaggtgccttctgagttgaattagtaggaaggaacttgagggaacacaggtgccttctgagttgaattagtaggaaggaacttgagggaacacagatgcaccagagagtacccagctggcagctgccagcagacgataactggattgaatgaacggtgagcataaaggtccatgtccttggtggagaaaactcaagtaaatcaaagatgtggacgttaggtaagccttattctccagttgattatgccctctttgactgaccaatagtaaattttgttattaagactgaaagaccaagaacggctatagagggggggtgaatatagcaattcaaatcttgcccccgaaaatactcatcaagccggatttctcaaaatccttactagaaccgcggctattagagaagccggatctagaaaagaagatagaaggaattcccgaaactagaagaggaagagaaaaggaattcccgaaactagaagagaggtgaggaggagtgagcaaaactcatcatcgcaaagttcaaattgcaagcggaatttaaattgtggaatttaaatggacaagacaaaaacgaaatccttcaaatcatttcattcataggtgatgcaaaataaccgctcaactaggagcaaacatacaccttcagaggaacattaacacaaacttaaaatctctcggacaaacacactccaaactaatcctaatacaaaagcctctcgggcaaacacactccaaactcacacgaaaactctctcaccaagcatctcaaaaggattaccaaaggagcaacctccacccttgcatccatctctctatttatagcctaagacccctaagacattgtctcaaatacccctaggacgaaaccctatctcagatgcaatcctggctgttcattcttccttacatgcgaaggaaacctcttagatgcttgccacgtcgtcgatccgaagactcctcgcacccccgatccgcgtcgtgtccatccgagcctatccacatgcgccatgtgtccacgtgctccgcgcgcgctcgtgctctggccagcgagcgaagtttcccgcgcatcccgtccaaaatctgcgtaggacccacgcggtatagctcccgcgagagagcgcgcggtcaagtccgcgcctgccgcgtgtccctcacgcgcgcgcgccgtcgccgagatctcccgcgctcgcctccgagttgctgcctgccgcgtgtcacgtcttcctgccgatgccgtggtccgtcgaacgggaggacgccacgtcgcccgtacggctcccgccccccgcatgccttgtcttcatgggcccgtcgccgtgggctgtctccatcttgggccagtcaggaccggccatgtggcctcctgctgaccgaacacccgagccggacaggccggttggcctctcttccagccagcccacatgcagtcatgcatggtattggaccatatgcacgtatgcactgccgaagcatcacaagctagctagctaatcaactagctgcccatgcttgcatatgcacacactagtgcatatatgcaagctcttcttccattcaccattttctttgcgcacccggcacttgcacttgaccttgcaaagtccgttgcaaagacctcctcatacggtgttcgtccaccgtgtgcaaccttgtgtccaatcttgtcacccggtatccttgatcgctttggacctcaactcctccctgagtctagtcccgatccaccgttgaccaagatcgaccccgatcacctacacacacatgaaccaaacaaccattgtcttggcacagatgtcgcaacctgaccaatgttagtccacgcacacacttcttgcacttccggtacttgtcaatttcccatcacaaaagaactgtaaccacacatggtttcacaaagacattcaccgcaaccaaaccaaaaaagatgcttccgaatgctgactgaccaatattgcagaaaggctagctgaaaccacaacataatggtaattttccacattccagaagctggaatcatggtaatgagttgccaaggcttgcttgctgatttaattttttaaagttatgcataggatgcattcctcaattagcagacatgtttgcaactccagcgttggcatttgcttgccattccgctggtaataagcctgttcttggtaatattcctccagattacataagattttaaaagtaaaatcttggtatatagttgatgaaacgtgcttgctatttttggtttctaaatactcctcttaatacacattacagaaaaaaaatgctagaaatcttgaatttcacgtagtgaaaagaagaaaaatcatcgtcaccgcaatcacttccagttaggcggctactcatcttgaccggttgaatagatatggcgtaatagacatgatcaggtagtgatatgcagggagatcgagccttacctcgaactagtgcgccacggccgccgagggctcctcctccatccccgcatcgccggcggacgcgctcgtatcgtatatgtggcgccacgtggagacagtagtggcagaggatcgagcaagggaacgccatgcccggacctccttgcgccgccggcgccggtccacgcgcagcctgcctcatcgcggatcgtccggccggcggcggaggccatggctgccggccacggtggcggccgtgtgtcgcctgcttacgcaaatggagacggaggaggatttgtgcggcccagttatcatcagcaaaagagagccgatctcggctccaaaaaagcccacactaacaccaggcaataattacgcagcccgtatgagataaaattttttaggttaattagatccatgccactgtaactttgacaaattaaaaaaatgttactaccattcgtcatatccgctacatgtcactgggaatttttaaaattggaacccagggggaggacggccatggagcagggccttctcggcggttgttggtgatgggagcggtggagccgcgtcgggccgcaacggcgcgcgaaggcacgcaaggccggtggtgcggcggaggtgcaccgggcaacggggggcctgcaggggaggcggaggcgcgcgggtccgcgcaaggacggcagaggtggaggggccacgcatggccgcggaggccgcggagccgcacgtggcctcgtgcagtcgcgctcgtccaccgcctcgtcaccgacggcgacccacactctaccccatggtggacgcagctatgctccgacgtcgccgtcgtgctcgccatcctccttgaccgcttcttcgacatggaacaccgccaagcaaaccgacgacgtcggcctcgcgcggttggtggactttgccgacgtcaagcgcatcaacgacagaatgcatctatgggcgggcaagctagacccgctgctgctacaagggatgtatgaccagggtgccatctgacagtaggtgggcgtgcaggcagccacggggagcgcgagcagcgtggcggcaccgtgccacgctcacggcacgtggggccgatggagccggcagagccgcgcgtcgagcggaggaggccggccggcgcagacggcggagccgtggagaggagggggatgaggacgggaatagagacggcataagagaggaggatagaaattatgaccggagtggcatggttctaattttaataactttcagtggcatatagccgatacgatgaatagcagtggtatttttttaatttggcaaattacagtggcatagatccaattaacccaaaaattttacagccaggtccctcaatgtttaaatgatatcccccgcaaaaaaaatgtttaaatgatacggagtatatggattgctaatttgctatatcattcctaacgatctggttatttacaaccagtcaatcaggtctccatttgggatcgctatatggtaatgatccgaccttttgcaaatcaactccacaaacttttttacacacaggtcaaatggagaaactatttaatgtaaacaatctgaaaactatcgttaattcaaaaaatatatatacgcttgagatttgttcatgtcacaattgcgagtaaaaatttccgtgcatcaccaatgcatcctcaccgcaaaaaccatggcaaattcagctgtaattttactcacagttatgacgtggaaaaatattactatacatctatttttagatccaacagtaaattttcactgtatattttccatgttgtgggtggacaggaagcaaatcctctaacatgaaaccctacatgtcaagcaccatgtttctctgactggcccacatgtcagtcaccacatattagcagaagaggcgagcgccaccgtcgtctctacctttactcccgccattgagtcggcctgcaccttgccatctccgtgcccatcttctccacgcacaggtaggcgacgccatgtcccgacctccagaacacctcgtacgccgccgccgccgacgatccatccaccgtgccatggacgtcgtggcagtggcacaggcgatcgatggcgccaggcagaagaaactcatccacctcgcgcaatccgatgtccgttcgcacggctggctcctccctcccatcgatcgccacgaccgcggcgctctcggatcctgacggcggcagctcctccggcgaggcgtgcggcgcgaagatggccgtcacctgcagcagaggcggcggcccggaat

SEQ ID NO: 8850 - DNA, 21619 bp, Oryza sativa
ttccccggttttgttcatcccgcgcgcacgggtgatcggaacgagcaggtgcctccgaaactccgtccgcttaagaacctgcacgggtaggcgggcgatcaagtttttaggtagcgcttcaagtgcgactgccttgcatcatcttcaccaacatgtcgacaaccggtgacaacaacaacaccggagacaaggagaagacaatactgcctcaaactccagcggagggccattctcggggtataacgtttcactattaccattcgttcttcgtttcctacaactgtctgtcgcaatattattgcgttctcttatctatgttgatgcttattctatattaagcatgctcatgttgtacacatctagcactgtcactagatctactcaaattacaaatgtcatgtttattgtcttaatattttggattaaaatatgccgaattatgaccaaatttccaacaggaagtctgttttaagggggaaaaaaggggctggcagcttgcacacaaccaccatacagaatagacattcagtttggacctgaaagtgaagattgctatctggtgtgtttttcctctcctcgagttttgctttactaatatcagacagtcagatactttttgttttccttgatcacaagatacaatcacaaaattatgattcttgcagcctgtatccatcgttgttacatctaatcgaatctgattttagtaagtcggttgtttttgagctctgcaaggcggctactcactagaacctgcccaagaacatctgattctgaacaagtgcagaaatatcgctgctgtcagcgctcatgcagcacaggtttctggccccaatataatagaaaacaaggacaccaatgaggacagaggcgagtggcacagtcagattgtcgtccaagcgtgtgctgatagggagcgactccacaattgcagcagaaagcgatgtcacgccaaaggcaatcaccatggtccagctctcctcgacaaatccgaagaggtggaagtagcacatgtacctggcaaatactccagtagtttcagattaacagctaccaagacttcagtagaaatgttgctattaaatagcttgttgcttacaggattgatgcaaggaaaccagctaagaacattgcaatggatccagcgtaagatttgtcagggttgtaaggaagctttatacggcctaactgccttccagctatgtcagctacacctgaaagaagcaacgcagagaattcggttgatgtctgaaacttttcacttgatgaatgaaaagagcagcccaaaatcgatagaagagtatcagcagaaaatttcaacttcaagctaaggccataccgtctccggcacacaagttgcaaatcacagcgattgaaatgggagatgtcctccagaaaataacagtagcgagagtcatagcacaagcgtagtacagtggtcctttaagaagctctctggaaacaaaaggaaaaggatggaaacggttattccattagtgaattaggtacacgaacagaactttgatgcaactatgatgctttgcaatgaagagaaaatctgtatgtctaaaaaaaaagctccttttttttgcagtattgtgagggaaatgaaatgagtacctagggtctccgttcctggtcatggagttaatgacaccatcatctttgacaataccaagtccaatcaaggtaacctttatgatgttgaatgcaatgacaatggaagcaagaaatggagcatagacatcatccgcactgcaatcaggaagagtacgttgtcaggaaggcagaaacacacttggtatgactatgactatgacaaaattaaagatactgctagtatattgttggtctggaactcgatcgatctggtttacctgaacaaaggccacatgaggaagtatactaagccaacagtaatgtgcacgagtttcctgcaaagtttctgaagatggacggcaaggagatactcccagttaagaatcagcaaatacgaaacaccatttgctgcagtattatatgtgatgtgactaacactggatctgacacaaacacctcaattagccaacaaattaatggtgtacttttggaaaattgccggcagctaatagggatctaaacacacttgtcatatcatgctacagagagctgaagtgaacagtaggtgaaggaagaagaggtgaggtgacatggtccaatagagcgcggttccagacctctttccagaagcgaagcacggcgagcgcggtggctccggtgagcacggcggcgccgggtcccggagcacctgactctccatgggtgaatcaatgcttctcttaccgccttggccgccacaaactcaatttcatttacttgtagttgaccttccttggattgtgcaagattggatccggacactgctgtactagtaccgctagctgacgatgatataatattcatcacgcttctcatatgtttctatattcttatatttcacaaaataaagttgagtttatttttaagaactttgtatgcttgtctaatactaccttagcatttcgtgagattatttttaaaattggttgagatataaaattgagaaacatatgagaaaaaaaaagaggaatagtgtatttttaatgatttgttaattttatattccattaataaagtcgagtttgttcatgcaactttgtagagttgtttatttatatattacctacttgtgtgattcttttaagacttcttgagagattctatagaaaatggacgtcactaggtagtgcattgtagtgctttagttctaaccgaagaccactctattccatatataattctcctttagcttatggtgcatgtctttttttaatctatttaatgacttatatcttttaaatcacatattccctccatcccataatataagggattttagagagatgtgacacaatctagtacaatgcatctggacggagagtctgtccagatacattgtactatgatgtgtcacatcgctcaaaaatcacttatattatgaaacggagggagtattattttcaaaatctatttgcatcattgtactctacataaaatatgtgactaaacaagatctatgttgaatatattcaaacattttattaatttaaaagtaatttatttaattgcagaagtaacttagcaatgaactagaagtaactctctatagcattagaaataattacattatgactgagttgaaataagaaactatgtagagtaaattcacaagtaaagtgtagaaaagatttttaagtaaatgcatttatgaaagtaaattcaataaaatctaaaagtaatttaaataaatcataaagtaatttagcataaaatggaagtaaattgttacaatattaaaagcaaattcgtcgtagagagaaaaatatggtctatctaaaaattaaattaaagtccacaaattatagaattgactaaaaacaataataaaaataatcaacttagagcattatgaatgtataagaagtaatttaatcaaatcgaaaagtaattgttatatatgataaaagtaacttacgtatataataaatgtcatttacaaacataaatattttttcatcataatataataatgtaagatcttgttgtaatgatttaattgtaacgaacataatggtgtaattggattattgtagatcggataagtaatttgagagaaaattttataagaagggaaaaaagacatgcatgcataatagcaaagaagacatgcatgtctatatagatgtgtagtctttctctgatgtatgtggtgtctccaattaagactaaatagagaggcctctcagttcaatacaatctcggcgcatcgccaccctttttactttcgttctatttcgacgagttcttactttcgggttgagctgcatcgattcgatcttcaactagaggtaagcttgtcatggcggcttgcgttctcggggttaatgcttccatctttatgacactttaatcctgtttatgtaattcgtcgagttatcatatacacgttgcaatctttgttagttgcactatataattttttatcggctggttcttaccattaggaagtgactgatagggttatgtattgttattaatctagattatatcgtgtatctaccatctcttagaggatttcatcatcttgcctagatcttatacttgtctttatgcttaatactgcatcggttgagttcgatctattaagtaatattcataattatgatatatggcttgctttatgatcatcgaaagagatagcatcggggtttcagccgatcttacctgatttagctactttatatcttatatgcttgattgatatgctaaatctgccctttatattaagatcttatcgcactaaagtatactaggcttcttgtttgatatattcttcctattttaatatcttaatatagagtagcatcggagtattagccgatacacgctagatctatctgatcggctatgctataaacatttataacatttgtgttaatgtatacttcgacctaagtgatttatactatctcggcatggtgaccggtctatccccatcacttagtttaattatacatcgttagaaggattatattgtcgttaatatctacaggccgatcgaatagattcagtcttatcttatttacctataactgctgatcgattccaatatgacatcggctcgaaaataaatgatatgtcatcggcaacggctatcgtttatggatttaaccgcggttttctcgtctttctttcttgttgattgcaggatcaaatcaactggcacgctcacgaacctaaaagcaagattttggacctgcactgaagttaagcagatcttccaggccagtgtgtgtttttcgcatcaacacagcggtggagacgaatggcatcgttgacccctatgctaaaagggcatcgtgccaggaatggagttgggcccctttgctactaggatgtagtatgcaatcaaaggacataaaaatggaatcctctcagaaaatagaacataacaatgatcacggtttgtttggagatcttataatcgtcaagaaatcaaatcagtggaagaggaaagattagatgaagagaaacaatgggggaaaaagaacagctagatagattaggacatgggattgatttttctgaattttatggatttttcatgaattatggaccacatttgaatagaattttgaaaaatccaaccaaaatctgccaaaactcttccatcggaattgggtgttatctttttaaaaaatatatggtggagtgatcgctagaatgggcacacccagtgcaatttttctaggtccgccactaggtggggtcgatgtcgatcatggaggtgggaggcacggcagtgatggtggaagacggaggccagtcagcacgccggtgggctgcagcgcacaacggcagtgggggtgttcttagggctgaagggtttgcggtggtgccacaggcctaggtggcgatgacggtgatggcgctgatgttggcaaaggtggtgggtggcaatgttggctagtcagcttggcatcgcactaggagcaaagttgagcacagcggtgatggaggtccgcggtgaaggcggcgtggttgtaacaagacaacctatgatagcaacatggtggagtttgtggtcgatgacaacgtttgtggcggctctccgatgagataagctaaggcagctcaacggaggttgtggctcatagcgatgacagcgtggcagtgacggtttccggtgagataattaagcttcggcggcttgacggagttgaggttctgcaacaaggacggtggggcagtgtgatggtttgcatgggatgtgaccatggtgtagtgatgcagacttttggcgagataagctacgataactctatagatgtggtatcctactatgatgacatggcggtgatggttgcgttgacactgagggagcatacactaggcggcatgaggctagtgcttgatattgacaaggctgcagggagggctagttctgcccctgtctttgctcacggcggatggagaagcttgaattggcagcgagagggcatggaggcggaagggaggattagttccacatcctccgaagtttgcaatgacgagggaaaacttggagctagtctcctagtcattttcatttcgttttttttctttgtatctcaattttaagatgttgagtgtatgcactcgtgtaacttttgcctgtgtatatccaattatggaatggatataaaggccggatttctatacattatttaaaaagttatcgaatatcaatctttcaataaaaaaagggaaatacaaatactcaaccaagaggttcaaaagaatcggcagaaaatagctaaggaatattcatcctaggccttacggctgtaactgcttagcacatccacaaaattttctgatggcattgtcgattccacacaaccccagaaaatgctcaattagcaatctcagggtgatacccggtgttttagttcaatcaagacatctcccctacaaaaatgggggaggaaatagttcagcattggcaatgatttcacgctgacatatgctccaggtccaggaaatttatagagtggcttcgcaatattttacatatataagtttacatactttttttacactttgcattaattctaagagttgacatcaaccataatgataaaaattagcaaacctgcctaacaagcagaaagttggatataggaacaaacagcattaactatagctgtgtcttcacctggaagcaacatggtaaaccatttcaacgtttttcaatgaatagaactaaaggaaagaactggtcatgcaccgaacaaaaccagaagctgctacggttgaactgaaattgttagtcctagcccttgtttagttcccaactttttttcaaactttcaacttttccatcacatcaaaattttcctacacacataaactttcaattttagtcaaactttcaattttggtgtggaactaaacacacccctagataggcggtgcataaaactatcagagataatttatgagttgcatggagatcgaagtcagagatctacagtgaaaaacacaaacagtcaatccatcatgaaccaatacactgtcaaatagttaatttcagatgcacatacttggaccagatattcctatatatagatctcaaatctcaatatatagcatgttctgtcaaaaaaaaaagaaaaagaaaaagaaaaaaatcattgtcaaacatgatatagagtgtttaataaggtgacttataggcatgctgttgagtagaactaaaccaaaataaaatagcatatagtagggggagctatagatctgcattactctctaaaatctgtataccaataattgaaattgcatatatacctcactaaacaaacaccaactccttagggaaattaacataaaccacaattattaatgaatcagtagatagatcaaccgggatcagctatattaatcaaaagatacgaaagataatgtgcaacagaaatacaataaatttatgtttatcttcctctagatacatgcgtaaaaggacaagtaccacaaaatatcaccacagtgtagtcatatggtgagatgaagagtacttgtccctgttgcatgagttttcttctttcctaatttgatttatcatccacaatgacatatgatctagctagtgatatctgatatatcaccagggaccagaccagtacagcacagcaatatagtagtggtaggactctgatgatgcatctttcaacaggggagacatgatcagaacaaagaaagagagagcccagtagcacaactctctgcttcttgatcaccaccaatagcaatagtagtatgatcatgatcttcctcatgtttcctccagctgatcaattctctcttcctcttctcgccccgcggacagatatcgagtgagagatcgagattaagaggacctccttgatggttactaccctcattgtagatcatctctttcagcactactggtctttgatggttcatggtatgatcatctggagatgaagaagagccttggacaaaatctggatggttgctgctggtattagctctagcttcagctggtggtggtgggtaatagggttttgatccaacaagcaggtgatggcctgcacggagccagtatgatccatggcatctccatggggaccatgcattggcaaccctatatatgtaaatatatatagtccattattagtgatcgatcggcgtcaataattagtcagaagaacaagttaagtgtatatgactttaggagaggacccatcggcagatttcaattatgcatacaagagtgtgctgcatgccagacaaataactaactaaagttgtctgagaaatttaatggattttgtttgcaagctagctagagttgcatgcatgcatggatctaacaactacctggactgcaagatggtaccggagccagcagtgatgtggcgatgatgaagagctgcaggcaaggaaagatggccaaggttgtacgcttgtcccccgtcaccaccaccttgcatttgcagatgatgatactgctgttcatctgaagatctccatgagccaccacctatcactgtatgcacaaaatcaatcaacatgttcatctgaagatctccaacactgcatcttacacaaaaaaaaattaaaatctgttcatgaagaattaattggtcatgtctggcacataccctggccagactcatcgatcttcttgcttctatacatctgaaaatcgaacatatggaagaaaaggcaacatggattaattttaggaaattaagaggaaatactactactgacctaaattaattaataagagcataagaaacgaaacaagtttgttaggtataatatacctggagatggctcttgacatggcctatgctaagccctctaacattcatcaactgaagaacgagcttaggagttgcacctataggaataattacatacaaagatgaatagtgaaattaacaacaggagcagattgaaatgagatcgatgagtaaataataaaattagtaatcgatcaatatatagatacacacatatgcgcatgtttagggaggaataattaatatcagactgaaccggaccgaacatgatgaagcttaattagctatggcaaatagataggtcggattgcttacgatcttggccgccgagcctgtcgacggcgcggacgaaggagagatggagctccggcgtccagcggaggcgagggttcttggagcggatgtaggggcgcaccgacgacgacgacgacgtgcgccgctggctctccccggattcctcctcctccgtagtactgctcgtcgagctcccatcgttgttggccgccgccgtcttactctcggagccctcctccttgcctgcactagttttttccatgacacaagctaggaaattataggaaggatcaccggccggccagcagccagctctgatcgatctatggcagcttgacgatatgatgatgaagagagctctagtctcgttgctgctgctgcatgatatcgccgccggccactgcactgatatgatgtcaaaagaggctataggagaagccaaaagctgaagctggagctgaggtcaccattcaattctatctatctacctagctacacccatatatatgtccagatgcatatatattgctgcctttttggaagggattgagctaagcatgcatgctcatatacaagtaactaccaatctactccagtagtaattaaggtagctagctaggtaattaaaggcagcaggtggattcatgcatgaggagaagtaggtaaatatataattaagatccagggacagacaatcttccaagaagtagctactccagtttggaattggttggaacttactcgatccaaagtctttgataggtttctctgagtcttacttgtagaattttcatcgatttctaacttgttaatttcctttttgtctcttagctagtatagtaagagcagtggactaaaggacccagtgtgaaaatgagagatggagaaaagagtccaagagacaaaattcagatgaagtatgaagagttccgggtctttgactagctccttgcactacatgccattttgtctctgtgcttgtctatgtgaacgcacgagtttttagtaatacttctatgtaggaggatgtacgtgtcaattgtcctcccgtcctgatatactcacgtaatttattttgtctacacattgtaccaatttttatttttaaaaaattattactcctaaaatataccatttttagaaggtgacacatgcattaagaaggactagaaaaacttatttgccttctccagatagttgaggtatatgctcggattataatagagcaagaggatattagcataatataatagttaagtagcaaaagttactttttacatatcctaggttgctacatcaacaacaaaatttgaactatcaaacttattattattttaggacggagggtgtagcatgtaaagtatatatgtgtgcttgtttcaattctaatattattaacataccaatgggtattactccaggacacctcatcagtatcggttcgtaaggatcatctatatatcttttttttaaccaagtataattttaccagtagtgaggattgagggggtcattaggacgggatgaaggtagaaaaccccccctatcagtgtttggtattatttaactggtcctgatagggcatcacacattttagccggttccatggcagtgatcaagtatatatgaaggtttaagaattagttggaatttcatagaaagtcgatgaaaacataaaggttgcaaagataatgtaaggaatgagtcatatgtatggactgaagaaagggaagatcatggtggttggcaaaaggttgaatgcctttttctagccttttgctttcctctcttcctggccccattgttcagctggtatttcctgcaggatgcatatatacatcaatacatgtataacacgtcagtatatctcatcatttacagttactctgatggagtatattgctgttgctgatgtgtactagtgttatttttcagttgagtaatatgccaagccaagcttgtgaaaatctccattgtttctttttaaaaaataatcatgtacccaaaggtttttataaatatgttcctttacatttttatatatcctttttgggatacaggtgttttcagtagaattcccagtgatgcaatattgaagtggaggaatctcgcagaataggtacaattgggatttccgttagtacgaaagcattactacaatccctcaatccctgtatgtgtgtattagcatacggataaccctgatgagtctaatggacacttcaattaaagtgcatgtactctcaacttcagaagatgttaatgtagaggtgaggtccatcattggactactcagaagacatcttaactaaacttttgaacgtatgaatgtaattaaaccagtagcactttatcttttaggtacattttgtacaacattaattaattctccctattgaccagctagcctgtttttctttgatacaaaagaaagagagaaaaccggtatatcattgttgaattgttgcctggtggcatgcttgttctctgaaaacttcatgaagcatataagcatacaacataggtttgatatatcaccgtttcaaaaataaggaactaataaagatcagctggcatgatgattactgaacagagagattggagagccatggatcagttacatcagtaccatagcaatgcatattatttgcccttttctcattattattccaatttggtacaatgcaagttcttccagctggtacctctggtttcaaagcaaaagagatctagctttttcaaaatctacattaaaaaccttctttttctttatcattccatttcaaagattaactaaccaccatttgcgaggaaaaattaactaactcactttcctaattagagaacatgaatgctaattatcatggagaccaattggaagataggaaaaggatcaagcttaattgccacaataaatagcatttcactgtatgacgatatcagttaattatgaccacagcactaagaaatcagctggagttgtactaggaattagctaggccttgttgactaacagaaacagtactagcatgagcttatatatttgcaaggccgttccgttcttagtttgtactatgactcaaccaactaattaccacctagctgatttgctgcgtgccgattagttcaagaattagagcgatacaagcagtggtgaggaaataaaacatgtcagctgttccaatgcagcatgcatctgcatgtgagaaatctagacaagagaataataagagaaaaagaaaggagcacacacatttgtcatatcagtccggcaagttcaccaaccttttgaatagctgaataacagaatttggtggtttgtcaaacatagtggctggttgccttacctgcacctgcagaaaaacgttgctgctcttcttcagcacctgacatgtattagacatgtcaccatcctcttagaaatcggaatgtctccaatctccccaactgcttgatcgacgaggtcacggcattagtcactgaatcaaattcagtataagctatgatactttttgtgcctctacatatgctcttctgtctgagaaaagctattcttcccatgcatagggcatagaattgttcccgattccagaatagttgaaaacagttaaacatgtttccatcatgtattccaaacaaggtcttcacagggtgcactgtatagtgtttctttgatgaaattgcagtgtaaaatcttacatgttgggactcatattagaacatgtagttccttttaacattattccaacaatgtacaacaccatatgtcgtagcttgcaggcttgcacagtcgattttttttcaccacagctgttctattgacaatgatacttgaacagaattatcatgtgactatcacttccactagcatggagaaaagcattgcaaactgatgcttctcacgactttcatttccgttttgattgtaaactttacaggtgtcaatatcacatcatagaccaggacaagaattcatcacccacagtttctgggcccttttttctggagagattaattgtggaggaagaaaaagaccaagagctgagggtcatagtgaggggaaaaggaaaatacagctattcatcttgtggcagaaagaaattagggcgaaaaaaagttcaactgtatccccgccttcccgaggtcataatcaaactgttttaggatgtggcagtaattcacctgggcaagaggggaaaaaattcattcagtaacaaaataattcaatttcatcagttactttagagggatgtcaaagacaaacctctatgcgaaataatcttgttggcacaactacaccaaatcctgcagaactcctgaatgtttgtagaaactcagcaagagggaatttcctgagatcaggctctgttagtttggcaagatttccagctgagacaaatgcatggccatggattcccagctccctgagaggcttcagaggtatatcaaatgacagatcagcaaaggctgtgaccgcaatgtcacctccccgtgcacttagctcaggagaagtggaagcaacattttcagaattctctggggtactgcttcccagtctgtccccagccctcttttcttgaaacctaatagtgatgatggtccacccaagcggcacataagagacctattgccacccaagtagaactgctctgaaagtggggatatagagcccgtcgatccccttgccaatgggtggatgatcccagcagccactccagcattaacggcgccattcaacacacccagcggtaaagccactcgaagatcaatttcctgatataatgtgaataaaatgagtgatgccagtgaaaaaagaacaatatgattcctgctagctctagtagtttaggcttgaatcagaacagttgtttaatatgaaaaaaattcagatgtcgagcacattagatattataaacagagataccaagttgtgccgttcaaaggcaaagttgttggtttctgcagagactaaaaagaaagggaaatgccacgaaagaatttggaatgcttgaacaaaacatttaattccagaagtctttggtactttagtgtcatgattcatatcacacatgaagaataaactgcttttaacaggcaaaaactatggagcaagtcatgtgatttcccctttcaaggaagtggcagatatagaacacaaaggtaaagttgttcaatatacctgtctaatgtaacgtgcatctttgctctctggtgcaaggcctccaacttgagaagaaaatagataagcatatcctcgtgtcggtcgaattcttgaatctctctggtcaaccttgtatgcatatttaatagaggacaaaaggctatgccctaactgcccccttatggaattggatgacatcagtgctcggtctgttatagttcgccatgacagattgtaagcgaggttatggttcatggtggagagcaaaccaacagaaacacccatcatgtgttctttgagtgaggacttcaaccagtcctcagagagaaatgatattcgagctaccagtggagtaggtattgctccaattcttggtattgccactccagtacttagctccactgtctgatctaatccaagatcaccggatgcatcccatgtctcacaatatccaaataggttcttcaacttcactgaaccttgaaccgaacatgatctagtctgcaataaattcaaaaggaattatgcggatgacacaagaagatttgaaaagcaattgaaatcatgcagcagatattggccatcatggcattttctactcccagcaaagtaggttatgaaactcgattcatggttcactagtaaaattgcattagaaaaaacaaagaaactgcagtggacgagttattctttattctccaagcaatcaaactagtgtaattgaagcaactaatataaccatatgcgcattttagagtagtccttaaagagagctgtgtgatttccacctaaaagcaacattgacacattgaattttatcgaaacaaatcgcattgattgactaagagatgcgcttaaaattttcctactcatgttcatcatcaaagtcatggtaccagcataacaaattaacacctgttgtctgctgagatcaaaattatggtacaacattgccttatttccatgtgaaaaaaaaaacacttattttcgttggaattggctaggtttactcttgttcctaatgcgaaggaagattgttcggtctaatccttttagaaactcaagcaaagtaagtaatcataacatggatgttcaattttatactagaaaggagagattttcagtaggaagcgcatacccctttgttagcgaagatgccgagttcgccggcggcgcggccacgagcctcggcgacgtcaacaaggacgatgacggcagcgttaccggggatccctggcggcgcggcgtcgagggtgatggacacggtgtcgaaggcgccgaggcgacggatccgatcggcggcggcggctgcagcgcgcacgaggtctctgacggtggcggcacgcggcaggtccgagccgaccgccgcctccaccgcggcgcggcgcgtgcggcagcagccccggatctccacatcgtgcacccggatccggacctcctccgcggtgaggcggcgcaggacggactcgaggcgagcctcgtcggacggggacggggagggttcttggtcatcgtcctcctcgtcttcgtcatcgaggtcgtcgtcgtcgtccgtcttggaagtcgtcgtcatcatcctcttgcaggtcggggtaatcttggacggaaacgggagaggatgcggtggccattggaatgttggacgatcggaaggggatctcaactgaattgggagacgaagacgacgactctactcactcaaactcaaggatgccttttcacaagcaacgaataacactatcaacttcctcttttggggtaaaatttatgtagagattgatgtttgcaattcatgaatttcacaagtttttctttttaaagaaacaaatgcatgctagaatatgtgaaaaattgctatgatccatatggtatagaggtaatgcctttgatactttttttttcaatatacaaaagatttgagtatcactgtattaaactgaagggaaatgtttacaacgaacgtgagaaaaaaaaaagaaacacaattcagaaatcatctcgccccatgagttagtgagcacaataaaagaacaacaacttttttttaaaggaaacacaataggagagacccccgctgttagataaactttgttaaagaaataaacaaaaagattacaacatcctaatccagttaagaattactcatctttatcactttcattaagcctaaacaataacgggagcatatcactctaaaagagatcctccaggaaactagggaatgagacttattctaaaaaatatagtcattcctttgcttccaaatattccaagctcccaacagaaagatttccatgaagcaacgattctgaaaagtgcacttagtctgcaatagcatatgatcaaaggacagagaagtgtcccaaattatgcccaaagagttctagtagctcgccgaaaaggagcaaagaaagaacatatgcaagagatcctccactgattgagaagaacaaagaacacacggtaggtcacagtttggagtagtataatgcttatgatccagcatatacttcgtattcaatctattcatcagaagcagccatccaaagacaacaacttgctaagctcgtatttcggttgatcttcgtagcgttgccttaaacgctgggatacgtcgcctaccactgaaagaataattagttgtaaatgcgaatactcacgtcaaatctagaatttaaatccaggtggttggttccaacataaccagttgagctacgttcactttctcgttgccttgatatttgagagaacacaagcaataggtgtcttattataaaaaccatgccttacattgtcgcatgcatgctctaaatcataatctgaaattacgtttacattgtgtcattatctacttaaataacttcactaacatgcttattggtactaataagttactccctccagtttcttttacaagatgttggctagttcaaatttatactagccagcgtcatacatatatggttggaggtagtatatagtacttcaaatacacacaacacaaagataagattacatatcggttaaatgctagtatttatttcctttttttctcacctttacaaacctgcaaactcatttctgcaaagaaaaaaaaatgaaaatatgttgcagagtattcctaatttcctactacaccctccgtccaaaaaaataaatctagcactagatgtgacgtattctagtacaataaatctagacagagatattccagattcgttatactataatatgtcatatccaaatatgtttagtttcgttgtattatgatgtgtactatgttggttttttatttgacggagggtgtatgataccagaaagaagagaaaacacactgaatttcagtttcaggctttcaaacgcatatgtactctgaaactaactgattttggggcctcaactgaatttcaggcggtttcggaggaggcgatctcaagctccgcccaccacaggggcttctccctcggcgccgcctgctccggcgacaacccggcgatgcccctcaccagcctcgccacctcgcccatgcttatcgctctcttccccgcctccggcctcctcacgcactgccgcaccacgtcgcacagcgccgccacatctttctccggcgcggcagacgacgacctcaccagcgtccggtcagccatggcgctgagtggcctcttgccgtccaggtagctggacgcccacagcaccaggagccggtcgtcctcggagaatggccgccgcccggagatcacctccagaaccagtatcccgaacttgtacaccacgctttcttggtcgtcctgcttgttgatgtcatccttccagaattcgatgtcggcgatcttggctgcgttgtcctcggtgagatagatggatgatgagctcaaatttgttgggagaagaggaggaggatctagctggctcatgtgctccaggcagtaggctactcccattatgattcgtagccgtgttttccagtccagatgttctgcttctctgactgcaaaaccaaatttacacatacaacaattgccagttacagtttgtttgtttttcagattaatcaagatcgaacacatacaagaaattattattaggaggcttactatgcaaatgctcaaagagggaaccacatggagcatactcgaacaccatcatcctggtgaatggctcctcgcatgcgcagtaaccaatcaggttcatgaagttcttatggttcactctggacagcaccgagatctgaaataagaacagttagtactatactctaaaattatgtatgattttcatcattacaacaaatgagtaccttgttcctgaattgctcctcagactgagctgaccattgttgtgaagagttaactgaagtggacagaacagctatttcaactccacttgacagagttcccttatacaatgtgcattcaggtaaagtgccgatcacattgatgaaaccctcgcatgccgcctccagttctgtcctctcaagagaaggcacacctgcacacaaaggtaaaacatacttagtatactgaatatcagtaaaatgcatcaggcgctctctggcttgatgtatcatggatttgtgacttctgtagttttactattgcagaaaacaaatttctacagaaactgacaagttcatttaaccatgaaatagtcttaacttctgcattggtaagatgatgatggaacagaaaaaccaacctgttacaaatgccttctttagctgtccactcagccctgtagcccatggcatgacagtattatccttctttctacgggagaagaatacatatatggcagtagctactgctgcaatgaaaaggactccagcaacaggcaatgcgtaaatagcccaacgaggtaccaggtgtgatgctgatgattgaactggagatgattggcttttggggtgtgtttgtgtttgattagaagccagctccctggcttgcagaagtcgccttggtgtggcattgtgaacagttctaccaaaaaaagagagagagagagagagaacataatgtgttagaaaaaaatgttctcggaaaattgattcaccaaatgactagtatatttgcaaattaaatttgataacggataatctatcaagaaaataaacatttatagccacaaagaagcctcactttgctaaacattttctgcatggttcaaatcctgcactgtcatgaggtacagactctgaaattgagctatgctctttcgattcagatggtgtttcactggcaaacatgttctctttgagtaatctgcagagatcatcatagtgcttaagattacatagtacatcagaaagactaaagctccattaaaatgttgttattcattgtaaagcatcctatatttacagtgcagcagccaacatgtgatgacctatataacttctaatgtatcttatataactattaacatgaagtacaatgatctgtacttgcatcactttggaagcattttcgaccgaattacaataaccaaagtcattcacctattttgaacagaaattggagagtagataaatctaaatgtgatgaaagtaggacatcaagaaaatttccccttgaaaaagagctatgttaatatgtaatgcatccccagcaataaatatctaacatgaaagacatattcaagagcaataaataatttggatccatgtttcagtttggtagaagaggaaagattgcattaaagcataacttacaagttgaacactctgccaatgagcttcccttctccccaatttgacaaagagccaattgattggtcttgctcactctctctataacccggaagagctctccctaaagcacaaacttacatatgttcaggttgttgcaatccaaatccacttgaagcaaccattctattagcccctttcagttcaatctttagcaatcaaaaaaacatctcaccttcttcactgtggggagcacaggacccaaatcttgcagtgacaagaaaggagaacactatgaagtaggccactctaatggcccatggctccatttctgtcccgatctaaatttttggaagagctcgaacctcttgtttcttgtgcagaatgttaaaggtaagtaagaacaatacggtgattacgggaaaaacactgttaggaggggaaatgattcggaattttacctatggagtgtggagatggggctagacagctagtttgtccagaaagctcaaatctttaggattgtgaaagcacacatgattgatgattccataccacctcaagacaggtattaccatgtaaagaagcatcgtcttccctcaaagattgaaatcttgatcttaagaattacaaaaaagaaatggtaaataagtgaaacaagagagtattatgcaaagagtcgaatgaactgagcaaacaaggaaccggacactgtcataaatctgttttgcaagtaccaaaagtgtacagaggtagttacaaaggaaatcgacaagaaaaaaaagccaaggatggtacctgtaaagagaggaatccaattccaatccactctatagtagtaggagtagtaacttccagtttggcatttctcctggctctcttctcttggccggtatgcagttggaaaaaagataagagacaagcacacaaagtcttgagcttccagagaggagagccaagcacaagcaagaagcaacgtctcaggaataatcgaaatggtctctggagacacatgcgaacaaagaaaacttgcaggcagcttggattttcgagcacctcacctgtaaagctttccacaccacgagtcttgagttaacaaaaaggaagacgcggcatatccttgtctacttttgtgtatcgattggagccgaatgtctgcccttctgcagtagtagccctgcctgccaagtactccagtattagtattatactactagtgtgcaggttagatatggcaacggcagattttgttttaaagccagcttatggtgtgcagaaaatgaacttctgttgggcacataaccatttgttactagttctgctttatttaaagttcattttatgtcgatcgggatagtttaattatcaggcagttcgcagcttatctactcgcatggcaatggcaacttggttggtgtcctcctatcttggctatgtatatggcttgctgcttcctactaaccagctagccattatatatcgataagaggatgtagttgtcctaatagcagtagccatggttattgtagtaaatagcaaacgcacttccaactctttcaaggtttcattaatgcaaaggtttttttaaaa

SEQ ID NO: 8851 - DNA, 10053 bp, Oryza sativa
ccctctctaatttgtggtcatctttattttcaagagactcttgttgatctaccgtaccaatcaacagctagctaagcagagtgcgtgattgtgattacagtgttgtactcttgtgcgcacaaggccggttaatttaatttgttggtttaactaattaactgtcaacagattgatcgatcgatgatgttgcccgatcgtccagccgatagataaatcctaacagccaataatatagtatataactggaccactttgatatcacggttgcagcagattttgatatctcgtccattgtctgaggaatttattaaccatggattttgccctgaagctccgcccctgattatcatgactagctagttcatgcgttcattcaggctttatataatcatgcatagcatggactggggaatcatatatatgtacatggatcgatcgagtaggatgcagaggtcgtcaaaagagtgggacagaccgagaaaatagacagtgctctgtcggcaattaaactagctataacaatctttattaatttcatatgatctgtaggttactcactttaggtagctaatggttcaaaatcaatcaatcaaagcttcattactattatttgttagtagctagcatcatatatttaataatacaaagtcgtttgcaactaatgcatgcgtgccttcgcagctagcacagatcgaaaggaatatataccactccttacatgacaagaacacagcgacctgcagacattccaagttgaaacgccctctaattggacttgtgcatgaagcaatccatatttcattcgattcaattcatgtggagcattaggtacaattcatcccaactgctgctactgtgcacatcgatctcaatcttactaaccttctaaggctcactagctcaccagctgatgtaccaccaagcagtaataattgtaccattctccacacttgcagatatgttcatcattttttgctcaaagcatgcagctggtgtacacgatcatatacctgtcagagacaggtttttttatatatataaagaaaacggcaacattgctatccgattagcaccatggatgaccgtactgtacatgcatatatcttttctaagtttttcagcaggcaagcattcctattagaccccacactacttatatattgggacaggataccaaacaaattaaagcaaatctcaccacagaatttttcacctaaccctttatatttttggtctttggaggcgcactcatttcatgctatgtggaaagaagagatatgcaaaaggagtctactaacactgagtagcagggacattaattaatttgaatatccaccgccaaaccaaattgatgctggattaatgttttgatttatcatgtgccgtttacctctaggcacctgcatgcatggtattaaacaaaaattaatatgtcttatatatccactccattattgatccccggccgtacttttgccagaaaagaaagattggaaggcgaataaaagacggtgtggaccattattaattgtccatttctaagtaaatccaagcgcatgctggctggtggactatatatttcactcatcttctgctatacatttgcgatcaaaattcacaactttattattcagaaaccagtcttatagagagaaagacagaccgacatgcatcagttgtagttgttcagaaagatcaggggcgccgttgcatgcacatcgacgctgggaccaaaaaaaatatacaacatcatcgctgactcagatgttctgaaagtagctaagaatgtacacatgtaaaataagtatgatcatttctttgcttagtggacaaagattaccttaattatatatatatctcgttaatgcatgcatgtttgataaggaaaagatttctttgctgaatgctcaccatcaacttttcgtggcctaagttgcatgtgaatctcatcatttttacaattgatacacggaataatctttttggtacatgtttggtgcgatactgtggtggacttgtagatagagaggtgtgtcggtcaccagaaaccagcactctagctaccacgaatcaccttttaattttccctgtttgcttttcgttagccaaacgaggcacagtatgaacatgataattaagcagcaagggaggatctactgtagatgatttcgcaaattcagggcacagtacatgtagcagagggaccaacattcacatgcagagccatttcagtttcagtactatctaaaaaggctaacctgctctcatgctttgccatgaataatgatggagttgttgcatgtgctgagatgatgaatgtttcagatgaatatataagtttcaccaccacattccaaacaaacacacaaccattccaattctattctaacccatttataagctccttcattggaggttagcccaagggtcagtgttgcttgagaggtactcaccctgtgcaggtgccagtggactcaggccatttagctagctagccaaagccaattgccatgtggagtgctctcttctcccatctgagagaggttcacaagagaagcggagttaaggaggagaagttgataatgaagtcgccaccagcagcaggtgaggccggctgccacaagccacaggcgactgccaccaacaagatgacggtgctgcagtccccgctggggctcaggaccatcctcacctccctcgtcgccttcttcatcgtcgtcagctccgtctccctcctcttcgaccgcggccaggatgctcaggcgcaactcgccgtcgagcagcatcagcaccaagaagttctgctcaagcagaagccggcatcagcagcagtgggcgagcagaaatcagtggtagtagatcagtcgtcgttgaggagccaggaggcgcaggtgcagtggacatctgagctgcaggacgtggccacggacagcggcgacggcggcttcgacggcgaggaggactgcaactggtcgttgggacggtgggtgtacgacaacgcgtcgcggccactctactccggcttgaagtgctccttcattttcgacgaggtggcctgcgacaagtatggaaggaatgacaccaagtaccagcactggagatggcagcctcacggttgcaaccttccaaggtatcaacacaactcatctccattctaatccacatcaattttgacactacgtacactcactactgctgcaaggatctgaaactgcactactacttagtactacactccgttcgtactagctgtctcagtgtttcttaccaaacttccaacttgacctactcatggtaacaaaaacgtttttagttttgtgaaagcaggggaaaatgttctctcctagtcctgcaggaaaaaaaaatcaactttattttttttttcagattgctcttgtaacccagagtcctaggtgccaactggaaaacatacagagaaaaattggttggttttgagttctttaaacaacggttagttttggggaataaattattggacagcaaaagatcggttgtttttttagataaccaaagatacagtttgtgaaagatcagttatgagagaaccaatcgccaatgcttacttgataaagaacttcagaagttcttttttttttcttctgatatggtgtcgcactcataagaatggaccttttaaattcctatataatggtcaaatccattggaagttttgaggaaatataacatgaagtccaagctcttgataatttcctttgtgtcatcctctcttcaaattcctgtactgttatgaagcatccaaaaaacacaattgagtaattcctatatttttcatattccttatgattacattgacacgtcacttcaatttctgtgcttttcttattcttgtgttttcctgtgtttctcaattcctttgatccaaagagtcagttaatatgttcctcccataattaatacccaattaaaatagtacaaggtacctagtggaaagaaaaaaaaaacgtcatttataatgtgtccagattgctaaatttataatatggttgcttctgtaatccaatggccaactagaaaacgtacagacaaactattgattacttttgagttattcttaaaaaaattgttagttctcaggactaaactattaacagtgaaagatccgttatgaaacacaaaccaatcactattcactaatgcttactatggattaattgtttttttttctgatatatggtgtcgcaatctttaccctgtcaaaacagattcaatgccacaaagtttcttgaaaagcttaggaacaagagactggtttttgtgggcgattcagtaaacagaaatcaatgggtgtcgatggtgtgcatggtggagcacttcatccctgatggccgcaagatgcgcgtttacaacggctcccttatctccttcaaagcatttgtatgtctcactaatctcttcatcccaacatgcttctgaattcagaaatcagaaacagtacattctctgatctgaacatttcttctgtttgctccaggagtacaatgcgacgatagatttctactggtcaccactgctattggaatcaaacagcgacaaccccataattcacagagtggagtaccggatcataagggcagacaggattgagaaacacgccaatgtctggaaggacgctgatttcatcgtcttcaactcctacctttggtggaggaagcagagggatggtatgatgatgaaagtcatgtaagtacttaatttttactcctctttctttcctggtcagaaaaaaaatgttgctcttttttcttattccaatgcaacaaagtggggtttggaggcatcagaaagttttactactttttcagtcaaaaaaagtttcctttttttctctttccaatgcaacaaactctgatttggaggtatgatcagtaagtcattatgcaaaaatgtaggtatggttcatttgaggacggggatgcaaagttagatgaggtgcaaatggttgatggttatgagatagctctcaagaaactaactgaatatcttggagccaatatcaacaagaacaagactagaatcttctttgcaggctcatcacctgcccattcctggtgagagaacgtacaactcttgcatcatttctcaactgcgaaacattctgaaaaccaataaaattcatcagctctactcaagttcaaagcttgcttatatttttgaccctgaaaatgaaaaaaaaaccccaatattagggaaagacctaatatcaaataattagaagggatgagactttgaacccatgccggctagcttcaggcccaccaccttgtggagctagccggaagatccctgggtgtttctcatgacactgaaaatggcaattaatctacactgaaaatgacaatcatgtgcattctgacaagaaaattctggaacaaaaatggatgttttccagggctagcaactggggaggagatgacaacaacaagtgtctaaacgaaacagaaccaattcagatagaagattataggagtgcaaccacagactacggcatgatggacaaggcgaaggagatatttggaacactggaaccaaagggcatacatgttcagatactgaacatcacccagctttttgagtaccgcaaggacgcccatccaacgatattcaggagacagtacgttcctttgacgaaagagcagattgcaaacccgagcatctacgcagactgcacgcattggtgcctccctggagttcctgatgtttggaacgagttcttgtatgcatacattatgcacaaatgatatatgtataataatgtaatcttaatttggccaaatttcttctttgttaacttgtgggtgtctaagtaggtataagtgcacagtacttggcccccatcaatttttttttcttttttgacatttacatcattacattacatgtaaagagaaagggaagaacataagcgcagaaatgaaaaggaagaagataagttaatttgcctatactgagagttactgctacttatcgatggttgtgcttgtgcagcataaaaattattttttgtgagtaagtactatacattgtacataaagcaaatgctgtaaagataggaaatcaattgccgaactggtcatgtcatgaagctcaccagggagcagataccaaattcagatagagaacttttcgtgcttatgtggatcgttggttcctccaatcgatcaccttttgccatatgggctgtttagtcagcccagcccagcgtagggcccatcatcatagattgtgaattaagtctagtttacgtccctcacattttcgtcaagattaatcagaaatcttaaatacctacttacaaaaccgggttaaatgagatgagatgtaccgtgggcgacgacgaacttgggggcgtgcatccggtgtgggtgtggccagtacgtgcaagaggagaggactggactgctgcacctgcggacacatccacatcacgggcgggccgccgtcgtttaggcatagcaccgccgcacgctcaagtgacccacggcgccgccctcgacttcgcgtcgtgcttctcactgtcgccccgcccgtccacgtcgtcgtcgtcgtctccaaccagctatagctcattctgcacaacgtacgtacggcaagatgaaaaccaaaccgtgttccctgctaattaaaactagctgccctagttaatgcctatataagcccttgttttctttcaggtatttaaatttttagtttcaagtgccaaatttgtactgtgtcattcataccttcgatctttcgctcgctcttactagtaggaatctttgcaacgatgatattaattaattaatacaatatgaacttaaaaataaagttcttgggtttagtaaagatcgatactacacatagtacacgttttacactactcatgtgatccaacctactaacccttatatgatctgaaataattactactactactatatagtataagtacatagcccttatgagggctagggtgaaaaaaagctttttttttctgtcctatgcagtagtaatatgttcgtatattgcaacggatctatacgacaagaaatagaaatgatttgtgagtatgatcgagtatatatatactaatataaaacggagaagttttttttcctacatccatctagtaaaatgtacacatgatttcccttgtttttctatagccatcagatcagatccttttgtctaacggctgaaaacgtccacaattggctagtctaacattgctatacggtgaactcaccgcagaaacgcccactgccagacgcacttctcccacatgctaataccatcgccgtgccttctactctatgaaaacatcaccgtcacaccctgcttctccaacaccgttgctcccttcatggcgtaacctcgctcctccaacgccgatgcacgcttccttccactacggtgcgtctccgctcactacaaatcacttctctcactgcaaaatgcatcacatcctcctcttgcgtcggagccttggtccagtactgttgcatacatcctcccgtgacggcgcgcctcctttctttttaaatagtaaaaatagaactatttaatcagtataatttcatatgtataaaaaaattaaatgataaggcattttcaaatataggtacatgtaattgcgaatatctagctagctatgcaattaatcaggtgcttaagatgatgtcacttagatggttaattaattactttgctgatgtatctggtagcttttctttagcgtttgagatgcaaatgaaaatggggagcatccatccagagtagtccatgtgtgtcacgcattcgtgtattccatcggattcccctgcctgcagacttgcagatacagttgagcgtacaaataaaccatcaacaaaatggtccttattgcgcatgctgcttcctgcatcaattctcgatcgatcaatcatcgtgcagatcaacacgaatggtccacggtacagagacagccgcccccatgcacctggttttttcaactctggttttcaattcgtcatttgttcattgttcacatgttcgtgtacatgtacatgacaaattgacaaccagtacttcattgtacaggtactactgtactagcagacgctattacttttcactcactccgtttctaaatatttaacgctgttgatttttttaaatatgtttgaccattcatcttatttaaaaaatttaagtaattattaattctttttctatcatttgatttattattgttaaatatacttatatgtatacatatagttttatatatatcacaaaaatttttaaataaaacgaacggtcaaacatgtacttaaaaagtcaatggtgtcaaatatttagaaacgaagggagtattttataatcttaaaaatgtacatatacttaattacatcgatcaatacgtgttgcctagctcgaaagtcgaaacccaaaattcaattagtcaatctactactactaccttgtaaaaggctcagggggtgtttgggagagaggggcctcagtttatatgcggtttggtttaactatagtttgatcatcacttaagactaaaatgtcttctcaaaatttctgctggtgcaactctacataatatttaaagcgtgcagatgcaatccgcataatacgaagtgacagagcatattaattaatcgatgagaatcaatttcataatcatggaggttttgttatgactgatcagaacattatttgcctaaatgatgatcaaacatggatgaaggagattgtatataataattatcaaattaagatgttgtcacatcaatgtcctaagtgacaaataaaaaaataagaacaccatgtcggtgtttgtaattcattttatataatgaaaatggattatgtcggtgtcttcaattaataacaagtaaaaaggagaaaagaatggaggtagtaactaattaattgatcagaggaaagtattacagtgatgcatatatccattaatggacgcatggacgaaattgatcggaacggttggaatcggtagtaaatctttgaaaacaattctcggttggtcgagaatgaaccatgcatatttaccaatttaactattcaatgtcgatataacagtacgatgttaaaagaaattagaaaaagaaaatccaaatattatatatgactagaattagaaatgatatcacttatataataataacgatgccgggtcaatcagaaaattcggtggcaataatatatataccagcaatatacatgtgcgcatatatagagcatacattaggaaattaatttcggaaaaggagaatgaagtttgagagtgacatacatagtcttaatctggctgcgcgtatatagttagctagccaggtggtaaatggattaaggagatgagggagacatgcatgtttgtgtcgtttatattgagaaagagagaaataaatataggggggctacgacagcggggcggcgctggatggatgctgtatatatatatgtggccgggcaagagcgagcacagccggccggaggaggaattaagcaacaagctaagctaagctagccagaggaaacaacaaggaaaaggagagatcgatcgagcgatggagcggtcgacgacgacgacgacggagcagcagcagcagcagcagcaggggcggaggagaggcgcaggatggcggcgttgggcggtgctggtggcgacggtgtggatacaggcggtgacggggacaaacttcgacttctcggcctactcgtcggcgctcaaggcgtccctgggtgtctcgcaggaggcgctcaactacctggccaccgcctccgacctgggcaaggcgctgggctggtcgtcgggcctcgccctcatccacctccccctccccgccgtcctcctcctctccgccgcctccggcctcgccgcatacgccctccagtacgccctcatcctcgactacctccacctcccctacccgctcgtacgtacacacttcgtcttctctctctctcttttttttttcttttctttattatcgatcgcctattcgctttgttttaatt

SEQ ID NO: 8852 - DNA, 23490 bp, Oryza sativa
  unsure (1)..(23490): unsure at all n locations
cttttttttttagataatggtattttttacccggcctccacatccaactggatatatacggccattgaaatagggaatttagccccgcaacgaacccaatctctgaaattcgctcctatgaatatttgaagccaaaaccttggggtactactcaagtctctgcaaccactaggctacatgcccttttgtctatcgtgtaatcgtaaaaaaaataatccaaagcttttttcttttttatatgatttcatccttcttaccttcttatgtggaataattctcaccaacaaagtttgtggaagctttcacatttgaacatttctcaacatttgcacaaggcgtgcgttagtaggtcaaaccagcctcccacaggttatattcattgatacaaaacaaaaggtggtagagaagagcttcacaagttgcattgcacacctcacacaccttatacagctgattaaatcaaagcagagaattgacaaggcatctacctttgatgcgactgaggctgattaaccatcttattgtgtttaatgattagctacttgttgtgcttctattggcatgtttttatgtttgagtcgatcgtcaatgggagtgagtcaacttaagaaagcacaaagaaatcttcacaagacatcgagacagtgacagcttcaaagcatatgaaacaggcaggctcctcgcctcctcatctgcaacttatattacctttactgatcaaaatgctccaaaagacaaaaggatgttgagatgaaaatggaagtggtcagttaacttctgaatttcttttcagacagctgctaactccattagtcctagcaattacctactcgatcgttcgtgtacaatttccacttgctttttctaaagaaagattgcagattgtaccatccaatacttgaggaaaaaacatagaagaaagctttatattcataggaaaactagatttagttggtattcgtacctttcatgaatcatggtagcatgctcgcaggttaggctacttcaatcatgcaaggcgggccatgatgcccagtatatgtgcagaattaaattctgcatgttccataatcactagtttatcaaaacaaatgctgaaattatttctggactagcacattttctctgtcaccatttgtgtgaaaattggtttaacaaaagagatgataaaacgtctatcaccaaagggtgtttggtctagtggtatgattctcgcttcgggtgcgagaggtcgtgagttcgattctcgcaacacccccttaacgttttgctatttacaactaggtccttctcttacagatgtgatgtactctttctgatgttgcaagtctctgtctttttctctttccttttttttggtcctgtacatggtgcaaattagaagcactccaagataattggcagctaaaattgggccgtttgctacattatggtgtagctgtgatgaagatgatatggtagtgtatattgcaagagcaggaggagcagctgcatgatccaacgaattccgcaacatgcagacgacaatcaagctggacaaggtcacgttcagaggtaacgaacccatgtggccacgccgtgcattctcattctcatattgaatgcacattccaagcatgtgctccaatctttttgtatattgctctctagagacaatggatcatggatgcacatcagcactaaactattttatcttggagcttctaatgttttctcaaaatggatattcaggtcatcagagaagcaaaagatttcacaagtaacttggtggtgccatacccaccgaaaagtgcacaaggttcgaccgatcaaaagatcagattcacgaaaacagacactaaattgctgttcatcatacgagtcgcaaacagggcatatgccatatctaattcagtcgtacggtatcatcatgcatcaattatcaatatgatggtatcgtatcaagtttcggggatggtaacaaaccacccatctgaacgagctctatcaagatggtagcaaaataaaatcagtaatgtggcttaaacccccacttagtttacaggcaccggtgcaacttatacatcgtctctctgaaaagaccaaatccaacgccatgtcaacggagtgacagcccctacttcaccggaagtagattgataccagtgggatgtcaacgtcgttgtcatcatcgtcctcacaagccaccaccacgtcaagatggcgccggtatgggggcacctccacctttgccacctccctcgccacatcgaccaccttcttgtctagacgctccttgtgcctcgggaacattgagttgtacagcagcgaggtgccgcaagatatgctgtatgcattcaggcccttctccttgagccagtccagaagctccctcagcgtgatgttgccagttatggtccagcggtcccaaacagtccaggccatgtcctggtgcttgatggtcttgggagggaccggctcatccatatagaagagggggattgcaaggtttgcaaatgtgttcctgtagtcttcaaccttgtgcccaccaccgagtaccttgtacagttccaagcacacaagaccagtagccatcgcagttgaagtggcaatggcagggatgatcctgccagctatgaacttcgccttcagcttgtccacttcatgaatgctatagtttcttgcccgcatgttagcaaaaccagctatcacgtccatatggttattggtgtcatcatcctgcacgtacatgaatgcggattataaaaccaactctcanagctaacacaatttgtgaaactgtttaaggtcataagggtgttcatcctagaggtgcatgattggctaccaaggaaaagctaaggaaaacaaaatcacatttactctctcgaacttatcagggaaaaaaattgaaactaaccttctcaaactggattggtttcatctggaatcctggttgcagtgttttggaaattgcttctaactttgcaataagctcttcaatgacagcagcatcatcaacagatgcagacgaaagactagtagccttctcatctgtaactatcttaaccccctgttttggttggaaatcaggaacaatcaccttgtcaacagcttcagccatctttgctgggtttttgacccagtcaggtatgggtatcccaaatgtctctgcccttaaaattgcagcagccaaaataaagttaagctggcttggatcagatgtcaagaactccagtggtcgtgggaaacgctttggagcagaccagaaaggagcaccagagctggtcatcgcatcttcagggaaagtgtatgtcagttgcttcacacggttggagaaataatcctcaaacctaagatgaacaatcaatacaaacaaaatgcaaagtgtatgtcagttgctgcaaaatgcaaacaacaatcaaaaagcaaatgctttagttgcaaaatttaaattttggaatattcttgcatattgcaataatgaaattcaagcagatgtacacagcttcaccccctatgcgtaataagctaaaggtgctcaagagatgtgctaacttacttgagccgggcccaggtaatacaatcttggaatgtctcacacttctctctctcgagacattcaataacgcgctcaagctgatccctagcctgtgcatcaccagcagttcttgctacagttgcatatccaccaggattcgataggaaggcatttacttcagtgggggtcttctcaagcaaaccctcaaactcagacctagcccaggttaggcaatgatcaatattatgaggaaatgaatgtacagtacacatcggcgcctgcttttcaggtggatctctggatgcgccatagttctctgttaggtgaggtatgaccatctgtgtgttacatttagcacccagagtcccagattccaagagtggcttctggaaatatacacatcgggagtcaatatacattcttgcggtaacattgtccaacgcattgacaacagcatccaggctctcccaaaaggcatcgttgaacacattttcagtctcaggacttgctctgttctgaagggcctcgacatgaagcttaggattaattgccatagcagcagtagcagcaaccgtggacttgggctgaccaatgttccagtcacggaagagaaactggcgactgagattgctcttttcaataacatcatcatctgtcactgtcagctttccattctgattgcaagaaatgcccattagtgctaggtttttcaagaattcacatccaagcgccccagaaccaaccataaatattttcgcctgctcaagtttcttttgaaggttagatccaaaaacactgatttgtgcatcatatctagtattctctggcttcaactcggctggctccaatggttcaacagggagagattcaacagaatcaaaatagaagaactgcaaaaccaggaaaattacattaatgtttacatgaagagtgcagataaaaaaagggatttacgttattataatgaaggaaacagattataacctggtaaagtggatggaatttccctgagcatgctttcacaacctcttgacctacaatgccaccaaacattgcagccatagggttcagaacagccctggaaccacttgcaaaatgatgcagaagctttttgtcgagctcttcaagtttgctatcacccagggactcgttaatgctaatagcaaaatctatcagtctttgcacatcatcactagacccagcaatagggaatcgcctcaaatcattcctaaacttatccaaagcttggaaagccaaatgcagaagtggtggacggtcgaatttggagaaatcgctcatgaaaaattctcctggttccttaatggcgtctttcaaggttttgaatttaagaacctttggtggcttgacctgagtaacaataccacctctaacatatgtcccatatgaggtagtgtcttcttctagagtaaaagaataaggcctagcgttcttaatctttcttggtttcccatcatttagttcactcattccatggacttctgagaacacaactaaatcaccatcctggaactccagacgctcatcatcaacacaggaaacaagcgcagggttgtcattgctgatcgatgctactattcctgtatgtggctcctctccatcaacatccaatacagtaaactcaggaccaaagtcacaaaagacactgccaaaaaggccacgaatttctgacttaatgaaagcaattggtggctgatggttgtggcagtaactgtcaaactcaactgctttctctaagctgatatcagtaaagaccacagcctgtatgttcacatggaaatggttattccaagaataagaaaatatgcaatacaaagagacagtcattgctcaaaacagaaagatggctctgaaatattatcttgaactactacagcccttttgcaggccatattagtatgaaggatttactgccatgccccaaaattaaagcagactcgcacgattgtctctgtagtctactgagatgatgtggaactactacagctttactcttaatttttcttatcagtaattggcacaaatttaatagagctattgtgtgggaatacgatgataacactaactactaagaccaaattcactaagtttaaatagtatgtgttgcactgttgctaaatattaaatatggagttccaatgaatgtaaaagatgtttctttgacaaaaatcaagcaatcaaaggaaaaaggcgataataccacagaaacctgagggctgaaggcctaatgaatgcaacgaacctttatgctattccaaatatcaagcagaagaggaatttgaggaagctagtagtgatacacatgcatagttaatcctaaactccatgaaatttggtgtgtaaatactattttgcataccttgattgtgcacttccttatacataattgttgactttatttcttcattcaaacatatatttagtaaattgtgaaaccgcactgtattgcctataaagaatttccatactttctatgaagagtagcaacaattcctagactaagatcaaataaaagatgcacagcctgtagtcacagacttgcagctcacatggactgaagtacaagtgaaacgactacttgaaatctaagattaacaggcatacacgatgaagtagaagaaacaaacagcaaggaaggagatcacaaatcaactgcatgctcacatacctggaaattagaaagctgctccttagtcaaatcaccggttatagtagagataataacagcattattgagctcctgtagcttctgaacacaagtttgagcacggttttgaccaacatccttctctgtgaggaagaagttgcttgataagtcccatagctccacattgtcatcatcgtgcaaggttacggacttgacacccgcaaggacaaggttcttggctgcaggaagacattggcattaagtaaatttcaacagcatatctgaaagtatgaaaaaggcaaagccaaaaacttgtacaatcatgtgatttgaatcctcaaaaggtctcccaatttcacaaggtagacattgcattctgagtggttaagcattatatgccaagtctcaagcatcttagcttattgcatagcacaggggactgaccagaactaacacagatttgttgtatgatgcaagctcctaaaatgtaataagggggtaagagcaccccagcacaactgggaaaagtttaaactctggttcaaagaatggactcaagagtcaagagcgtcaatgtgtttgacaatttgagctgctcctataatcattgtttacaaatcttaaaattgaagaatcagttaataggaagcacacgctaccacgcttcatatttctagtaacaagatgtagaacttgcggaactgagggcagtaacccagcatggagatcgtaaagcacgcattgagataaaatttgataataatgagtagcgaaagatcaacttgtgcacaagtgatatcgataactgtctacgggtctataatagataaaatcgattgtggcaggaaagtggtaattgaagacaagttgcccctttactcaataaggtcgatctgtatgtagagtagatgaggggctttgggaagctaattaaggcgtaccgatctcggcgccgaggccgttgaggccagagacgaggacgttggaggcgaagaggcgcttcatggtctcgcggccatagacggcgagctggcggctgtgaaggtcctcatcgatctcgggcgctctgccggtggtcatggtgtggttgtcgtcggcgggttcgtcgtcggcgcgggtcttcttgtgcaagtcgtggacgacctcgccggcgagatcctcccgcttgcgggtaagcatatagtgtagggcgccgccgaggaggccgacagcgacggtcaccgcgaggacgaggctgaaggcagccggcgagagctgccgcgtcagatccaggacgcaaccacggcgagacctacacacccgaccggctgggcgtgagacgggagggagcaccgcaccaagagatgagggagttgggcgatggactggaggaactcaccttctaccttggattcgtctccctattcgtggatcgacttggttcttccttcgcttcccttgtatactctatctagggttttgaggaggaaagaagaagaagggctaatttgtaaattgtggccgcttcgcttgtgcgtctgataagaggaggtggagaaggggagttgtttgagtttgagacgagatgaaagatgtgggggtggggcccagttggcagtgaaagaaacgaaaggcaaagcaaagcatgagtgctttcctgcgttggcgccatgagcatatgcttctctctatttgcacatcaactccggccttttttgttcacaccaaacttctctcaactctcaacttttcatcgtatcacatcacatccaaaacttttctacacacataaattttcaattttttttcaaaattaccaacgtttccctaacttctccccaattttagaaactaaacacagccggccatggaaccatctcgaaagacacaagaggagtcttggaaaaaagtccacttcacgtctctcatctcatcttatcgttgagtttaaaatacatcccttaacaataaacccaaatatagcatctttggtcttgcaaaaaccgcagtatgtatggattggctccgttgacgtgataaattgactcggtccacttacgctgactagacacttgcatggcaaaaacaaaatacagccccacatataattctctcctcccttctctccctctcctctccttcctcctcctcctctttttttctctccatctctctcccgcaccctggtgatgctcgacaccgtcctcaaaggatgtcgactggcttctccacatctcctcgttgtggttcggcagcggcggtagcggcgacgacaacgacaacctatgcgggcattctaacatcacatagaacgagcccatattgttccttatctgggaccacctcgtgctcgatatcttcattgcagaggaaggtgccgatgaggatcaatgttgggtgctcaacatactgctatactttttgcttgatttggattgtcagcgtcgagcttttacatgtcgcttgttgcgtgtctttcctgtattaggtcaatcctttctttgtcggtcaccacccttccagtccgtcatgagacaagtgggcggcgtcgacgcccggcttgtaggtgacgaggtgtgccactgctatcgagcgcgccgcatgtcggtcacaatctcctcactcccccgattgtccgtgcctccactacttctgccatcgccgagaccgaaggatggggagagagataaggaagaatatttgtttcactgacatgtggatcccacgtgagttttattttttatttttcccttttagtgtcgcgtcagccaaaaccaccctcaatgctatatctaatgtgacctggttttgcaagattagagatatgttaacatgacccggtttgcaagttttagagactaaaaaaatgcatgtgcgttgcaactgcatagtctattttaatcttattattgttatacggtttagctatggtgaaattcaccgtgggaattcgcctggatattttattttacaaaatcatgagttgcaattaggagttcgttaccatacgagtttttttaaaagagatttctcatacgattcattctgcatttctaaaagcgaacggacataaaaaccaactcaaacacggatctgcatttccaagaaaaaaacttaaaaaccgactcaaacataaataacgtgctaaaatacagataaaaacatcttccgtttttataatagcagagatatagacgtgttataatgtggagcctcaccacgccagcaaaggtgggctcaaactcaaacataagctgtcacttaaggcccaattattcttgatgggcccatcctcttctttttctctctccttttcttttgtctgttctttcagaggcagcaaagcaaagggacatatatgcataaaaacttgccaggcttcgagttactaacataaactactaggaacatgacataagcacgatgaaacaagcattaacaccacaatggattatcatactgttccttactggctgccagcaaaatctctctagcaacaaacgtgtaaatgctccccaaaatacaccatcaccatgactccatgcatagccacaatatcacaagtatcgctacagccagccgcgccatgttccttttctgcgaggacgcgcgacatacacatgattctgaagctctactgacctagacacagggggaagttcatgaccaaattggttggttcattcactccattgctactgcgtgcttaatttgatgaatacacagactcgacttattttctttctttagctgcatgatcccatggatggaagaaacgaaacctactactgcccttcacaccgtctcctccattcaagcttcttcctcaagcagcttctgatcaaagtgccacacccctgcaacacaaattacgtagcaaacaacaactgatgagtcaaaccacaggtctatagatagatggtagtacatcaaatgaagtattttctgacaaaacacactaaccatgcccctttcccactcttctcagctgggcgacatactcagagatcttcttgatggcttcaacctttcagagcaaggcagatattttcagcaaaacataattcactaaagcatagcagttgaatattaacatctcaagagctagttcagtacccaagtgggcagaaggttttttacctgctcctcaaggaattcactctcaacgaagtcggtcagctgtggatcattgcaccttgatgccacctgttgattcacggcaacacattttcaagtttcaccatatatttcttttcaaaatagtgttgagaattatacaacgcattctaaatccatgttcagcattactgcataactgcataacaggagaatatcttacactgtgcaggttgtgcaacttctcatttacaagcttttcgagagccaaggccaactccatagctgaaatcacaagcaagctagagggtaaaacataggggaacacaaagtttgtacaggtatgtacagcaacaaacagccagtgcatgctactttctggagacactagcaaatgccataaggtgaaatgatggaaaatatacaatgacgttttctcctttaggagcgtttagaatttagagaatcttttctgtgcagtccaaaatgtttaaaagaaagcttttacaaaacaaagtagcctttattgaaagttactcccttcgttttataatgtatgacgccgttgactttttaattaacgtttaaccttattcaattttttttgcaaatataaaaatatttaaatcacgcttaaagaacatttgatgataaattaagtcacaataaaataaataataattatatatattttttgaataagacgaatggttaaacgtatctcaaaaagttaaccgcgtcatacattaaaaaacggagagtaattgacatcaggattcaacatggaacttttgaagaggaaagtatccttgctgaatctggatggcgaatgagctcattcaccaaggaagttcccctgttcttgccaaaaaaagggctcctcccaaccttaaggatccaaccacttaaattttcacatagataataattaacagacactcagactagcacacagtaaggcgtaagcagaagcacaagtacatataccatggaataaaaaacataagagataataggacaagctgaaagcaactcaccatacaaggcatcccctttctcaggatggtcgaactctgtcaagggtgtgacgatggactggagccgcaccctgcctccacgcatgttctgacaaagaagaacatggcagttttagcatttgggcgcatgattatagtggtacagcctacagttttcctggtgtgccaaacgaagcagaggtaaagttacctggtacttcatgagtttctctgcgtgatccctctcctcatcgctggattctttgaagaatctgaaggaacagaatttatcgatacatgggtgacaattttcctacttggtgatggctaatgaggggtggtgatggcttacttggcgaatcccttgagagcaacgttgtcacggtcaaagtaggcgaaaagggagtggtacgcgtacgatgcattgaactccacactgcaaagattgaactattttttaggattgaattccaattcggaatataactacggatgacaagctaagggggtgtttggaacagggacttcatatcggatgaatttggagtattgaaaatagactacttataaaactaattacataaatgagagctaattcgcgtgacaaatttttttaagcctaattaatccataattagcgcatgtttactgtagcatgacataggctaatcatggattaattagactcaatagattcgtctcgcgaattaattcaggttatagaatgggttttattaatagtccgcgtttaatatttataattagtgtccaaacatcggactaaagaggttttagtcccatctaaacagggtctaaatttagctaagcacaagtgtcttttctcctatttacatcaattattgtggactaaaataattttgtatccgttggtccatgtaaaaaaaatgtttgggaaaatctgcagcactgtagaacagacgcatcccaagagcagaaattattataggatgaaaaatgaaccctttacgaaatccaatcactaacaaagaaaataaaatgaccaggaggcacagagatttttgttaaattttaaaaaagaagaagcagaagaaatgcgcacatgaaaggggaatagaaattcaaaaatggaaggcagagtgaggaggaggaggaaaacagacttgatctgctcgctgatggcggcctcgcactcgtcgacgaacttttgcctagcaagagactggtccttggcctgggggacgagggagagctcccccttgagctcctcgaatggctggaagaccacgccgctgagcacctccttccctttcccggcggccctgcacactgccacggctccggctccacgcggcacaggcagccagacggaagcaggggtcgaggccgcggcggcgagataggtaggcgccgcggcggcggcggcggccagagaggagggggcaaccctaggaggaagcatggcggattaagtgagaggaaggcgcgtgtggcgttcggttccggagttcgcggcgcggcgggtgaagagtgatgagattgtgcggtggtaggggtggaggtgatagaaagggatagatataggcgcgtggagctcacggatgggccacacgtggacggtcgagatgggacgaaggcgagggagcgcgtggcgggctcgtggctggagaggatattttgggcttgtggttggttgatgtggagcccggcccggccgcaccggagtcggtcaagcttaaccactattccttcccggattgtctctgatggatcggttagtcttgttaatttcgtcatcagcttatacttggtttggtggagtttgtgtgtttattgctttccttccaagttgattgcgatgagttgtacaaaattccacacaaatttatacgtctagatgcaatgcatgctggcaaatttctctccttcctctgatgattggtcagcagagaagacaagggggatatcgaggaggagctagatgaagctagacaagataagaatggcgtgcacagtgtggactgtggagatgcggtgtcgatatcctacacaaaaaagtcatttggaggcgtgtggaggcctcacgcccgctctggaccagattgccctatttctctccaccacaattatcatcttctttttttttccacctttttacatacttatctgtcttcgtcagtattcatgtgttgcacagagccacatatacacggtaccctcttccttgcattgcaaccatatgtttacttggctcctatagtgacaaaaccatcttttctccttttaacagcgcatttgtctcttgacaaaattgattcatcgagactcctgctttgctcgtattctttttctatatagtatatacttctagaacgagctaacgttttcattttaaagaaaaaaagaaaacggacaaaagttctgctgggcttcgttggaagcgagttcgttagtgggcctaggcccaaatacaaaatccaatccaattccatccattctctgggaatcgccgtcgccgtcgccttcgccttcgccttcgtcgagcagagagggaggcaagccatggccgccgccgccggggatggggacgagcacctcctctccctcttcgcctccgccctctcccaccgcaggtaaccacacacccttcttcctctacgatccaccaacttggatttcagtcttctacaaccgctccattctgattctcctcgcgctgctcaggtttggggaccaggagctccgcctactcgacgccgcgctttccgccggcgccgacgtcccctcgctgctccacactcgctcatccgcccgctgtctgctgcgcaaggccgccgcccaggcattctcctccgtccccgatttgggtaccaccctctccacggccgacttcttcgcgcgcgccttcgccctcgccggagatgtcaaggtcctcactcaccgatgacttgcctcagcgcctgtggccaggattgtggggccattaatcatgtgcacatatccactagttttgtttgctcttcattctacacctaactgggtttcgattgcgatgcacatcgggtgctccagttctgtatgttcaatccaattcgcatcatatgtcgatgcccttataattattcattctcctcgtgcaaatacacattctgcacatgctaccgtaccgtactaaactagcggtgttgcaacttttttttttctgccactacttcactaattctgctaatttctgtcattcactagagttgccttgctatgagatatgaagctctgctcctgagacaagccgaatactccgatgaccttcatttgcaagtatccaatgaagaatggctaacttttgcaaaggactctcttgataatggtttttacaccattgcttccaaggtactttcctttcagttctgctgtacctccacttaattcttttattagtcagcattgaaacagaactgatgacacctcctagctaatactaattctatgttgccttgggtcacatgttacttttgtaccagaatttagactaatgaccttttcaagtggaaaggcatcgccatttggaaatatgttctgaacaatgtgatggatgatgtttgataactgcctgctgttcatactggtagtattgtctgaacaaacatagcacaaataaacatagatcactatgtagaacaacactctcacgctggagggcattgttttgtctgcctcctttagcagttatgattaggtcataaccatgccaatgtgtcaatctaatcatctgtctgtaattcattttgttgaatgactgcatcatagtgcttcaacattatttatgtgcaaaccactgattctagggtttaaaaccatgtggccatgtttctttctacttatatatgtatttaccttttaggcttttgcaaatgctcttgtgcgtattgatcccaaccacccagaatacttggactcaaccaattctattctgaagaaagataagatcaatgatataagtggactccaaaacttggccaagtcattatccgcactgcgttctggtgagttttgtgataccataaaatgatgtaaattacatgctgcgttgactggttaaaagaacactttagatgctactcttgtgctctaactgcctcctttattgtctctctggggacttctgtaagaccttgctatgttcttacgttaagtgatggaatcggcataaaaactcaaactacatctcgggaaactgcagtcttactttaaattgactattaaacaagatgtttagagtagataagtgtatttcaatggaaaatcatgatctttctatgtagaaaaaggattagcataacctgagtataggctgtacaactatgtctttattttcattttaattgaaggaacatctgggcatctggttaattattttgttaaacatcatctataagatactcgaggttattaggtatgactatgttttttttatcatattgtgttcattattctgttggattgatgtagcattccctgaacatagatcaagtcaaggcactaaatcttctattagatttttcaaaattcggtgcttatttccttttgtttcaaataaatttccaatacagctacttgtactatgacagttcaggcacaatcagctgaatacatgaaaaggaaagcttcaggggttgatgaaaagtgtaatttgcacttgaaaaaaacaaagctacctggaagttcaatgtttaggctaggtatcaaaacaaggaacatacagaaactacgttgcagccgggagagtaatctgtaagatgtttgaagcaatatcggtgtgacatcttccaataggctgataagagtggtatgatctttcacacaatctgttgttgatgtaacaaaaggtgaatctcatgccttggggtttactcatttgtttactgagaacttctcagtttattattttggtaactagtggaacatctgcagctgcacatatgtccagtatagattttatcaatctcttacggtttctttgctgactacctctttgttagctcaacatatttccatcctgctatccactcattttcttccttaaatacatccatactgccgtatgtacacgtctccttatcagattgctatgattaatgttctttgatcggaacagaataggaccactttgaacttcctctttgtaagatagcaatgtaggttatgtagaatttatatgtgagggttgtgttggtacatggcagcatgtgcacttttgactcgttctcattttctttggtaagtatcatcgtgcatgtgttgtaccatgtaaaactcttaccatttgtcactttcaaggagtactttcaattagtttcattagtattatctgtatgaccaagccaggcccaacttctcactcctttaaaataacactacaacatcttctctttcttgcttactttcagagcactggtggaaatgagagcactgagtagaatagcacacctcacttcagcacagaagtttaactatacatttatcatattgaaacaggatacttgtatctgctcatatagttacattgcatcacattattgcgtaggaattcatgttgtttattcacttggaatgattgtcgatcccattattaattacatatcattctgatataccactgcgcattttggtctgtccaatgtggctatgtacattaatacttaatatgcttcaacgtaatgagtttgcttctgttttttcattcaattaggtgaacattttcgtgcaatgggaattttgatcctgatgtcgtggatgggtatttgggatcctgagacaatgagggtatcacttgcctcttctactgctgtttcactgggaacgtaagctgcttttttaaatactcctgaatattatgacttgtgatgtactaaacaatatgctatatttttgctatgcttacgcatctgtattaggatcataaggattaaaatccagtgctgaagtattttatttaccttttgagatgatatagtgaagaacttcatgttgttcattcgtggacaggtttattatgcacggcaccaaatgatagcataagacatgcaattagctcaggtattttttttagggaaacaattagctaagtttcattgaagaatcatgtcatttatatttagtagtaaaatagtaaggaaaaatattgagaaataagcatgtttagcttggaaagtcaggtacttgacatgtggcagttggcagtgacatagatggatagaccaaaatctgaatactgaagctgatcctagagcacatgcggatgtatgactagatcttaactactgttcagagaacatgaagctaatataattagtggtccagatgatagtgtcttggatccctatccaatagcaagtgtcttcataggaacaagtcatcgtgttgaggaaagaacatgtctgttgcatatgctctcgctaggaattgaggaaaaaggaaaatactgatgttagtaaaagtttgcaaaataaggtgggttggtgcataggcacaagatataaacgagagcctagcctgtcatgtgggtgatcacccagttagcctagtgaacttgcatgtgaggggtacgtttattttgaccttggaaaagggaagagttggcaacgggtttatactttccttgacttgcttagtggtaaaacactgtcggcaacttagggtgtcggcgccgccttctctgattgtgatgaccattcatatttatgcttgaaattcttggtgaacttagggtgtgtttagttcacaaaaaagaaaatttttagtgttacatcggatgtttgaccagatgttagaaggggtttttggacatgaatgaaaaaaactaatttcataactcgcctggaaaccgcaagacgaatcttttgagcctaattaagttgtcattagcacatgtgggttactgcaacacttatgtctaatcatggactaattaggctcaaaagattcgtctcgcgatttccatctaaactgtgcaattagtttttatttttatctatatttaatgcttcatgcatatgtccaaagattcaatgtgatgtttttgagaaaaatattttgggaactaaaccaggcctgagttttggcaacaatggcatgtgcaagcacgcatacggctgtaagaacactgatccattgtactctatttcaaagggttttgcagcaaatgagggcagagtcctcgttccgctaatgtagtctacacaagctagacaaaatcaacgcaagaggtagaattttgtgtcttttgtgtgtcgactgatcgaacaatgttatttttgtttgctagcatcgctccaacatgattttgttctgtcatccacattggaaacaaaatctgggaaaaataacaatataagggattaagggatgtcgttgtggactctgcatctatcataattaagctgcgaaatgcattgcatgggagcatgggtgtttgtagtacatgtcactcaccacctgactcagactgaaaccacaaccaccggaggtcccattcgcatttacacaggcatgacgtatactttgtctctagccacaacctgctgtatgcatgaataatgcttatcttaagacatcctcggtttgatggatgttgtaaattgctatgctcgacaaagtcctaatctcgtcgttgttggatagcctcttccggcgtttatacgtgtcatctggtctcctgctgttggctactaacatgcacgtatgggataaacaaatagacaaacaggagtactggaatactacctgtcgttttctcatgttttaattaatctatatccttgatttacgattttccttttatatatatagctactttctccgtttcataatataagtcattctagtattttccacatttatattgatgctaatgaatctaaatagatatatatgtctatattcattagcatcaatatgaatatgaaaaatgctagaatgacttattgtgaaacggagggagtgctatgttatgatcgacatatataaaaagagaacgatgactgggagaggtgatgagatctggtgaggtgtccaaagttgctaatgtccaattgctagagcttagaagaagctacaattaatatttttgctggtactgtcagttgtttgttttacgtggattgtgatgaatactagtactgtctagcaattaaaccagaagttaacatgcaagtgttgcatctcaaggtcaactctgagaacgtgcgcaggaactaacattaacagttcagtaaccaaaggtcaaacaaactgcactagagtccacatttactagtgtgtagtagtagtacgtttgaacgaacttgattaccagctgtcgtcgtagtcgtagctagttagggtccaactcatttttgtcgatcgcgggggaggaatgttaacggtgcatgtggttggttgatttgattagtgaaacaaaaaaaaagtggttttcggtggtggtaatttgagcttgctttgaactttgaaaagtgatcgatgcctgcaattcacacttcagaaaagaatgaaggcttagctcgtatgtagacttttgatggcttaatcttatttgctgccaagtagagacaaaacaagtcagagaacccattactgtacatatttatacatgagtaatcaatgatatgggtggatgtgatccatgcctccagcaggacatcatgattaacatgttatgagggatcactatacttaatactcctcatatgcttagttgtttagtagtgttaattatgtttgtcgtgactcagcttagttgttgctgttgttgagctataaaaggagaagctctgctcccgtgcaccctcccccctgaagcctgctcctctgcatcaactgtttgctgcccagtacagtagaggcctgcacttgcaagttgcaactgcaagcaatggcgggaagcgggagcgggacaccgtgcgcgtcgtgcaagctgctgcggcggcggtgcacgtcggagtgcgtgttcgcgccctacttcccggcggaggaggcgcagcggttcgccatggtgcaccgggtgttcggcgccagcaacgtcagcaagatgctgctcgatgtgccgccgccgcagaggcccgacgccgtcagcagcctcgtctacgaggccaacgcccgtatgagggaccccgtctacggctgcgtcgccgccatctccttcctccagaaccaagtctcccagctccagatgcagctcgccctcgcccacgccgagaccgccgccctgcaactccagctgcagcagcagcaccaagatcaagatgaccaccaccaccagcagtgcatcctggagaatgctgctgctcatcaccagctgatgctgcaggaggcattcctcaagaaagagtccatgtggacataattgtagtagatgctttctagtaaatctttatgcttcgattgatatgatttgatgttgcacaaagatttatagtaaatctttgtgcttgttgtcttctcttacgtaatttccggaaagaatgaaaatgaagaacaacaattcggtctcattagcctacctcatatccccatttctgttcaatgctgtattagcaagacagaaactgattggctttctgaaacacctgttggcttcatgaaccatcaattcagctcccatgcatgcacaagtttcagacaagccttttgctttcggagatatggttgtttgcttggtaagggtcagtgatgtgggacacattaatttgtcttcacatggtctctagttctagtacagtaggatccagatagtatgtacacgaactaattaagcacctcaaaccaccccaaactcaattaagtagcaggagagctaatgatattagaagtcctgatctcacctactagattcctaagttctctacacgggacatgtgtcctttctgtgctaggtctatatcatacctggacttcactaatactccaaatccaatatcatacctggagtactaatttgtcaaatccaatgttgtaaaatacctacgcatcagaatatgagttggttgatcgatcctacaaaacaagagttgagtgcccgtgtcatcaaagggaccaacacagacaaaccaaaggttgtctctttcttgagaaaggaataatttccagctatgcttaatttggttgttttttttagtaatgatatattaagatggagtccttttaacagcttgtttttataaacttgatcatgattatcttggttatgacattatcaaggtgctaaagtcccaatctaggacaaacaaaggattcgcttgttaccccccacccacattaatttctgcacatatgaacatatattgtatcttgcacatacattatctccatttttttttatcaaatactgtattagcaagacagaaacttattggcttcccgaagcacccgttggcttcatgaaccattcattcagctcccatgcatgcacgacacgacaagtttcagacatgccttttgctttcagagatatggttgtttgcttggtaagtttcagtgttgtgggacacatggtctctactacagtaggatccagatagtgtgtacacgaattaagcatctcaaaccaccccaaactcaattaagtgcaggagagctaatgatattggaagtctcagatctcaactactactagattcctaagttctctacacaggacatgtgtcctttctgagctaggtatatggagtaccatatattggacagtggcatgtccttaattacatgaacttcactaatactaatttgccaggttcaatgttgttaaatacctatgcatcacagaatatgagttggacgatcttataaaacaagagtcgggtgcctcatgtcatcaaggaaccaacacagtcaaaccaaaggttgtctctttcttctaaaagaataattcccagctagtgcttaatttgctggttttgttagtaatgatatcattccttggttttatattataaaatattttgactctttttataagtcaaactcctataagattaatcaatcttatagaaaaatgtagtcactcttaccggatcaaattagttctattaatctaacatttgaatacattttaatagtatgtttgtttggtgtaaaaatattgttatatttttctataaatttaatcaaacttaaaaaattatataaaaataaaaatatcttgtaatatgaaacaaagggagtaagttgaagtccttttaccaaggacttgctcatgatatgattggcttgattatgacattatcaaggtgctctaatatcaacccatgacaacacaaaggattcgcttgtaaccctcacatttctgcacatatgaacactgtatcttgcacatacatatgtgtgcattcaaacttttaaggatcttagacataagtatatacgcaaatactaaaatcgttgtgttttaaatcattacgcaaatctcgtgaatcgttgtgttttgaatagtttatataaatacttaggagaaaaatatgatggtgaaagatgcattttagagagctagcaatgtttaatactccttacgtcccaaaatataagtagttttggatctcgatacggtctccgagatactactttgacaaacaatatctacgaaagtataatgttttaaataaaagagttgcatattatgatagttcgtttaatgataaatatatatagtagatcaaatttgcatgattaatctttctaaattttttgctattaatagttaaaatttaaaagtttaacttggcactattttaaaaatacttatattttagaacggatgaagtgtatataaggagtactcttatagtttaggggtgatttgctctgagtatgaccggccaaccaactgttcccctttgtctttttaccaacatcaatcattgatcagcccataaatatttgatctgacattttattagagctggtacaatagcagactattagccagctataaacatagtattttaatgagataaaaaataagagagaagagcagtgggctatctgtagccagctccagcgcggatttaaagacgcaatgtgtgtatgacaggtgggactatatattagtaagcaactattgtatgaattgacttttagattggttatcgataaattggagctagtagtgggctacagatcatcttatgcatgctgtcttggttgacccaaaaatcaatggaaca

SEQ ID NO: 8853 - DNA, 11409 bp, Oryza sativa
acaattttggcgagtgaaatctctagccaggtcgagttaattgctggttgctatatatattatgttacgatgggataggatgagggatggttgttaggttgagcgggagctgcaaaggctggtaccattatttgtataggttgtgtgataaaaaagcttgtagacattttgcatgtacactttgccgtagtggttggcgttggcagccataaacaggaacaccattgtctgtatgttacttgtttacggtctcatgtccagctgtttgaattttgtacctgaaatatttttttctttggacaaaaagatggagtatttgaatatttcgctcttgccagtgacttgtgtattctataatattatatgggtttttctttgagtaaataaatgcatttgccaaccctggttgctgtggtgtacaacaaaacaatgcaagtgttcctcgatcggttgccttgttgcagccttcacccctgcgctgcatgctgtgtgatttgctaattgggtttgttatgaagctggttatccgaacaaaatcgacgcgtttgcatgtgatttgctagttggatttgttatgaagctggttatccgaacaaaatctacgcgtttgcatgtcgcttggtcaggaatcgatatgtagagagggttacgacggcagaagatggtgtttttcgtcgaagttgctcgattctgcaacattgactagactcttctatattgttaatctagaaagacccagtgcaatgcaaacaatgggctctgcccgtctgccgtcgtctaaaacgttgaaatggggaagctgcagggcagggcttactcttccatctcctcttgtgtctatccatcaacattgaacaaagttgtcctagacctagctattcttcctcgtgcgtgctatggcatgcaaattgcaaagtaaaaaaacaataaaattgaatgaatctatcatcatatggacacatgaggaattaccaagctatcaatctgtcatctgcactaattaaataattgacaacaaaagaatgaatgaatgagaaatagtgcaacaaaataaaacgtaggtcaagccatgagcatcatgaccctgaactcgtcaaaggagagcacgccgtcgccgttgaggtcgaacctgcaaatcatggccctgcactcctccatctccagccgctgatgctctgaccccagccgcctcagcatccgccgcaggctcgccggcgtgatcaccgccgtttcttcttcttccgggtacatgtcaaacgcctccctcaggcaccttaggctctcctccgttggctcctgcaactgatgagcagcaaagagcctcatgacctcgtgggggtccagcaagccgtccctgtcggtgtcggccgttgcaaggatcgccgccgcctcctcctcggacacctcctccccgagcgccgccgccatgcagccccgcagcggcggacgcggacaccttgccgtcgccgtccttgtcgaaggccgcgaacaccgacgaagctgacgatgccatggcactgtcagtgattatatggtatctaatctaaggagaggattaatctcggttgctcctggatcgacaatataatcagagttcgcaagaaatacgtatatatgtagtgagtctaatttgcgacttgtctctgctgcaacttactatcgaaatcatcggtcgatctgatgatagctatatactcctatatataagatgatagagatgatccagcaggcaatacttactaaggtaagaggacagaaggttcagcgttagttaattcccatatatttcgatgcatggagttcacgcctatagcagtggaccgaccgatccatatgatgcaaagaaacgtttccgcgtcattcaacaatttagtttttctagaacatgcatgcattgtgttgctcgtgtgtttaaattttcttctcgatctatatatgttattattaattattcagtttttcgtactccatttaacagtaacctggtcagtccttaattatttaattagcaccgtctgacggacgcgtagcagtatatagttacaaattaatcaatcatatatttatactgttataacatgtggtgtgttatcttgcacttaattaattcccttttgaagcacggaagcatgataaatctaatcatcagaagtcaaataaatcatctgaccagacggccaggtattagacagtcatttgcaagatactagtatgacattatgacttaatgccagagtatatcagaatgatcaagctagcaacgcgttagtagtcacacgtttttatataatattacatacttaatagataaatagaatagatagaaccaggtttgtttaagaagatgatatttaatttatactaccaatagttttttgaagtttatatcatcgtccatgtggcatgccatgttggcaagaccatggtcaggctttggaccgagatgatacgttaaaccaagtttaaggatctcgacgcacgttttgcaagttcgtggacctaagtgaaacctcgttacaagtttaagtattgctagtgtaatttacttattaattaattccaaaaacagaactagggaaatgctgcgcgccgggcgttcgatggcagtggaaaaatcggacgcctcggacgcccgcgcctactgccactcttactttaaaatgattttctcttaaactaattatccaatctacgatccgatcacaccgttatattcgttgtaattaaatctttacaacaagaccacacatgattatatttcgacaaaaaaaatattttagcttttctattgatattttttttaatgttgcatatgatctctttcgatgtttcaaccagtagttttacgatgtttcagcaagtgtatttgcgatgtttcactatgtacggatcaaatgttgcaatgaattttgatactatggaacgcgccgttgcaaaaaatcacccacatattttggaaaccccctattaagggaatttggtttattttttgttccaccaaaaatatttcacctagtgtacttacagtgtttcactgtatatagatctaatgttacagtgaaatgaaatattccattgcaacaaaaaacccacatattttggaaaccccctattaaggaaattcgttttattttttgttccaccgaaaaatatttcatctagtgtacttataatgtttcactatgtatggatcaaatattgcagcgaactgaaatattctttcgctatttgctgaaacattgtttttatataaggtgaaacaacacccgatttaaacgagtgaaacattttcgatctatttagtgaaacaattccgatatatctggtggaacatcgcgcaacatttaaaaataattcaataataagctaaaaaaatttcgtcggaatatatccatgtgtggtcttgttttgaagatttaattgcaacaaatttaatggtgtaatcgaatcatgatttggataagtaatttaagagaaaaatcagtttaaagtagttttttcacgtaaatcggacgctgatgtcgatttttcccccaatatcggacgtccgagccggagttgtctccacagaactaataaagagtcgatggtagaaataagcttagcttgtgttggggatatgcatgatggttttgaataggaagtaacagtaaggtaagggcattatgatgggctggatggaaattgttcagaaatgtttgatggttgatgttagggagatatatggatggatcgataacagttgggcaggagaaagaaagcggtgataagctagagtgggttggtactacatgctcccgtatccgattcctgttgggcctccagccttattactgtgtttatatatacatacatcaacaaggaaggaaggaagcctcaacggaacaaacttcaacgtggaaggaagaaaggaaggaaaagtgtcagcttgcgatgaagcggcggaaaatccccaacccacagcagcagcttgggcagatttacgtgttaccacgacgacgacaaccacaccgcggactccacgctgcgccgtggccgcctcctccgcgccctcgtcgtgtccttggaccccgtctccaacatcatatcctcaacgccctttggtaccacaccgcctaccctctccccacacaccaagagttgccacaggacatctccgacacccgcgccatgtctcccgctccctcgacggcctcgtcaccctcctccgtgccatcaccaccaccggtgacacactatccaaacatgaggccgtggtccacgcaatgtgacctcaccgacaagctgcagcagcagcacaccgtgacgatgaccaagaagaagaacccatacgccgcagcagccgaggcttccaagcacccgcagcacaccgcgctcgggtcattcctcctgtccctctccggcgacggcgagaagctcgaccggctgcgccacttgctgagatccattaccgatggctctggccgtgtcatctccgatgctgattgggagcagctaaacgcaatgatgatccaagagcggcttatgataaccaaaaagattggcagaaaaagagcgctgcctcctccatctgctgctccacacgacttggcagaattatccaagagaaggtcagcctatgtgaagcgacagaggtttgctcgcagcaacctagaggaattgcttctcaaatattgcagacaacatccttgggtacgtaaattgaattcacactagtacaaacttaattaccttttggtttcttgattgattaattatttaattaattgctgcacttgagattgattatgctaaaatgtgtttgtaattgcaggaaccaaggtacaagcttgatgtcatctgtggactggaggaacccaaatcctatcactggagaagctaccatgctaacttcctggcaagcgccaatggcactaatgtgctcaatggtggtgaggcaaacccccctgtgcgcaaactgttcttcgccgaattctgggactcacaatctggtcgatttaacaaatcaaattcaaagcccatctgctctcctgttcaaaattataatgcatgtttcggtgagtcactcaactcttgttcctactctactactatctccgtttcaggttataagactttttagcattgtctatatttatatagatgttaatgaatctaggtaacatatatataaatgtggataatgctagaaagtcttataatatgaaacggaggaagtaatttttatttttgtcaaggaatgtattagacaggcacaataattgtggcaatcgttattgcaatttgcatgcatgttaatgccctactggattggtgtaataataatattgttttggctttcccagcaggtcgcctttgcagcttctgtgatgaaccaagaacgatattgcatccaccatgtgcaactggaagtcattctaatgacgatgacgatgctgatgccgatgtcattcctgactacaatgttgatgatgccattcgtatgtatggctctgttgcgcccgagcttagtgagggcagggacttggtagagtcagacatcatttattttgatcacgaaaaggatgctgctaatctcacacaagttctcaatgacccctccttcaaagaagaggacaataatttaggtcggaggaggaagcagtagtaattaggttccaaaacagagcatgttatgtttgctagctcagatcaggaacaggcatctcatcagaaattactactagaagaaagctgtacttgatgtttgaccttggaactttgaaacttttgtttgattagccttggaaattaataacaatgccattttttttctcttacaaaaataaagcaaggctatgcgcctatgccaaaaagagtatatgctaatgctgtgacgagtgattagtgttcacaaagcacgcacatatgtttgagaaaactgatcaagttgaccaaaaaacaaatcttcaatcggtaattccatcagttgttgattttttaaaagaggaactagacgatgagtttattcaggaacttgtgtcaacaatggccggattagctgtcactctgtcagtgaggcacggaggcttaatttcatgaaaagaaaagattatgaatttccgacctcaatggtctcatggcttaaactacaattggtgccactcgaaaaataataagcttgttccccatgtacggcaatgtctccggcgagcagctcatcttccgtcatcctcagcggcacgaacgccctgacgacgaccaagatgatggacgtggcggccacgttccatgcggcaacgaacaatgcggcggcgacctgcttcaacacctgcaccccgccggcgcggacgccgtagacgaggccccttgagccggtcaccggaaggaacatgtcacagagagtagggtgcgcgaaaacgccggtgaggacgccgcccagaacaccggacaccgcgtgggtgtgcaggatgcccagcgtgtcgtctaccttgaacgacatggcggcgttcatggtgtagcatggcagtgtccccgacgcgacgcccattagcagagctgcccacccctgcaccagccctgccgccggagttatgcacaccaggccggtgatcatgccctgcaccgcgcccaccaccgacggcctcccgcggacggcgatgtcgcagcaaacccaagcgaggatgctggtggtggtgcagatgtgcgtgttgagcaccgccaccgacgagtcggtgttggcggagaaggggtcgccgccgttgaagccggtccaccccatccacaggatgcccgcgccggccaccatcgccaccaggttgccaccacccgccattgtcatttcctcctcctccttcctccttggtcccacccagtacgcggccgtgtagccggagacgccggcggcgaggtgaacgacgtagccgccggagtagtccatgacgccccagtggaagaggaagcccccgccccaaatgctgtacgctcccaccgtataggacagcgtcgtccacagcggcacgaacgccatccacgccttgacgctcatgcgcccgagcacggcgccggcgaccagccccacggtgacgccggcggaggcccactggaagaacaccatgctcgccgacgggtacagcggcgccaccgcggccgtctccacctcgccgttggagtggaggtggagggtgaaggggagcagcgcctgggtgagcatgtagtgctgggcgagcgccggggcggggcggccgacgaagggcaggaggcggtggccgaaggccatgttgtgcgcccagagcgcccagcacggcatggtggcggccatggcgtagagcgccatgaatgcggaggtgagcgcgcacttgcgggtgacggcgccggcgtagaagagggcgagaccggggaagccctgcagggcgacgagcgtggcggagagcatctgccaggcgttgtcgcccttgttcagccactccggcaccgccaccgacgccattgctcttcctagtttgagttcgatctgctgcttcatctacttacaagatgatgatgatagtaacaatgtagtagtatattgattaataaaccatgtagtagtacagtcctaactaacaggacatatggagtagtaacaacctatgagagagaaaagtcgtgtgtctgctacggtgaattggggtgatctcattaacaagagtgcaactcactcacttgtgagtataaaatgtatagctcattaaccaacgatatatatatagcttgactggtggacaggagacaagagaaaatatcaagttctagggcttaccaacatagttgaaggaatctcagtttgtaaccccaatgagtttccttaatgaagcctggcagcccgagtcttacaaattttcagtattcattcatgacataaaaaaggtttggtctatctttatcatcaccgttgagatatgaactggaaataacatttcggaaattttctatccgaaagaattaaataaaagaaacaggaagaatgaaatttacaaaacaaacaaacctgcacacaacactcacaaaggccccagggtaggctccaaaaacaactaaagagtacgttttttttcttttttttggcgagaaatcaaattaaagctaccaacgaattcattcaaggagtaacaattgttcggaaaagtttaaataccaccagatgaagcatgttagctgcgtagatgtgccaccctgttaataagacacgaagagttttatagaaaatactaggacaacgaacaccctgttaacatattacatttttcagatttccaacgtaccaagagcacagacgcttacattgaatgacctccttcggtcattccggcaaaaaagagcacagacgccatgcgcacgcacaataccaaaaactgcctcagcacaacaagacagcaagtgcgtcactgcaaactgggtgtgcaagccaaacaagcttaagaagaatcatcagcttcagctcgcagttgcgccaagccttccttgtaaacttcgaagtcatcagaggaccaccggcagacaaggtacagtcggaatgttgccatctgcatcccaagcaaccgctgcaatacagaaattaaagaggaccttaatgcaatggaatagaaagacataggattggccaatgtgttttaacttgtgtatttcttaaagtacataataattacgacaccacaaagatgttaccattggcttggtcacaatattaacatcatcaaaaatgccaatctgattttgcatttttttaatcatgcacgatatgcagtacataccagagtttgtgctgcttctggtgaaatgggcttcccttcttcacatactatgtgatctgcaactaattttaccgcacctgcatcaaccaggccaaactttacaaccatttcgcttggtgatttccaacacgcgcacaaaaaatgtagggaaactgctaacctttgttcagacgaactggcattccttgcttgcgtagaaagggttccatttcatgtgtaaactgttctaaggggccttccttaagctccacctgacatatcatcaggttctaaatttagtaaaccatgttttatgaagaagagagagtgaatagttattccagacattgtgcattgcagacaccacagctaaaacaaaatcaccaaagagcttaacactgtcaaagtgcttttgacttaattttccacaagttactgtaaatcctactactttcattcctaaaatcaccaaagagcttaacattgtcattggtaacgtcagcataaatctcgataagcatggtcattctagattgtttactgagaaaacaagccatgaacagaggtacataaatagaaaggataacttgaataccgtttctgtcgcaatacttcctgtcctggcgaaatcatgctcttcgaattctcgaaataatctgcagtggaatatatggcaaaaaaaaagctcatatcaagcataggcagtcatcatgtataagtataaagtgcaagccattggatgaggagactacctctctacatcatctcttggaagattagtaaagaacagtccagtatcaccttgtaggaactaaatacagaaaacatacatcaagtaagagctcataattcaaaggaatggtgtggattgtattatatgccaagtgttaagaaaggaaaatgtcaccttggaaagtttatgaaggcctgttttagcttcatcagcaggtgaacgccccaacgctatctgcatgaccttctttccagcaaggaatatcctgacataaagggagtatgtaagaatttcatcaaacagccaacctagaatagcctttgcaaatacatgcaaatatgttgtagttgcaaggttaaagcgaaaagcataaccgaaaagcgaaaattcaatctatgcagcatatcgtttgatgctttgagcagagaggcacagtactggctagactagtaatactaataataataagaggcagctacctgctggaggacttgagctgctctctgaggtccttgagcttctgattcctcatgttatcgtaggtgaagacataggcattagcgtagtgctcgacggcatctttgatatcggtaacaactttgcccttgcgctctaatccaggcttcttcttggtcttggataaggttactgcgctcgaatcaggggcacaaattagagctttggtgctgataactaactaattacaaaacaagagcgatctgtgcagaatatgcaggatagaaaaaaaaaataaaaagagaaggtttttggatctcccttggccttggggaaacagcatcacagcatagtctgtaccttactactggcgagtgaaaagcatgaatgaagtaaacaagctgtgcaaagtaaactgtatgattctctatgattagaactaacagcatatataaaattgcaaaagataggatatgagcgaggtaagaatagaatcagtcagatagatggatgagcaacgaatcgccgcggagtatagggattagatgcagttaccagggcggttgcgcttggatttcggcatcgcctcgtattctcagctcgtcctcgtcgtcggtgctgttgcggctggcggtggcggcggcgatgttgctctgtggggtggtggctctagggtttaacaagacgtcgtctgtttggatttggacacaaaggaaggaaagaagggaccattgggctggcctccttcatgggctcctcaatatatgggcttgaacatttttctcattttatatatgggtcgaatattccaacttaaatccttcaaatttcagccttcttcaattttttatgaaggaaatgtaaatgtatgttttgcactgcttcaactccagcttcatgtctcttggagctagagcccagacaaatagttttaacaccatctaaaatgaaagtagagttggttgaagcgctatcacaaaataaattagagaaacggatctgattttagactgctctaactccacttcaaacccaactactcgtccaccatctgatctcgccgtagggtcgatctagccgtccacgtgtcccagtgtgctggcccttccacgcccgtgtgatcgtcggattgtggacggacggcttggatttcgcgaaccggtaaaaaccctagccgcctgtcctctcctctccccacacccgtcggttcgctcgccgcctccgctcgcatgcgccgtcgccgcctccgctcgcgtgcgccatcgctgccgcagcccgcagctccctctcctctaccgtgctgcgccaccgctccctcctaatgagccgccggatctcccagtgaggaggccggggccgctgaatccggtgaccccggtctgctcgctggcggatccggcgcaaagacgccccacctcctccgtcgccgccgcagctcccttctcctctaccgtgctgctctggccgccg

SEQ ID NO: 8854 - DNA, 17891 bp, Oryza sativa
gccgccgccttttattccactgccatcgctgccctctcctccgatgccgatcccgatgccgccgcctccatccaaactgccttgactgtgtgccaggcgtcggcacaagccgccggtggtacttgccgccgttgatccgcaaccccactcttcccctccacaggttagccctaaactcccttgctccccattctccatgtccctcttctctcttctccattggaggtaggcgcaaggagcatttgtttttgtttttttctcttcacaattttgtaacgtagaagataggattactaaaccattgttgatcccatattattaaacatgtcagttctattgaactttttatatcttgatgaatgtgtatgatgatttacttgatactactttgatcaaacacacatattgctgtcatggtcttcttggatgctatattgctattggccagcttaagatgcttggattaggtctttttaagacttcatcagaatagttgcacctagcaaagtaaaaaccagcaacttagatggtccctcaagatgtcgaatagccatatccctaattcatcacattaaatctgaatgcaataaaatttgttaggctctatagttgagtagaaatgatatggttttttgacaaatcaccatctatttcctatatgcaggtaattttcagggcaactcattggctccgattttgggcacaattacaaaggtgtgatgaagatggagagtttctgaaagttgcatgtcgcgagttggagacaatggtgttaacgaccaaatttggtaatatcagtatcggaaaggaagattagatcgaagcggaatcaaagataaggattatagcggaaacagagtaagaatcgactggagtctggatcggctacgattggatcggctaagttcgagtcagacttggcttggtgatgcggccgattccgacaatacgacttggtgtacaacatcgggttgggttgatatgcttcaagatgattgccgcgcatggatatagtcctgagaaggcaattgtatctattaattaggatattttatgtaattcccttagaaatatgtttggcaaaagtctgccgcaaagacttatggtatcttagagtttgttagagataaaagtcgtgtccgatatggacatagtttgtaattctcgggtataaatagacctcgaaccccatttaattaaggaacacacacgttcaatacaatctcggcgcatcgccaccctttttgctttagttttatttcaacgagttcttactttcgggttgagctgtatctgtctcgatcttcaacaagaggtaaaacttgttatgacggcttgcgttctcgggattagtgcttccatctttatgatactctaatcttgtttatgtaattcatcgagttatcatatatcttacataatctctggcaatatcgctatctaacctacaatcggctaacatctgtcggtagagggcagccgattagattagacatcgatgttgacttagattatataggatatccaccactctatgaaacttctagcggcttgattggctagatatcgttcttcttttcatacttaatgctgcatcagttgagtttgatctattaagtcgtgtttagaatatcagtctctagcttgccttctggttgccgattagagtagtatcggggtttcagccgatcttacctgatttaactacatttattctatatgcttcgctgatatgttaaatctaccctctgtgctaagatcttgttgcatttacgtatattaggcctttgttcagtatattctacttgctttaatatcttagtatagagtggtatcggagtattagccgatacatgctatatctatctgatcggctatgctatgagtatatatagtcccattattaatatatatttcgatgtaagtgatttatactgtcttgacatggtgaccgatctatcccaatcacttgatttaagtatatatcgatatgaggagtatatattgttaatatctacagccgatcgagtagatttagttcctttttaattacttatgactgccgatcgatacatgtatgacatcggctcccagataaatgatatgtcatcggcacttagccgatcggctatcgtttataggttccacggtttatttgtctttgttttttgttgattgcaggatcaaatcaactggcacgctagcatacccgaaggcgagtttttgacctgcactggagttaagcagatctcccaggcctcgtgtttttcattaacaaatggttatgcaactttatgccaactatggatggagattaacaaataggctggaataaatgtgttcttcttattttggttttttcctatttaagtgtgttctattttatttgaactacactattatctcgagtgctactttgtaataattagctgtagctcttcttgagcaaaggccgggatattatattccatcatctaaaaaaatataagcagtctagctgattggtagtactagttcttttgcttttaaaaatgcgctcttgcaacctttaaatacaaagaaatacataatctagtatgcatgtattcatcgtctgtacacttaatcatcctttcctgccatattgggatttacacttgtatttttctactttttagccactcaattaatcttgcctttcaagtttcaacaaagaaaataaaccagtcaactgtggaatgcagcatgcatggttagagctatgaaatttgtggagcagatgtctgtgttgtacacatcttgcttcttagctcttcaaacgccttcatgctttcctcgtcaaagcctccggcaaactatacaacacacaagaataagttgtcttatgtcagaaaagaataagttgtcaagtagataaatttcaatttctcaatctattaacttattaaaggaataaaaaaaggagcatccacgttctctcttatggcctagaaattctcatattaatcggagaaaaagaaaagcagaattcatatagcaataaaattaagaaaaaacagaaattcggaattaaaaataaggaatattagaagtagagtatagagtccatatagaaatacaattaagaagtaatagaaaatcgaaattaaaaataaggagtattagaagtagagtatagagtccatatgaaaatacaattgagaagtaatagaaaatcagaattaaaaataaggaatattagaagtagattatagagtccatataggaatttaaaactaactaaaattcagaataaacataataaaattaaaagtagagtttagagttcgtataaaaatacaatttaaaaataactaaaattcgaaattaaaaaatgggaagaagagtctaaagtcaatataggaatacaattcagaagtaactgaaattcaaaattaaaaattaaagattatcaaaagatgaatttatagtccacatagaaatacaattagaaataataaaaattcagaattaaaaataaataatattggaagaagagcctagagtctatatagaaatacaatttacaaataacgaaaattcggaattaaaaaaaataaatattgaaagacgagtctagagttcatataggaatataatttacaaataactaaaatctgatattaaaaataattaataactaacacgtatataaaatacacatattaatattacacattagtagtttcataaagttagtataaaatttaaaattatgtggctattttaatatatttgaataatacattaaaaaaaacatatatgctattatatgagagaaaatataatgatgctagccgcgcaatctgcacgggccatcatgctagttcagattaatcaacaccatcatgttagttcagattaatcaacaccatcgtatatatgcccatgaattatacctgatgaactcggaaagcaaatctcacaccctgaagaagcaagaactctctgttgggctctttctcggtgccttgcaaggcatctagctctgtggcaaccctattcatatacttcttcgccagctgaacagatgccaatttgatctattcccaacataacaagatggaatttcgattttagatttcctacatggtctaacaaagtggcaatagatagaggctagagatgtatgttaaccttgccaactaccccggaatcagacagccaatccaccggtattccatactccctgtagcgtgatatggccatgtctctagtacgaagtagcgcataaacactctgctccactctgacataagtatgatacttgttagtccaattaaacatcaaatgcttatgcttgctaaagataattggacttgacaagatatttattatcttactctgaggaaccatgtaatttgggagaagaatggttcagaggagatgcttacgtttcaagcaaggaatacatcttcttgagagcttcttcacatgcaagctttggatcatcagtaaacgacgaaaccttgtgttctaattttagcaggtcttgatactcaaaggctgcctctcttagtgcatcagttttgctctctggccaatcaaagtgctttagtactgcccgctcatcgacctaaaacgttatttgaccctttttcagtactaactattttgtcatgtggtgcattgaaaaaaaaatagataagcttaccaagaaggatagttcctcatcaagccagtttacaaatgcaacaacgtcgtcgacgtttacaaaactagctgctcggacctcatttgctagagactcaacaaagtctccttgtgtctccacatccactttgacctgaaacaaatccatttttttatataaaaagtaagtcctcataataatctacctgaattagcagtggactaaaggaattcagtagtatatatttctgaaaggtagcatcatcttgaataacttacagctaagaggaatgttgatctattctcaatctctccaatcatgttgcttctcacatcagagacacttgatgttgttgatcccagagaagttgtgtccttcttggcttcacgcttcatgagactttgatagaactctacaacctctggagcacggtgtaccttgtcaccaccagcaagattcctaggtagggaaccagggcgtggtggcggcggtggcgggccaccaggtttgccaggaggcggtggtggaggaggtgcacctggcgggcgtggcggtggtggaggtaacgcacttgcagtgttggcagtggctgatggtgcaggaggtggcctaggaactcttggagctctcttctcaatatttgcaagtttcagttgtgtcacaactagagggttgttctggttatcactaggttggtcactggattcagcattagctgtaggagccttttcctttatttgagcaagttttggagggagtgcagatcttggagatggcacaatacctgaactgttgacaccgccatatctttgtaccctagctttctcggccttctcttttattgccttctcccgttctgtggcgagtttatgcctatctttgtaagcgggatacttgtcatcagcaaaaccttgtacagtctttgacatcaaatgaaatgaagatgcaacatttgcctcatccatgatatcactgggatcttgttccctctttccaaaggttgtaatgcccataccatctcctgcgtttctgagcatgagagcctctaggggcccctttggtttctggctggcgctctttggggagtcactagtgaaggactgtgtcggtgaagctaagctgcttccgtcatccttgccccttccccacttcttgagcttttgcatcagattgggccttttgccaaagaagctgtatctgctagaagaactgtcaactgaaacgttgtcgaagtcttcgcttctgggtgaagaaggtgcagaagaagcagtttcaaggtcagtgtcgccctgtcctcgttctgatcctgcatattccagcattagaagtttggccctctcacgcgattttgggctcagggtcttgttaaggtcacgagcagaaattttctcagacggtgcctggtagttgcggagctcatatctcagacaagcattaacccaacgcaggtaaaccaactcttctacttcactgaatctgttcatttgtaggccttctacttgcttggtaaggtcttcatttgcatgcctcagcttgttgatctcctctcttgcatgggaaactacatcactctgcacaatgataagctctgttattaatatatctgtatatgctgaaaatgaacataataaaaatatctattgctagttcattcttccttttctgagagaagcagtgtgaaattatgatgtggttttgaaatataagtttagctcttaatatagctatgcattattgaataggcaagggatttttcagttaaaccaatgctagtgtgtgcaagtctagtccaatggataatattcagcggttcaatcctttaccctctctcttcagcatgctcagatcatgctcctcttttcctaatcggtaatgacaaaagaggtagaccacccagttttagatttgaggcatattggttaagaattccaggtttcctagatgttgtgcaagaatcttggaacaagccgatactagccacgaactgtctcgctactttcagcctaaaacttcgtcgtcttgcccgtgatcttaagagatggaatcgcagtcaggtgggggatattacgctacagcttgcagtggcgatggaagttgtctttcaacttgacgtggcacaggagtcaagagttttaaccaatgatgagcggcagctatactcaaacctcaaagcacgtattttgggcctctcggttctgaataagttaaagatcaggcaacgttctaggttaacatggattaaggagggtgatgtaaattccaagttcttccatataaaagcaacctcaaggaggagaaagaacttcatccaatcactgaaaactccatcaggcttagcagtttcagccaaggataaagaagatgagttgtttagattctatagtgagaaattggggacaaattttcaaaggacgaagaatctgaattggaccaatttgcaactgccttcttttaatctgtccgagctagaggaagacatctcggaagaggaacttagaggaacgatttttggcatgcctcccgaaaaggctccaggtccggatggtttcattggagcttttttcaaagttgcctgggaaataatcaaaggtgaccttctagcagcggtgacttccttcatgaacctaagcacttcacatcttgaggagctaaattcggcctacatctttctgctgccaaagaaagatgacgcttcaggtgctgatcattttcgtcctattagcctcgtacacagttttaccaagataatcaccaaagtgttagcaaatcgtcttgcactgagactaaacgagatgatctctcaaaatcaaaatgcttttgtgcgaaaaagagcaattcatgataatttcatttttgttcaaaacttggttcagcgcttacacaggacaagaaaacagagtttgttcattaaagttgatattgccaaagctttcgatatggtgtgctggccttacctccttgatgttcttcgacagttcggctttggcaaccgttggctcaattggatctgcaacctttttgccacctcttcgtcccaggtccttctcaatggtgcaccgggacaaccaattcctcatgcgaggggtcttcgtcagggcgatcctctgtcaccaatgctctttattctcgccatggaacccttccactggattcttaaagcggccgaaggtgcttccatcctttctccgttagagagtaaccgcaacaggttccgttgctctttatatgctgatgatgtagctgttttcacaagaccagatgcgacagagctcaccaccctttcaaagcttctaaatttcttcgcgcaagttttaggcctccacacaaatgttgccaaaactgaaatttttcctattagatgtgaaggaattgatctagctcctttgttgcaaatcttcccaggcacaattaagtcctttccctgtcgttatcttggattgccactccactaccgaaaattgaggaaaattgattttctccccttaattgagaaaattggttcacgactccctacttggaaaggaaggtttttctcctcttcgggtcgcgaaaccctggtaaaaacggttcttagctcaatgccaatccaccatctttcggccctccaaatgccaaagtgggttttcaagagaattgataggtttcgaagatctttcctctggaagggcgaggacccagaccattcaaacccaggcagctgtttggtaaactggcagacagtgtgcagaccaaaatctttggggggattgggactccttgatttggaaaaattttctagagctctccgtctcaatggctgtggcttaaatggaaagacgaggacaaaccctgggctggtatgaatctgccttgtgatgatatcgataaaaggttgttccaagcagcaactacgatcgcagtgggcgacggagcaaaaacaagtttttggcatgatcattggcttcaaggctgctgccctaaagatattgcccctctttgttttcagctagcaaaaaggaaacaaagaaatgttcagttagaggtttcatcaaacaactggattctctccttcaggcaattctcgtcaatcgaagagatccacgacctcgtgcggctgggaggcatgcttcaagattttcatctatcacaaagtgccgacgatataacctggaattggaactccgcaggttgctactcaagtaaaagtgcatattcttaccaatttgaaggttctttcactcgtttggattttgtctctctttggaaggcgccagctgaacctaaaatgaggtctttgggatggcttattcttcaccacaaaactctaacggctcagaacctccttcagagacattggccttgcaattggatctgctgtctttgcaccgatgcctttgaggacactaatcatcttttttgcgaatgctccttttttaaagaagtttgggcactagttcacagttggcataatttgctagtttctaattcacagccggctgggatcgcttcttggtgggaggatatcaatcgacaaggctcagcaatccaaaagcaggatattagaggagttttgttaaccacttggtggaatgtttggcttgaaagaaataggagaatttttcacaataccacttgtacttcgttccaagtagcatactttgttaagcaggacctagatttgcggaggactgcttttagtcctccttgatttcctttttgtttctgggactgtaagttttttttttttctcctatcaattaaattccggcagctctcctgccgtcgtttccctcaaaaaaaaatatattcagtgttgataatgtgagaggaaagtctaaattctgagtccttgtcatgaaattgattgatggaatcccaagggaaaattaaaagaagaagaaaaaaaaataaagcctatcattttgtgcctatttttcttaatgtgaaaatgtaggacagcaaccagctgtctgcatgccacataaatcatgaaaaaaatatgtcaacattaaaaacaactgttgctgctgcaaatgatgccacgcaaatgtgaggctttaaaagcatataattgctgagtgaaaatgatactaatatcatacctctgttatttttccttgtgctgcatccagctttacgatgagatcccttttctcatacaaaagctccttgttcttcctcctcagctcaactacctccacttccagctccttgagcttcttcagcttcctctgcacctctgcgtccttgatggctgcctcctcctccttggacttcagcgcaatcacctggttctttagaagcaacagctgcccttttgtctggttcgcctccatctgtatctgtcgctgcagctccttgatcttgttcctcgcagcctccagctccctcttggctcctgtgccacgggcgacgtcatcctgcagcttcttcctctcctcttgcagcgagttgatggtcattttgagcatgtcgatctccaccatcttgatcttgagctgtctgtgtagctctacaacatcagtctcctgttccttgaggccatagtactctagcagctctccctcaagcttcacttccctctcctccagctcacgcacaagtccacgcagcctctccagctcggagttaacactgttgtaccgagagcgttctttgacgtcgaacctgtcacttggtagggggatgtcaatctcccctgataggaggctctcgatctcggagagcatgtcgtcatcatctgaaagagctgaattgattatgccgctgattgttttaacctcttccttctcttcttctttctccccctgaaccacagcaattgaaaagaacagttaaacgcatacgtgttcagaacagttacagttaaactcacaagttctaagctagtagagaatggcatgcacttacatgttcagagtagcgagttttatcctttcctttccttgcttggccatctgttgaagttcaacaagagcttcagtgagaaattcagaggaacaaattaaggaaggaagtgccactgcaagagagaagcaagtatagtacctctgttgccactgttggctctcttaagagttaaagctgcgacggaggctacaacaacgacgcctaacctgacaagcatggctccttgccctcatcactgtcccgggcaggagagctgacgacgcacagagctcccttggctcatcagaaactggcaagctatgagaatggcaagccagatatatcttgggctagagatagatagatacattggaggaggagagctccagctcgttgccttggaatgagtgaaactgtgaaagccactagaacatgtggcttgcaaacggttccttccaatttgtctgtctctatatgtttatctcttcccttgtttgcaaaaacagacaggacttgtatagcagacgagctcttttctgtgtgctagcagtgtggcacttactaatagctgacaaaatttacatatgctgacagtggcaggaagaaagcatgcatcttaatttgtggcttctgatttgcctgtcatgatacaagtacggcttgtggcttgaaagctagcttaatacgcaggctgtttcctgtgcacaaaaatgggtggtagctggcgtttgatagtgataattggatagcaaagaccagacgatagttgaggcttacgaggctcacaggatggagcattgcttatcattaccctcttctggacacacctgcaaagggcctgttggagatttactacagtagatctaaacagtaaatgggaacagtaatcaggcaagctgtaaaaagattactgcttacagagcactttgctacagtactgaagcgctgttcggtgcattgattcaccgtagcagtctcagaatactgtagctacagttattctctgctgcactgtagagaacctagatccgtttgggggagcttctaactgctgcagcttctcccagaatcagaagctcccctaaacagtctagcttctggtctagattctaagaagttgtagttgtagaatccataaaatgaagtagaagccagaagctgggaaacccagctgcttctcagaatcttaatctccctcaaacaagcccaaaaactaaaatactaataagctaataacacaccagtgcactcaccaaaagtattgattttctttttggcatatttttaggaatctggaggttcacatcttaattttattggcattgttttcaggcctgtaatctccatggaatggaagtgttggaataaatgggctaggcccaatttaattcaattaaaatctcaagagcccacaagtaatgttagagagaataatactgccttaaaaatttaggtggaagaacctcaacttaaatagggtgatattagatattccctgttgaccggttgaggtgatggttggactgccacacgcatgcgcgcatgccgagtcggcctcggccgtgggcgtagcgaggcgaggcggcagaccgagtcgagcctgcctgctgctcttccgttttgtaacagacgagaataaagtcaccattaacaaatgaaattcattgtgttgtaacctccgcaacaaatgagagattcattgtgttgtaacctccacaacaaatgagagattcattgtgttgtaacatccacaacaaatgagagatttatttgttgtaaccttcacaacaaatgaaagattcattatgtggtaaccttcacaacaaatgagatttattttgtagtaaccttcacaacaaatgagatttatttgtgtggtaatggagatctttctctctctacatataacgcaaggcagaggctctcaaagtgtgtgtcttcctcctactattgttccttggcgatactctccttctgttcctgcgctgtctctctgtttccccggttctgttcatcccgcgcgcacgggtgatcggaacgagcaggtgcctccgaaactccgtccgcttgagaacctgcacgggtaggcgggcgatcaagtttttgggttgcgcttcaagtgcgactgctctgcatcatgttcaccaacatgtcgacaaccggtgacaacaacaacactggagacaaggacaaggcaatactgcctcaaactccagcggagggccattctcggggtataacgtttcactattaccgttcgttcttcgtttcctacaactgtctgtcgcaatattattgcgttctcttatctatgttgatgcttattctatattaagcatgctcatgttgtacacatctagcactgtcactagatctactcaaattacaaatgtcatgtttattgtcttaatattttggattaaaatatgccgaattatgaccaaatttccaacaatccaaaaacttgataggtctttttcggtagttggctttgctgcatccctaaaaccacatgctttcgatggttcaaattataaaagatggaaagcacgtgcacttttgtggttgacggcggtgcattgtttctttgtctcacggggcaaaccaagtgaactgcctctctcacctgaggaggaggctaagttcgaggctgcggattgcttgttccgtggagcattgatcagtgtgctcgccgacaatattgtggacgtgtatatgcacatgccttcaaggaaggacatgtgggatgcttttgaggccaagttcggggtttccgatgccagcagcgagctgtatgtcatggagcagttctatgactacaagatggtcgatggtcgttctgtagtggaacaggctcatgagattcagatgttggcaaaggaacttgagaacaacaactgtgagttgcctgacaagtttgtggcaggtggcattattgccaaattgccaccttcttggacggactttgctacttctctaaaacacaagaggcaagagttcagtgttactgatcttattggctctttgggtgttgaggagaaggcgagggcaaaggacaaccggggcaaaaagatcgagggaggttctagcgccaatttggtgcagaagaagaaccctcacgcatcccacaacaacaacaagaaagtcaaacctgacgtcaaacccaaggctacaaccaattttaagaagaaaggcaagggaaaggcaaaaggaggttgctttgtgtatggcaagtctgggcattgggccaaggattgtcctgagtgcaaggacaagaagtctacaaacatggttattagtgagggcggaggaacatcgaggtatggtaaatttttacctacagttctctctgtctgtcactcacctgattggtgggttgatactggtgctaatattcatgtgtgtgtcgacatttccctgttttcttcttatcaggtcgggagaggttcctccttgttgatgggaaacggatcgcttgcggctgttcatggtgttggtacggtcgatctgaagtttatttcgggaaaaatcgtgcagctgaagaacgtgcagcatgtcccttcaataaagaagaatctagttagcggctctctattgtgtagagatggttttagacttgtgtttgaatccaataaatgtgttgtatctaaatatggaacgtttattggaaaaggttatgacagcggaggcttgttccgcttttccttggatgatatgtgtaataaagttgtgaaccatgtaagcaatgatgatgatgagtctaatgtgtgacattcacgactctgtcatgtgaattttggttgtatgacacgcttagccaacataagtttaattccaaaattcactttagtcaaaggctctaagtgccatacttatgttcaatcgaaacaacctcgcaagcctcacaaggcatctgaggcgaggaatttggcaccactagaacttgttcattccgatctgtgcgaaatgaacggcgtgttcactaaagggggaaagaaatatttcatgacactgatagatgattgcactagattctgctatgtgtacctattgaaaacaaaggatgaagcattacattacttcaagatctataaggctgaggtagaaaaccaactggaaaggaaaatcaaacggttgaggtctgataggggtggagagtatttttccaataagtttatttctttctgcgaagagtatgaaattattcattagaggacgcctccctattcaccccagtcaaacggggtagccgaaagaaagaaccgcactctaactgagatggtgaatgccatattagacactgcaggactttccaaggaatggtggggtgaggcaatattgactgcgtgtcatgtcctgaatagcattcctactaagcataaggaagtaacaccattcgaggaatgggaaaagaaaaaattaaatctctctcacctgcgcacatggggctgtttggccaaggtaaatatacctatagccaaaaagcgtaaacttgtaccaaaggccgtagattgtgtgatccttggttatgctatccacagtgtgggatatagtttcttcatagtaaattctgaagtaccagacatgtgtgatggtacaatcactgagtccagagatgccactttcttgagaatgaattttctatgcataaagcacatagtacttctagtcaagtacctattttatcccatgagcactctaagccgataatgcatattgatcaaacgcttgaggaaaatcctaaggaggataacattgtagcaactcgaaagagtaagagacaaaggactgcaaagtcttttggagatgactacattgtatatcttatggatgatactccaagaaccattgaagaggcatattcatctcctgatgctgactattggaaggaagcggtacgcagtgagatggactcaattatgtctaatggtacttgggaagtcgtcgagcgtccatatgggtgcaagcctgtaggatgcaaatgggttttcaagaaaaagcttaggcctgatggtacaattgaaaagtacaaggcaaggcttgtggccaagggttatacccaaaaagaaggcgaggactttttcgacacttattcaccggttgctcgcttgaccacgattcgagtactactcgctctggcagcctctcatggtctactcgtccatcagatggatgttaagacagctttcctcaatgaagagttggaggaggagatctatatggatcaactagatgggtatgtactagaaggtcagaagggaatggtgtgcaagctgttgaagtccttgtatggtctcaaacaagcgcctaagcaatggcatgagaagtttgataataaacttacatctgctggctttgttgtgaacgaagctgacaaatgtgtgtactatcgctatggtgggggagagggagtgatcttgtgtttatatgtcgatgacatattgatctttgggaccaggctcaatgtgattgaggaggtcaaggactttctgtccaaaagcattgaaatgaaggatttgggagtgggtggtgttattcttaacattaaactactgagaggagatgagggtgggattacacttgtgcaatctcactatgtggacaaggtcttgagtcgctttggttatagtgactgcaaagctgctcctactccttatgatcccagtgtgctattaaggaaaaaccgaagaatagcaagggatcaattgagatactctcagatcattggttcattgatgtacttagctagtgcaacgaggcctgacatctcatttgctgtgagcaagttgagccggtttttttcaaatccgggagatgatcattggcatgctcttgaaagagtaatacgctatctaaaagggacaatgagctatgaaattcactacgccgggtacccaaaagtgctggagggctatagtgattcaaattggatatctgatgctgatgagataaaggccacaagtgggtatgtgttcacacttggagggggcgttgtttcctaaaagtattgcaagtagaccatcttaacgaggtcaacaatagaagcagaactcacagctttagatactgccacagttgaggccgaatggcttcgtgagctcctgatggacttgccggtgcttaaaaaaccagttccagcaatcctgatgaactatgataatcaaacagtgattattaaagtgaacagttcgaaggacaacatgaagtcatccaggcatgttaaaagaagactgaagtctgtcagaaagcagaaaaactccggagtgatagcattggactatgtcgagacggctaaaaatctggcagatcagtttaccaaggggctaccacgtaatgtgatagactgtgcattgagggagatgggcttgagacccacttagagttgcacaatagtggaaacctgtccattgtgatcggagatcccgtgaatttggatggcgaaacaaactattgtgtagctgagagaagagaccctaaaatgagcctatcttcatgatgcacttctcttctaatctgtatggtaggatggtatacaccttaatgtgatccgagtggttttttataaagcagagatgttggcctgcagaacatcttaaaaggaacacacctatatgagtccaactgctagtcacagtctatgagatctgggtgatctctagatactcatgaaaaggccaggagtatgacttatacgctccaaacagaggggatgcaaacgacagcccagtaccagttaagggtttgagtgaaacctgaatcacacaagactgataattcaaggcatagtccattgttcagttgtgatctggtgtagctcttttctaaggtggaagttcaacttaacagtctccatcgaaacactggtataactaacaggttcagttttgagaacatttcttgtgagccatgaaatttggtgggaattgttggaataaatgggctaggcccaatttaattcaattaaaatctcaagagcccacaagtaatgttagagagaataatactgccttgaaaatttagatggaagaacctcaacttaaatagggtgatattagagattccctgttgaccggttgaggtgatggttggactgccacacgcatgcgcgcatgccgagtcggcctcggccgtgggcgtagcgaggcgaggcggccgaccgagtcgagcctgcctgctgctcttccgtttgtaacagacgagaataaagtcaccattaaaaattcattgtgttgtaacctccacaacaaatgagagattcattgtgttgtaacctccacaacaaatgagagattcattgtgttgtaacatccacaacaaatgaaagatttatttgttgtaaccttcacaacaaatgaaaaattcattatgtggg

SEQ ID NO: 8855 - DNA, 1258 bp, Oryza sativa
gtttgttatgaagctggttatccgaacaaaatcgacgcgtttgcatgtgatttgctagttggatttgttatgaagctggttatccgaacaaaatctacgcgtttgcatgtcgcttggtcaggaatcgatatgtagagagggttacgacggcagaggatggtgtttttcgtcgaagttgctcgattctgcaacattgactagactcttctatattgttaatctagaaagacccagtgcaatgcaaacaatgggctcgggctgccgtcgtctaaaacgttgaaatggggaagctgcagggcagggcttactcttccatctcttctcttgtgtctctatccatcaacattgaacaaagttgtcctagacctagctattcttcctcgtgcgtgctatggcatgcaaattgcaaagtaaaaaaacaataaaattgaatgaatctatcatcatatggacacatgaggaattaccaagctatcaatctgtcatctgcactaattaaataattgacaacaaaagaatgaatgaatgagaaatagtgcaacaaaataaaacgtaggtcaagccatgagcatcatgaccctgaactcgtcaaaggagagcacgccgtcgccgttgaggtcgaacctgcagatcatggccctgcactcctccatctccagccgctgatgctctgaccccagccgcctcagcatccgccgcaggctcgccggcgtgatcaccgccgtctcctcctcctccgcgtacatgtcgaacgcctccctcaggcaccttaggctctcctccgctggctcctgcaactgatgagcagcagagagcctcatgaactcgtggtggtccagcaagccgtcgccgtcggtgtcggccgttgcgaggatcgccgccgcctcctcctcggaaacctcctccccgagcgccgccgccatgcagccccgcagctcggacgcggacaccttgccgtcgccgtccttgtcgaaggccgcgaacaccgacgaagctgacgatgccatggcactgtcagtgattatatgatatctaatctaaggagaggattaatctcggttgctcctggatcgacaatataatcagagttcgcaagtatatacgtatatatgtagtgagtctaatttgcgacttgtctctgctgcaacttactatcgaaatcatcggtcgatctgatgatagctatatactcctatatataagatgatagagatgatccagcaggcaatacttactaaggaagaggacagaaggttca

SEQ ID NO: 8856 - DNA, 5235 bp, Oryza sativa
tctgtttggacacaaaggaaggatcattgggctggcctccttcatgggctcctcaatatatgggcttgaacatttttctcattttatataggaaaaagtacaccgaaggtctctcaacttgtaagggagataaaaaatgtccccaaaccgtaaaaccatgcggagtctcttaaatatataaaaccggtcacccctgaggttcttcacgccagatttgtccaacgtgacggctgagtcagcgtggaacccacattgatccatatattaggatgccacgtcatctctcccttcccctctctctctccctcactttgctcctcgtctggtggccgatgatgggtgatgcggcggcgacttggtgcggcgcagacgaggatggggtcggcgtcgagcccgggggcagaccagggcgaggcgacggccatgcggttggccctgaccgggaaggaccgagcgccacggcgtcgagatccaccccgcgcgcgacggcgccgagagagggaaagagagctccaaccgagcgtcacggcgtcgagctccccgacaaaggccggctgggagagacgagagaggaggaggtccggcggccaacgaccggcaaccggcaggggagaagagcagcgtgccgccgtcgcatttgttggtgacgaacgcggcggagcagccggcgcggaagtagcagttgaggaggagctttgctctggtccttgccgctgtaccagccgacggtgacgatctcagcgctgacgacgagaacgttgaagaacactagaatcctactgatgaatgcatttaagatactacattagggaattaaaccccgcttgtttcctactactgaagtatgaagagattacttgatccttgttccttttaatatgtcattctgaattctgaagccttgctcttgttagattggctgataccccaggcatcaaaagaggactagaatctccttcagcatggaagtccccttggttcgtagatatgcaatttcaggtacatttagcactttgtaaaatttatgtatttgaaatgcagagctcaagtgtttggaacaagcatataacttggtgaactatggctaaatctaagcggatggaaatatatttcttattattgagtcatgcctgagagtatttttttttcattaatcacttatattgtcacgcactgtgggcattgcttgctattgttttctctgctgaacttcttgtggccatatgttcctcccagggttcatacttcgtcagcccagctgatagaacctacgatgcgctaagattggtgaagcagatagtaataatgcgcagactgctgctgctttggcagaagcccgtgagagggaaaggctggcagttgtgtttctgtaatccaacaactgtaaatggttttgataaatttccatccatgttgagcataaattaacatcattacccatgccacgtgtagcgacggtcatgaactccacgctgccgtcgtcgaagcagccgatgagcttgatgtgctcgagcagcccggccaccggaatgcgcagcggcttcaggcacgcgaagtcgacaagcccgacgcgtcgccgcttcacggtgccgggagtggtagaggagcaacatcgcgaagtcgacgagattcgttttttattggatggaggagtatgcattaaaacataaaaggcctattagctcagctggttagagcgtcgtgctaataacgcgaaggtcgcaggttcgagacctgcatgggccatttcctcttttttactgtattaccttcctttctcattttcctttttccttttttaaacagggctgggcctgggcatatgacatatcagcatatggcattcccacttcagctctcaaggtttgttccgcctcttttcagtgttgagaatagcttcttcaggagtagcttctataagcagtctagctgattggtactactagttcttcttttgcttttaaaatgcgcttgctgcctttaaatacaaataaatacacacactaatctagtaatacatgtatttatcatctgtacacttatcattctttcctgccatatacatcttgatggagacagcaatattatattgggatttatacttctctttttctactacttttagctactcaattaatcttgcctttcaacaaagaaaccagtgaagaagtgtgaaatgcatcatggttagagctatacatcggaaatttgtggagcagatgtctgtgtagacatcttgcttcttagctcttcaaatgccttcatgctttcctcatcgaaccctccggcaaactgcagagcactcgagagtaagttgttaattacaaaatctccatttcacctttcagattaatcaacaccattattacataaatggttgcggaattatatacctgatgaactcggaaagcaaatctcacaccctgaagaagcaagaactctctgttgggctctttctcggtgccttgcaaggcatcaagctctgtggcaaccctcttcatatacttcttcgccagctgaacagatgccaatttgatctattcccaacataacaagatgaaatttggattttagatttgctacatggtccaaaaaggtggcaatagacataggctagagatgttaaccttgccaactaccccggaaccagacagccaatccaccggtagtccgtactccctgtagcgtgatatggccatgtctctagtacgaagtagcgcataaacactctgctccactctgacataagtataatacttgttagtccaattaaacatcaaatgcttatgcttgctaaacatatttggacttgacaagatatttattatctcactctgaagaacaatggaatttgggagagaatggttcagaggagatgcttacttttcaagcaaggaatacatcttcttgagagcttcttcacatgcaagctttggatcatcagtaaacgacgaaaccttatgttctaattttagcaggtcttgatactcaaaggctgcctctcttagtgcatcagttttgctctctggccaatcaaagtgctttagtactgcccgctcatcgacctaaaatgttatttgaccctttttcagtactaactattttgtcatgtgttgcatatagaaaaaaaatagataagcttaccaagaaggatagttcctcatcaagccaatttacaaatgcaacaacatcgtcgatatttacaaaacttgctgctcggacctcatttgctagagactcgacaaagtctccttgtgtctccacatccgctttgacctgaaacaaatccatttttttatataaaaagtcagtcctcataataatctacctgaattactaatggactaagggaattcggtagtatatatatttctgaaaggaagcatcatcttgaataacttacagctaagaggaatgttgatctattctcaatctctccaatcatgttgcttctcacatcaaaggcacttgatgttgttgatcccagagaagttgtgtccttcttggcttcacgcttcatgagactttgataaaactctacaacctctggagcacggtgtaccttgtcaccaccagcaagattcctaggtagggaaccagggggtggtggcggcggtggcgggccaccaggtttgccaggaggcggtggtggaggaggtgcacctggcgggcgtggcggcggtggagacaacgcacttgcagtgttggcagtggctgatggtgcaggaggtggcctaggaactcttggagctctcttctcaatatttgcaagtttcagttgtgtcacaactagagggttgttctggttatcactaggttggtcactggattcagcattagctgtaggagccttttcctttatttgagcaagttttggagggagtgcagatcttggagatggcacaatacctgaactgttgacaccgccatatctttgtaccctagctttctcggctttctcttttattaccttctcccgttctgtggcaagtttatgcctatctttgtaagcgggatacttgtcatcagcaaaaccttgtacagtctttgacatcaaatggaatgaagatgcaacatttgcctcatccatgatatcactgggatcctgttccctctttccaaaggttgtaatgcccacaccatctcctgcatttctgagcatgagagcctctaggggcccctttggtttctggctggcgctctttggggagtcactagtgaagaactgtgtcggtgaagctaatctgctttcatcatccttgccccttcccccttcttgagcttttgcatcagattgggccttttgccaaagaagctgtatctgctagaagaactgtcaactgaaacattgtccaagtcttcgcttctgggtgaagaaggtgcagaagaagcagtttcaaggtcagtgtcgccctgtcctcgttctgatcctgcatattccagcattagaagtttggccctctcacgcgattttgggctcagggtcttgttaaggtaacgagcagaaattttctcagatggtgcctggtagttgcggagctcatatctcagacaagcattaacccaacgcaggtaaaccaactcttctacttcactgaatctgttcatttgtaggccttctacttgcttggtaaggtcttcatttacatgcctcagcttgttgatctcctctcttgcatgggaaactacatcactctgcacaatgataagctacgttattaatatatctgtatacgctgaaaatgaacataatataaatatctattgctagttcattcttccttttctgagagaagcactgtgaaattatgatgtggttttgaaatataagtttagctctcaatatagctatgcattattgaataggcaagggatttttcagttaaaccaatgttagtgtgtgcaagcctagtccaatggataataattcagtgttgataatgtgagagataagtctaaattctgagtccttgtcatgaaattgattgatgaaatcccaaggggaaactacaaaaagaaaaaaaaatcctatcattttgtgcctatttttcttaatgtgaaaatgaggatagagggggtaaaaatgtaggacagcagccagctgtctgcatgccacataaatcatgaaaaaaaatatgtcaacattaaaaacaattgctgctgctgcaaatgatgccatgcaaatgtgaggctttagaagcatataattgctgagtgaaaatgatactaatatca

SEQ ID NO: 8857 - DNA, 4466 bp, Oryza sativa
caacccaacatattcctactgatgactccccgccatgcgaccacatactctccctttacatgtgcctcctcgtcgccatcctcccctacgccgccgcagccgaggcttccaagcacccgcagcacaccgcgctcgggtcattcctcctctccctctccggcgacggcgagaagctcgaccggctgcgccacttgctaagatccattaccgatggctctggccgtgtcatctccgatgctgattgggagcagctaaacgcaatgatgatccaagagcggctaatgataaccaaaaagattggcaggaaaagagcactgcctcctccatctgcagctccacaagacttggcagaattgtccaagagaaggtcagcctatgtgaagcgacagaggtttgctcgcaccaacctggaggaattgcttctcaaatattgcaggcaacatccttgggtacgtaaattaaattcacactcttttggtttctctcgattaattaattaattaattgctgcaatttttttttgattatgctaaaatttatttgtaattgcaggaaccaagttacaaacttgatgtcatatgtggagtggaggaacccaaatcctatcactggagaagttaccatgctaacttctcaatgacccctccttcaaaaaagaagaggacaataatttaagtcggaggaggaagcagtagtaattaggtcccaaaacagagcatgttatgtttgctagctcagatcaggaacaggcatctcatcagaaattactactagaagaaagctgtacttgatgtttgaccttggagtgatgcacaccaggccggtgatcatgccctgcaccgcgcccaccaccgacggcctcccgcggacggcgacgtcgcagcaaacccaagcgacgatgctggtggtggcgcagatgtgcgtgttgagcaccgccaccgacgagtcggtgttggcggagaaggggtcgccgccgttgaagccggtccaccccatccacaggatgcccgcgccggccaccatcaccaccaggttgccaccactcgccgttgccatttcctcctcgtcctcctccttcctcctgggtcccacccagtacgcggccgtgtagccggagacgccggcggcgaggagcacgacgtagccgccggagtagtccatgacgccccagtggaagaggaagcctccgccccagatgctgtacgctcccaccgtgtaggacagcgtcgtccacagcggcacgaacgccatccacgccttgacgctcatgcgcccgagcacggcgccggcgaccagccccacggtgacgccggcgaaggcccactggaagaacaccatgctcgccgacgggtacagcggcgccaccgcggccgtctcaacctcgccgttggagcggaggtggagggtggaggggagcagcgcctggctgagcatgtagtcctgggcgagcgccggggcggggcggccgacgaaggggaggaggcggcggccgaaggccatgttgtgcgcccagagcgcccagcacggcatggtggcggccatggcgtagagcgccatgaatgcggaggtgagcgcccacttgcgggggacggcaccgacgtagaagagggcgaggcccgggaagccctgaagggcgacgagcgtggcggagagcatctgccaggcattgtcgcccttgttcagccactccggcaccgccgccgacgccattactcttcctagaatcctagtttgagcttacagctgcagctagagtgcacagccgagtttagagagatacacaaactgttaggtttgtagtgcagcttcgtctacttacaaagatgatggtgatgatgatagtaataacaatgtagtatattgattaataagccatgtatagtagtacagtcctaactaacaggacatatggaatagtatcttattagtagtaacaaacctatgtatagctcattaaccaaggaagagaccaacgatatatgcttgactggtggacaggagacaagagaaaatgtcaagttctagggcttagcaacatagtagttgaaggaatctcagtttgtaacccccaatgagtttccttgatgaagcctggcagcccgagtcttacaaattttcaatattcattcatgacataaaaaaggtttggtctatttatttatcatcaccgttgagatatgaactggaaataacatttcggaaattttctatacgaaagaattaaataaaagaaacaggaagaatgaaacataaataaaacaaacaaacctgcacacaacactcaccgactccgaggccccaggctaggcaccaaaaacaaccaaagagtacgttttctttcttcttttttggcgagaaatcaaattatagctaccaacgaattcattcagggagtaacaattgttcagaagagtttaaataccaacaaatgaagcatgttagctgcgtagatgtgccaccctgttaataagacacgaatagctttatagaaaatactaggacaacgaacaccctgttaacatattacatttttcagatttccaacgtaccaagagcacaaacgccatgcgcacgcacaataccaaaaactgcctcagcacaacaagacagcaagtgcgtcactgcaaactgggtgtgcaagccaaacaagcttaagaagaatcatcagcttcagctcgcagttgcgccaagccttccttgtaaacttcaaagtcatcagaggaccaccggcagacaaggtacagtcggaatgttgccatctgcatcccaagcaaccgctgcaatacagaaattcaagaggaccttactgcaatggaatagaaagacataggattggccaatgtgttttaacttgtgtatttcttaaagcacataataattacgacaccacaaagatgttaccattggcttggtcacaatattaacataatcaaaaatgccaatctgattttgcttttttttttaatcatgcacgatatgcagtatgtaccagagtttgtgctgcttctggtgaaatgggcttcccttcttcacatactatgtgatctgcaactaattccaccgcccctgcatcaaccagaccaaacttaacagccatttcacatggtaatttccagcacatgcacaaaaaatgtacagaaactgctaacctttgttcagacgaactggcagtccttgcttgcgtagaaagggttccatttcatgtgtaaactgttccaaggggccttccttaagctccacctgacatatcatcatgttctaaatttagtaaaccatgttttatgaagaagagaaagtgaatagttattccagacatattgtgcattgcagacaccacagctaaaacaaaatcaccaaagagcttaacactgtcaaagtgcttttgacttaattttccacaagttactgtaaatcctactactttcattcctaaaatcaccaaagagcttaacattgtcattggtaacgtcagcataaatctcgataagcatggtcattctagattgtttactgagaaaacaagccatgaacagaggtacataaatagaaaggataacttgaataccgtttctgtcacaatacttcctgtcctggcgaaatcatgctcttcgaattctcgaaataatctgcagtggaatatatggcaaaaaaatgctcatatcaagcataggcagtcatcatgtataagtataaagtgcaagccattggatgaggagactacctctctacatcatctcttggaagattagtaaagaacagtccagtatcaccttgtaggaactaaatacagaaaacatacgtcaagaaagagctcataattcataggaatggtgtggattgtattatatgccaagtgttaagaaaggaaaatgtcaccttggaaagtttatgaaggcctgttttagcttcatcagcagatgaacgccccagcgctatctgcatgaccttctttccagcaaggaatatcctgacataaagggagtatgtaagaatttcatcaaacagccaatctagaatagcttttgcaaatacatgcaaatatgttgtagttgcaaggttaaagcgaaaagccaaaattcaatctatgcagcatatcgtttgatgctttgagcagagaggcaccgtactggctagactaataataataagaggcagctacctgctggaggacttgagctgctctctgaggtccttgagcttctgattcctcatgttatcgtaggtgaagacataggcattagcgtagtgctcgacggcatctttgatatcggtaaccactttgcccttgcgctctaatccaggcttcttcttggtcttggataaggttactgcgctcgaatcaggggcacaaattaaaaatttggtgctgattactaactaattacaaaacaagagcgatctgtgcagaatatgcacgatataaaaaaaaagacaaggtttttggatctcccttggccttggggaac

SEQ ID NO: 8858 - DNA, 706 bp, Oryza sativa
cgccgtccccgtcgtcgaggtcgaagtccccgaagtcgttcgtccatgtcgtcgtcgccgtacgccgcggagacatcgcgccgcagaaggggcagtggggtggccccgcgggaaagggagccggcgaggaaaagggacgtggaggaggaggggttagctagggttttggagagcggcgaggggaatggataggggaagccggaggcggagacgacgagagagagcgacacggtggccgccatgtctgagtttttttttttttggcgcgcggtcgagagcgagtatatccatccacgtaggtgtgtcgagatgtattagcacgaatcttaaagcacccaactttgttctcgattgttctgacggcgagagaaccaaccaaccctaccttggctttgccggcgggcggcggcgatggcgtccgcgacggaggcggaggctgaggagagggacaaacccatcgtcgtccgtgtcaagcgcaagccctcccagacccgccccgacgctttctgtgagtaaacctctctcctttcctctcattgctcctccccctttctctacccaacttcatagtggaaaaaaaacagacatgatttttgtgattcgttagggctagagatcaatgagaggccggtgaagaaggctatgctcgatttctccagcctttcagtctccgagccatcctctgctcctaataaaggtatctact

SEQ ID NO: 8859 - DNA, 10361 bp, Oryza sativa
ttctcgctatgtttgagccttatgcacataactaattcatgattcaaacattcatgacattggtatgaatgacaaatgaagagcgaaaaatatgtctcctcacactaaaggttgtaacccataaagaaaatcattggtctgttcaatcttgcgttagcacaggagtggcagaatttatttcacactaatcacatcctacttccttctccatagtcaatacagaactgaattcaacacctccaagaatagcatattttagccttagctggctcaactatgaattaatagatggaaaggcaaccaaaatccacaatttctaaagtaaaagttacaatcgaaatttcagatttttttttgaacatctgaaggaaaagttacagaccttccgattgtgccagcgaaataatatctgattcaatttcttcagcagctgatggcaaatgttcccgtataagtggaagaaaattgcataaaattgcaccctcttcaaaagaggtaatcctgaagagaaacacgataagaaccatgaaacagtacaacatttcgtttttggaagaactaataaatctcacaaggaaaaacttgccttggttctgctggatgcttctcttcatcagaatctacttggacagcatcataaagatggcatatttctcgtagtgattcatcaacttcattcctgtctcctttccgactcctccaaatttgtgcaaagcgagcatttcttccaaggtcctataaaggattaatgaacaaaacttgcataaaaatgtgggaacagcacaagaaggcactgccacatctcttctctggatgtgtagcaaatgattcgacccaaaaaaattctagtgacaagaagggtactaataatactgtatcagccggctaccaagtcctaacatatgtaatacgattctccaaggcccatgccaataacaacacctgggaatgaccaaacttaatagagttggctcaaagataatatcacgaaccctgtctctcctatttttgggtcaatccataaaatatttccttcatatactctatccaccaaattcatagtagttagtacaactacaaacttaagcatatgaagttgactatagtaagaaaataggcacacctcatgcctctgtctggctgctgatcgtagctggtcttgtttctgttcgcagaaaaaagaacaatgttagcatatgaaaagtacataacaaccttccttatttcaaaatcttcaagaacaagatgcataaagcagtagtaaagtactgtagctgttactatcagtgaagggtctttcaaatattcaaggaaaatactaaaagaaacgtttactaataatatttttcatgggaacaactgaagacatggtaaaattataacaattaaaataagtaaatactaggaaaaagtttgacttactttatcttgattagttctgttgttccattcctttgtcttgctctttatctctttggcatccaagtcagaatgctacaaagtaaaatggagtaattgtgatccactgttcaactcttatggtacataaggtaaagtacagctcgcaatactttttttttcaaaagataatttagttgcataatgttggtctccataagtcaatcaaaaaattgttcaagatcaaatactgagctctattgtctatataactccctgaaaagtaataacaggagatatactcagatgctgatgagtaatgacacattaactgaactgattatgccatatgcgaggaaaccaaattgtagaagactagacaaatttaacaagcaaggaaaagaaaatgattattaccagaagagagtgcaaaacatcttgaactgcctcagaatggtgtactgtctcaatgtgctgtaccagaagtttcttaattcgtggttcctctgaagctgtaagcacagaaaatatgaatatcacatttatgtgcagtgtcaaagtacattatatgcaactcatgttcgcggtatcatggaggctgattaaccggtaagtagaatcctactattgtattatcaggacgagtatcttccggcaccaatttgcacagacaagcaactgctggtgtgattactgattaagttaatagcgtgtcacaaatgagaacctaggtgtagctcagtggtaaagatgttgccttgcatctgtgaggcctgcattcgagccatgctttcgacgctaatactcaccgattcaccttatatttaatgcataaatatgtttgcccttaatttgatactaatttcttccttagtatctcacttatatattcttctgaaagaaaaaaaatgttgcttctgtcctaatatttgatactaattatctcctcagtatctcatatatgtttatgaaagggaaaaaaaaagcgtgtgacaagtagaagtagatacctttattaggagcagaggatggctcggagactgaaaggctggagaaatcgagcatagccttcttcaccggcctctcattgatctctagccctaacgaatcacaaaaatcatgtctgttttttttccactatgaagttgggtagagaaagggggaggagcaatgagaggaaaggagagaggtttactcacagaaagcgtcggggcgggtctgggagggcttgcgcttgacacggacgacgatgggtttgtccctctcctcagcctccgcctccgtcgcggacgccatcgccgccgcccgccggcaaagccaaggtagggttggttggttctctcgccgtcagaacaatcgagaacaaagttgggtgctttaagattcgtgctaatacatctcgacacacctacgtggatggatatactcgctctcgaccgcgcgccaaaaaaaaaaaaactcagacatggcggccaccgtgtcgctctctctcgtcgtctccgcctccggcttcccctatccattcccctcgccgctctccaaaaccctagctaacccctcctcctccacgtcccttctcctcgccgcctccctctcccgcggcgccaccccactgcccctcctgcggcgcgatgtctccgcggcgtacggcgacgacgacatggacgacgacttcggggacttcgacctcgacgacggggacggcgtgggggacgacgaagacctcgacaacgagcaggactacgacgtcgactacgaccgcctgctcgcccccgtcaaggcgccgccgcgcccactgtccggggagggcgacgaggaggagggggacatcgccatggtcgccgcccagagcttcgtctccacgcaggactccgcctccgacaccgtggtcgactactccgtcaacgaggacgaattccacaagattcgcctactgcactgcgacttttttatccgcaaggtgcctgaccccgacgacgacgtcttcgacttccgggaggtatacatcctcatttatctgtctaacactagtacattctttgctaattgcctgtgttatcaagcatgtatttgacaatgctatctgttaatgcaacatctcatgacacattcattgcagtgctatccaaattgacagaactcaatcttttaggttgattgaactaaatcatgtgttccttcataatgtgcaacagatgtatgtcacgccgcctgacactgacatctactccatcccaagggttcttgctccgatgccgcaaaaggtgcccatgtctcttttttttgatctgtttcaggcaaatgtaaatgggcattgaggtgtaatcattgttttcctggttgaaagcagtatgtgaggtgcatgaagaaaaattttggtcgttaccacgttagtgagccgcctgttgagcatttgcgtgatcccctatacaagacagaaagggagatcatgaaggtatgtgtgagagtgttgtttcctctgctaatttgttctaccactctgttatgcaattatatttgtcataaagaaagattgagtgggtaatgctgcttgaaagctggaagttgccaaccttaaagattctgactgaaatttatccctattttttttgccatacttgtcagagtagagaccttattgttgtttggtgagaaattgcccttactgatggtagtagtgacttgtgaagattacatgtcatgccaaattgcttagcaacaggttttattccacgtggtggttatctgaatctatagatcaaattgtgggatatccgatgcattgtttattgtcctcaaagatcatatattgctaaataggaaataaggtaagaactaaaattccttaggagtttaaaccagctagctctgcttagcctagtcactggacccctattaggccatttttaaactcaattcccatccaggcagtgtagcaattctctgttattcttgtttaacatgtctttctgctttatgcttgttttgtttgtcataatcaatactagttgttcttctcaccagggactcagacttaaaactatttttagtttctacccaatatgctatctttcttataccttaagagcatatatgctggactgttgttttcttcaaaatttatatatgctccatatttgtttatgctgtaggttttcttaacaaaacattacaggaataggcggtgtaacgacccagattttttccttgattttgaagagatatatgttattgactcgaaagcaaggtcaatcacgagagcaaaagttgtggtaagacgctttaaatttaaattcttgaagcattcagaacataagtacataaccattatatatttaggttgcaggagctctttcatcactaatgttagtagaaaaaagtatattagtatctgcatgatgatttgaaggaactagtttaacgatttccatcctttgaaatattgcatgcgaccatttggatgactggtaaactgggtctgtgatgtcattggtttcacagttagtcctatgccttttcatctagacatttgtgacaaacatttatattcacattttttttgcatagttaagttagttaatttttgttttgttgagattatcaatatcgagctgcttattacaggttagtgtccctgaaggaaagaagagggacaggagaaatgacttgctactcatacgagatggaggggaatcattcagaataattgacaaggtactatatgcttttttcatgaatactatctactattgttgttgtagtaggaggcttcaagggctaatgtgggctgtttgtatcagaccaaaagggatgatgcgaccactgtgatccaaagagaggagtgggcaaagtcgaggcaagatgtggagaagcactttaggaagctccgcgactttgactactcgaattggttctgaagaaatagtagctggagtcattcagcagagaaattattttgctaattttgcagctgcttatattagaggaagcgaccatggaccatggtgctcaagggagaatcgccatcttcgagtaggctaattatgtgtactttaggtttttgtagcaggtagaaggcatgccacgtagcgagcctatctgtacaaaactgaaaggtttgatgcttgtgaatgcactaccttgatgggtagcgaacgaatatgtggtccttggattcagaatgcacgtgttttttatagtatcggatatctatacttggattcagaatttcctaggtaagctttccctccggttttttatgtatgaatttcgtaggcaagtcctgtactcggcagaatcctcaatataatctacaaagtggcagacagcagacaattatgtcagtaaaaatggtgttatggaggatgctaatgcaacaatcaagaaagtttatccagataattcttctcctagcagtagagtggcattgctgactgctactgccttggatcaggggattggatcgaactggctggtaccagcggtttgcaggatcaatattctcgatcagcagcggaaaacggcgcggaagcgtacgtatgtcggaatagcatatagtataggggaacgtaagaacgtcacaaatgtgcagagtgcgtcccattcgaagccgatcaaccgaatagcggatcaacagagatgaaaaggagctgaaaaggaagagtcgaatatactaccaggatcaagaaccaggtgttgcaagtccagccttgcagaccttatcatctcaaaatggcctcagaattgcaagaaaaaaaaaagcagatcaaggtgacacatcacacctcagattgtaaaacagtaagatcgataaaattgtctagtgctttaacctcacttgcaccagcaaattaaagcaaatgaagagtctcatcttcacatcagtcaacaaaaaaaataacaaagaacaaaaatatgtatctgttcttatagctgcaacactagaggaaccaaaataatcacaatgcaatcgttattggcctgaccacatggacaaaaaacatgagtaaaaatataagtcattcaaacaatattccacccgaatcaagtaacaaatcacaaacataattaagtagatctattcgatttacgaagtgcaaaatatctagtcaaatcagtacacatattagagaacaagtgcaaaattcagaagtggtttcagttttcaggatatgtgcatcagtgtaccattatttgcaccagaaaagaacggcaaaccacacaggtttgtactctaaaatagagaaaatccataaaatgccatcgacaagcaccttgatcctagaaatgccattgacaaacgcaacttcctgaaaatgccatcgtacaagcctatttctcccagaaatgccatcacaccgttagtccacaccgttagaacaaaacattttacaagaatgactaaattgccctcactccaaataatactatcccaatccaccggtaaaaaaaaaactaccgctaatgcttgatgcgtcacatggccggcctgcctcgaaggcgccggcctgacacgcggctagccagaggaagtgggaggctcacgtcagcggcggcgaatgactcgtcgtcgctgtggttggagtcggagtcggcgcttcgctcgccgtcgctggaggaagaggaggagaggcgggcgagccccgcggcggtcatgctccagacgcgggcgccgcagtaggggcagcggacgtgcggctcgagcgggccacggtggatgacgaggaacgcgcgcgtccgcgacggcatgaacccgcggtacgcgcccacgatgtcgtcgtacactgcgccggcgacggccagtggcggagctagcggcatcgttgagcccgggcgagtaatagcgtttttcggtgatcgactaattttgataggtgttgacagctattcgtagtgaagacgacatcgacggagcacgggcggccgcccgacctgtccgggaggtggatccgccactggcgacggccaccgcgtgctcgcaaagtggcccggcacggcggcggccgcgcggcagcagaagaagagcagcttcgccatcaccggccaacctcccccaatgagtcgatgcctgggaccgtcgtgcggatgcctgctgccgaggcgccgtcgcctgggaccaccgtgcctgcggccgacgcgccgccgcctgggaccaccgcgccgccgcatgccacctcctcgccgcccatcgcgtcaacgcctgggaccaccgcgcggacgcctgctgccgacgtgccgccgcctgggaccgacgctccgctgccttccacctcctcgccgcccgtcacgtcgacgcctgggaccgctgccgcaggcgccgcctgggaccaccgcgccgccgcctgggagccccgcgccaccgcctgccacctcgccgcccatcgcgtcgacgcctggaactgacgtgccaccgcctgggagcgtcgccttgccgctgtcgcccatcgggagctggcgattgaagtggaggggagaaatagtggccggcgatgggatggaagagaaggggatttatcctttgttgaggagggtaatttggtcattttgacaaaattaacggtgtctaacagagtgaaagtgacggcgatggcatttttgggacaaaatggctcgtacgatggcatttgctggaagtcgcgttcgtcgatggcatttcttggattagggtgtttatcaatggcatttcatggattttctctaaactaaaaaccgtatatattgtacctgttcatatcagtgcaaatgtgcaatagaaagatgccaggagaaaaggatctgtcacagtgggtgattactgattccagcaacaagataaaaataactaaataagcaacaattgcttatacatgaagaatgcaagaagcaaaaacgtatgcagaagatatcgtgcaacagatgaagaaaagcaacaggtatggaaacttacaagtacaaaatagaacaaggacaagctgaaatcatacatgatttttagtttctgagtctaccttcactcatactgactgatttctgaactttctgattgggtcgctagctgttgctgattaaggatacaatctgtcatggttatagataccacatacctaatagtagttgactaaatctcggtaggacccaccacataccatgtcctatacggaaacaatctttggatttaggaggagttccgataaggaaagacaactaaaattctatatggaaatgacaagaactactcggattatatccatattggtttctctagttctacttggacaaggggacacctatgagtataaatacaagccccctaggaggacaggggacacacactgaccatgagacgatcaacacgatcaccacgatcgggacgaccacctcatcaacacccaacacaatcaacatacaagcctacatacgccaagacacgccgcctgatatcgactttagggataggcatggctactcccttacggtgtctccggataccgtcaggagagacgaaagcactatctctgatctcgctagacacggattcgaggaggaaggctaccctgttgtagactacgagtcagaccttcagactgccatgtcgacaacagttagataggctatccacatgttgtactggtgtgattatggtgaataaaagcaactccgactccggccaacaggatgtagggttattacctgacaactcaggggcccgaacatgtataaaaatcctcgtccccatctcttttacctcagtctcgcatatatcctagcatcaacggtccccatactaagcaaataccagaatgacggcatcaaacgtcgacagtggcgcgccaggtagggggattttggtgcttcaggatttcgacgagatgggttcaaagatggattctccaacaacaatctactcgacaacttcggttatggggagatctaacccgaccggagtatatcgtccgacgagatcggaaccatcgtcgccaaggagagctactatgtcggcggcatccaagagcaatccgacactaattcctccacgtatgcggcattgactggtgtgagagatcggcttatctccaccaacaaaacgagtgccgtggagcttaaatcaagagccagattgatctgttcattggtgcaaattctaagtcggattggaggagttcttatgcttgcactagaatccaatctctaggcagcatcctggttggccgttccgacgacgtggcaaacagatcaattaaaggaccaaaatacaaggtgcaggcctacacggggaacagtaccatacacacaaacggatcaattaaggagttactgttcctcaccaagcatgcacagtaaggtatttagtagattaattttttaaaattaatctactaattccgtagatatatccggcatatatatacacaggtacgcaatattttatatataatttatcgtacctattcggtatgagatcataccgtattgtcaggtctataatttattatgtttacctagagcatgtttcttatacaatctccgttgcacgagtgcttccgatgttaggccaaccacggtctaacgctgggggctcgctctgttttcttctgtataaatcatgcctatttacggtttacataatgcctgataattccatctgctcgttacatcctgataatactagaaaatccaggcagtttttcgaatatatactcgatattctctgctatatatcttgccttctagaaaatatttttcaggaacaattgagcactcgagtaggttatggtcgagtacactccattatcgagaacattctcgacaaatgcggagttatcgcacccaacctaccaacgaagaccgacgacctatctcatagcaccggccatggctggactactcgagaaaaggttgttgtcggtgacatgggaccgggagtatcatgactagaggcttgggcaggagcaatcacccacgaggcctgaccccctcgggggggt

SEQ ID NO: 8860 - DNA, 1930 bp, Oryza sativa
gtgacactatagaatactcaagcttgtttcagtggaatacaaccagcctagacagaaatgtctgcactacgagatcctatgggaaagagagcctgactcagcacaggtgattaaagattcttggtccagttcgggtgagaaatcagacttgggggacataaatcggtctctcgcaaaagtcatggcggctttgcgttcctggagcaaaacaaaggtgaaaaatgtgggtagagaacttgcaaaggcaaggaagaagctgggggacttgattgcttcagatgctgataattcccaaattcgttttgccactgaccaaatgaatgaactgttatacaaagaggaaatgctttggcttcagtggtctagagtgaattggcacaaggaaggagataagaataccaaattttttcatagtagggcggtatggagagcaaaaaagaatagaatcacaaaactgaaagatttgcagggtactgtgcaccgtacgacaacagcaatggaatcaatggcaactgattatttccaggagatgtttgctgcagacccgaccttgaaccctgaatctgtcaccagattattccaagctaaggtaacggctgaaatgaatgacctgctctgtgcagacttcaaggatgaagagatcgctcaggctttgttccagattggaccgttgaaagctccgggtcctgacggtttccctgcccgcttttatcaacgaaattgggggatcattaaagaggacatcatcagtgcagttagtaagttctttcagactggatgtatgccagaaggagtcaataatacgactatagttctaattccaaaaattgagcaacctatggaattgaaggactttcggccaattagcttatgcaatgttctttacaaagttgtctccaagtgcctggttaacaggctcagaccgatgctcaatgaattggtatcagaggaacagagtgcttttgtccgaggccgaatgataacagataacgcgctcctagcctttgagtgttttcactatattcagaaaaacaggaaagctaacaaggcagcgtgtgcttatgacagggtggattggcgtttccttgatatggcaatgaatcggttgggtttcgctcaccgctgggttaactggataatgacttgcgtaaccacggtgagatattctgttaaattcaatggaacttttctacgatcatttgctccctctcgaggattaagacagggagaccccctgtcgccttttcttttcctgttcgtggcagatgggttatctcttttgttgaaggaaaaggtccaacaaggttctctgacccccccccccttagtatctgtcgcaatgcgccgggcatatcacaccttttgtttgccgatgacacccttctgttcttcaaagcaaatcaggcacatgcagcaacggtgaaagatgttgtaaacacttatgcgcagggaacgggccaattgatcaacccggctaaatgctcaattttgtgcgatgatgcttcccccatcgagatcactgaggtaataaaacagattctccagttagaaaagagcaactttgaagataaatatcttggttttcccaccccggaaggtagaatgaacaaggggagattgcagagcctacaaagtaaaatctggaagcggctgatccaatggggtgaaaaatttctctcttcgggtgggaaggaagttctggttaaggctgtaatccaggccattccggtctatgtaatgggcttatttaagctcccggattctgtgtgtgacgacctaacaaagctcaccaggaatttttggtagggctcggagaatggtagaagaaagactcactggagagtgtgggagtgcctgacaaaaccaaagttttgtggtgggctaggcttcagggattacagattgtttaatcaagctcttctcgctcgtc

SEQ ID NO: 8861 - DNA, 2897 bp, Oryza sativa
cagagatttttgttaaattaaaaaaagaagaagaagaagaaatgcgcacatgaaaggggaatagaaattcaaaaatggaaggcagagtgaggaggaggaaaacagacttgatctgctcgttgatggcggcctcgcactcgtcgacgaacttttgcctagcgagagactggtccttggcctgggggacgagggagagctcccccttgagctcctcgaatggctggaagaccacgccgctgagcacctccttccctttcccggcggccctgcacactgccccgggtccggcaccacgcggcacaggcagccagacggaagcaggggtcgaggccgcggcggcgagataggtaggcgcggcggcggcggcggccggggcaaccctaggaggaagcatggcggagaggcgcgtgtggcgtttgcttccggaggtcgcggcgggtgaagagtgatgagattaattgtgcggtggtaggggtggaggtgatagaaagggatatatataggcgcgtggagctcacggatgggccacacgtggacggtcgagatgggacgaaggcgagggagcgcgtggcgggctcgtggctgggaggatattttgggctggtggtttgttgatgtggagcccggcccggccgcaccggagtcggtcaagcttaaccactattcctttccggattgcttctgcgttctacttgatggatcggttagtctcgttaatttcgtcatcagcattatactgtgagacttttttagtattattcatatttatatagatgttaataaatatatatatatacctaaatttattaacatgtggacaatgctataaagtcttatattataaaacggaggaaatagttgggtggagttactgtgtttattgctttccttgcaagctgatggcgatgagttgtacaaaattccacacaaatttagacgtctagatgcaatgcatgcatctggcaaatttctctccttctgatgattggtcagcagagaagacaggtgggatatcgaggaggagctagatgaggataagaatggcgcgcacagtgtggactgtggagatgcggtgtcgatatcgtacacaaaaaaaagtcatttggaggcgtgtggaggcctcacgcccgctctggaccagattgccctctttctctccaccacaattatcttcttctcttcttttttttttcaccttttacatatctgtcttcgtcagtattcatgtgttgcacagagccacatatacacggtaccctcttccttgcattgcaaccatatgtttacttggctcctatagtgacaaaaccatcttttctccttttaacagcgcatttgtctattgagaaaattgattcatcgagactcctgcttacttctactcttctagaacgagctaacgtttttcatttgaagaaaaaagaaaacggacaaaagttcttctgcgcttcgttggaagcgagttcgttagtgggcctaggcccaaatacaaaatccaatccaatcccatccatccatcgccttcgccttcgtcgggcagagagggaggcaagccatggccaccgccgccgccgccggggatggggacgagcacctcctctccctcttcgcctccgccctctcccaccgcaggtaatcacacacccttcttcctctaccatccaccaactagcattgcattcttctacaaccgctccattcttctcggctcgcgctgctcaggtttggggaccaggagctcagcctactcgacgccgcgctttccgccggcgccgacgtcccctcgctgctccacactcgctcatccacccgctgtctgctgcgcaaggccgccgcccaggcattctcctccgtccccgatttgggtaccaccctctccgtcgctgacttcttcgcgcgcgccttcgccctcaccggaaatgtcgaggtcctcactcaccgacgacttgcctcagcgcctgtggccaggattgtggggccattaatcatgtgcacatatcccctagttttgtttgctctgcaatctacacctaattggtttcgattgcgatgcacatcgggtgctccagttctgtatgttcaatgcaattcgcatcatatgatgatgcccttataatcattcattctcctcgtgcaaatacacattctgcacatgctaccgtactaaactagccgtgttgcaacttttttttttctgctactactttactaattctgctaatgtctgtccattactagagttgccttgctatgagatatgaagctctgctcctgagacaagccaaatactccgacgaccttcatctgcaagtatccaatgaagaatggctaacttttgcaaaggactctcttgataatggtttttacaccattgcttccaaggtactttcgtttcagttctactgtaaatccactcatttcttttattagtcagcattgaaacaaaactgatgacacctccttgctaatactaattctatgttgccttgggtcacatgctacttttgtaccagaatttagactaatgaccttttcaagtggaaaggcatcgccatttggaaatatgttctgaacaatgtgatggatgatgtttgatggctgcctgctgttcatactggtagtattgtctgaacaaacttagcacaaataaacactctcacactggagggcattgttttgtctacctcctttaggagttatgattagtacataaccatgccaatgtgtcaatctagtcatctgtctgtacttaattttgttgaatgactgcatcatagtgcttcaacattatttatgtgcaaaccactgattctagggtttaataccatgtggccatgtttctttctacttatatatgtatttaccttttaggcttttgcaaatgctctcttgcatat

SEQ ID NO: 8862 - DNA, 5395 bp, Oryza sativa
aagaaggggataatttggagggtcggtaatggtcaatctatacgcatgtggagagacccttggattcctcgggatcactcgagaagaccagtgacgatgagaggaaattgcagactgaaatgggtctctgatttaatagggcaagatggtacctggatgttgcacagatcaggaggtgcttcctgaacatagacactgagttaatcttatcgatttgtctttctccccgccaggaagaagactttctagcttggcaccctgacaagtctgggcggttctcagtccggagtgcttataatcttgcctgtaggctggcaaatactgaaggatcctcaagttcctttgctttgcattcccgcaaatcctgggatttaatttggaagtgtaagctcccacagaagattaaaatctttgcctggaaagtggcctccaattgtttagctaccatggacaacaaaaggaaaaggaagttggtaaactctgatatctgtatcatctgcaatagagaggtggagaattctgtacacgctctcttcaaatgtccccgagccagtgccttgttgtcggatatggtacagtcaggtaacttgtcgcttgttttggtgaatttccaattcggcaattactggctgtttgattgtttggaatatataccaactgaagaacatgagatgtttttattaactctctggcgaaactggtatgtgtgtaatgaaatcacacacataataagccgcctcctctgttggaagtctccaaaagattcctggaaagttatattgctactctattccaaatcacgctgatctggaaaaaggtaaaactgttgttagcagatctgttataagtgcaattagaagaagaggaccagatggtcctcctgctgcatcgacccgtttgcactaggagaagccgaggctgggctggatgaaacttaatgtagatggctcatttgatgctgatcgtgggaagggaggtatcagtatgattctacgggacaacagtggtagtacagtttttgcagcatgtaagtccctggatagctgcaagaatgccctggaggcagaaatccgagcttgcatggagggattgattttggccctgcagtggactatgcgccctatcttgattgaaacagattgtgtttcgctagtcaatcttctgaaggaagggaatagggatctgtctgaagttgtaatttcatttcatagctagtctgtgaggacgttttgaatgagtaatacacttttttccccgcaaaaaaaatagtcaatccaataccgaaccaataaactgtcagacagttaatttcagatgcactcctcgcaaaaaaaaaatcagatgcacgtactaagatcataataagatattcctatatcgtattcaaatatcaatatatagcatgttctctctctagaaaaaaataaacctcaatataatagaagggctgttcctggatccccgacgacatgatggagtcttgatcaacactgcgccgagaagggcatgaggactaagaccctgtttgattcagcttagagttattataattcagattattacaagcagctaacatcttattctatgttaatccagcttataataatctggctcaataatttagattacaataatcttatgctaaaataaacgggccctaatataattaggaagataacttgatctataactatcgggctgaggtcctcttatattgatggaggactctgtccaagtaagaaccgcgagtgacgttccccttaaggttcctgttcctcttagtcccatgacacataatcaaggtgacttataggtatggtgctgaatagaattaaaccaaaataaaatagcagatagttgggagagctatatgtagatctgtattactctttaaaatttgtactagatcaatcatacattaaaattgcatgccttagtaacaaacgacatcaactccttagggaaaggctgtatgcctacgggcagaggccggagatgtaacacatttccattatctaaaaaaactccttagggaaaacgtaacataaaccacaattactgaatcagtagatagattaatcgggatatcagctagattaattaatcaaaatatatgaaggataatgaacaaccgaaatgcataataaatatttatcttcctctagatacatgcataaaaggacaagtaccacaaaatatcaccacagtgtagtcatatggtgagatgaagagtacttgtccctgctgcatgagttttcttccctaatttgatttatcatccacaataacatatgatatctagctactatagctagctagtgatatatcaccaggccagtacagcaatatagtactggtaggactagtgatggtgcatctttcaacaggggagacatgatcagaacaaagaaagagagagcccagtagcacaactctctgcttcttgatcagcaccaatagcaacagtagcatgatcatgatcttcctcttgtttcctccagctgcattctctcttcctcttctcgccccgcggacagatatcgagtgagagatccagattaagagggccttcttgatggttactaccctcactgcagatcatctctttcagaactggtctttgatggttcatgatattatcatctggagatgaagaagagccttggacaaaatctggatggttgctggtattagctctagctacatacctagcacttgatctgcggaaaggagcttcagcttcagctgctggtgggtaatagggttttgatccaacaagcaggtgatggcctgcagggagccagtatgatccatgacatctccatggggaccatgaattgccaaacctatatatgtaaatatatatagtccattattagtgatcgacgtcaataattagtcagaacaagttataattaattatctactgtaggagttcagaagagaccgagagacttcaattatgcatcccagagtgtgctacatgccagacaagaaactaactaaaggtgtctgaaattgaatggaatttgtttgcgagcaagagttgcatggatctaacaactacctggactggaagatggtaccggagccagcagtgatagagcgatgatggagagcaggcagggaaagatggccaaggttgtacgcttgtcccccatggccaccaccttgcatttgcagatgatcatctgatctccatgactcaccacctatcactgtatatatgcacatatatagcatctagtattaattagttatacataaactaaaatcgatctgttcatgaagaattaattatttggtctgtccatatatgtatatgtgacataccctggccggactcatcgatcttcttgctcctatacatctgaaatcgaacacagggaaaacatatggattatattaattttaggaaattaagagaaatacagatactacttctactgagaataagaaagaaacaagtttgttaggtacctggagatggctcttgacatggcctatgctaagccctctaacattcatcagctgaagaacgagcttaggagttgcgcctgcatacatatattaattagttacatatagatagaaaagtgaataatgaaattatatatagcatcaggatcatatatatcgcgagctagatcaatgggtaaattaaatagatatgcttatatatagggaggatcatatatatcagactgaaccgaagatgatgaaattaagctttctatatatatggcaaggcaaaaatatgtaggaataggatggcttacgatcttggccaccgagcctgtcgacggcgcggacgaaggagaggtggagctccggcgtccaacggaggcgagggttcttggagcggacgtaggggcgcaccgacgacgacgacgacgtgcgccgcctgctctccccggatccctcctcctccgtagtactgctcgtcgtcgagctcccgtagttgttggccgccgccgccggtgcaccgccgccgccgtcctcctcctcctcctccttgcctgcacttcccatatatagcgatcgagacaaagctagatagggaaattaaggaaggatcaccggccggccaactctctatagctttagcaagcttagcttgatgatgaacacgagtcgtcttgttgctgctgatgcggctgcatctgcatgatatcgccggccactgatatgatgtcaaaagaggctataggagaagccaaaagctgaagctggagctgaggtcaccattcaattctatctatctacctagctacaccccatatatatgtccagatgcatatatattgctgcctttttggaagggattgagctaagcatgcatgctcatatacaagtaactactaacaagctactctagtactagtaattaaggtagctagctaggtaattaaaggcagcaggtggattcatgcatgaggaggagaagcaggtaaatatctaattaagatccagggacagacaatcttccaagaagtagctactccagtttggaattggttggaacttactccatccaaagtctttgataggtttctctgagtcttacttgtagaattttcatcgatttctaacttgttaatttcctttttgtctcttagctagtatagtaagagcagtggactaaaaggatcgacccagtgtgaaaatgagagatggagaaaagagtccaagagacaaaattcagatgaagtatgaagaggtccgggtctttgactagctccttgcactacatgccattttgtctctatgcttgtctatgtgaacgcacgagtttttagtaatacttctatgtaggaggatgtacgtgtcaattgtcctcccatcctgatatactcacgtaatttattttgtctacacattgtaccaatttttatttttttaaaaaatattactcctaaaataaaacaatttttagaaggtgacacatgcattaagaaggactagaaaaacttatttgccttctccagatagttgaggtatatgctcggattataatagagcaagaggatattagcataatataatagttaagtagcaaaagttactttttatatatcctaggttgctacatcaacaacaaaatttgaactatcaaacttattattattttaggacggagggtgtagcatgtaaagtatgtgtgcttgtttcaattctaatatcattaacataccaatgggtattactccaggacacctcatcagtatcggttcgtaaggatcatctatatatcttttttttaaccaagtataattttaccagtagtgaggattgagggggtcattaggacgggatgaaggtagaaaccccccccccccctatcagtgtttggtactccctccgtttcgaaatgtttgacaccgttgacttttta

SEQ ID NO: 8863 - DNA, 5282 bp, Oryza sativa
agtttataaaaacaagctgttaaaaggactccatcttaatatatcattactaacaaaacaaccaaattaagcatagctggaaattattcctttctcaagaaagatacaacctttggtttgtctgtgttggtcccttgatgacacgaggcactcaactcttgttttgtaggatcgatcaaccaactcatattctgatgcgtaggtattttacaacattggatttgacaaattagtactccaggtatgatattggatttggagaattagtgaagtccaggtatgatataaacctagctcagaaagggcacatgtcccgtgtagagaacttaggaatctagtaggtgagatcaggacttccaatatcattagctctcctctcctgctacttaattgagtttggggtggtttgaggtgcttagttcgtgtacatactatctggatcctactgtactagagaccttgtgaagccaaattaatgtgtcccacatcattgacccttaccaagcaaacagccatatctccgaaagcaaaaggcttgtctgaaacttgtgcatgcatgggagctgaactgatggttcatgaagccaacaggtgtttcagaaagccaatcagtttctgtcttgctaatacagtcatttgatcagaaatggagagatgaggtaggctaatgtgaccgaattgttcttcttcattttccctctttccggaaattacagaagagaagataacaagctagggcagatgccctgatgaaatacaacatcatatcatatcaatcgatcgaagcacaaagatttactagaaagcatctactacgtacaattatgtccacatggactctttcttgaggaatgcctcctgcagcatcagctggtgatgagcagcagcattctccaggatgcactgctggtggtggtggtcatcttgatcttggtgctgctgctgcagctggagttgcagggcggcggtctcggcgtgggcgagggcgagctgcatctggagctgggagacttggttctggaggaaggagatggcggcgacgcagccgtagacggggtccctcatacgggcgttggcctcgtagacgaggctgctgacggcgtcgggcctctgcggcggcggcacatcgagcagcatcttgctgacgttgctggcgccgaacacccggtgcaccatggcgaaccgctgcgcctcctccgccgggaagtagggcgcgaacacgcactccgacgtgcaccgccgccgcagcagcttgcacgacgcgcacggtgtcccgctcccgcttcccgccattgcttgcagttgcaacttgcaagtgcaggcctctactgtactgggcagcaaacagttgatgcagaggagcaggcttcaggggggagggtgcacgggagcagagcttctccctttatagctcaacaacagcaacaactaagctaagtcacgacaaacataattaacactactaaacaactaagcatatgaggagtattaagtatagtgatccctcataacatgctaatcatgatgtcctgctggaggcatggatcacatccacccatatcattgattactcatgtataaatatgtacagtaatgggttctctgacttgttttgtctctacttggcagcaaataggattaagccatcaaaagtctacatacgagctaagccttcatccttctctgcagtgtgaattgcagacatcgatcacttcaaagttcaaagcaagctcaaattaccaccaccgaaaaccactttttttttgtttcactaatcaaatcaaccaaccacatgcaccgttaacattcctcccccgcgatcgacaaaaatgagttggatcctaactagctacgactacgacgacagctggtgatcaagttactactcctatgcactagtatatcttatataaataaatgtggactctagtgcagtttgaatgacctttggtatactggactgttaatgttagttcctacgcacgttctcagagttgaccttgagatgtaacgcttgcattttaacttctggtttaattgctagacagtactagtattcatcacaatccacgtaaaacaaacaactgacagtaccagcaaaaatattaattgtagcttcttataagctctagcaattggacattagcaactttggacacctcaccagatctcatcacctctcccagtcatcgatctgtttttatatatgtcgatcataacgtagtagctagatatataaaaggaaaatcgtaaatcaaggatatagattaattaaaacgtgagaaaacgacaggtagtattccagtactcctgtttgtctatttgtttatcccatacgtgcatgttagtagccaacactaggagaccagatgacacgtataaacaccggaagaggctatccaacaacgacgagattaggactttgtcgagcatcgaggatgtcttaagataagcatcattcatgcatacagtaggttgtggctagagacaaagtatacgtcatgcctgtgtaaatgcgaatgggacctccggtggttgtggtttcagtctgaatcaggtggtgagtgacatgtactacaaacacccatgccccatgcaatgcattttgcagcttaattatgatagatgcagagtccataacgacatcccttaatcccttatattgtcatttttcccagattttgtttccaatgtggatgacagaataaaatcatgttggagcaatgctagcaaacaaagataatattgttctcgattagtcgtcacacaaaagacacaaaattctacctcttgcgttgattttgtctagcttgtgtagaatacattagcggaacgaggattctgccctcatttgcttcaaaacctttgaaatagagtacaatggatcagtgttcttacagccgtattcgtgcttgcacatgccattgttgccaaaactcaaaaggacgggttctcccaagaatttcaagcataaatatgaatggtcatcaatcacagcaggcggccggcgccgacaccctaagttgccgacagtgttttaccactaagcaagtcaaggaaagtataagcccgttgccaactcttccattttccaaggtcaaaataaacgtaaccctcacatgcaagttcactagactaactgggtgatcacccacatgacagactaggctctcgtttacatcctctgcctaatgcctatgcatctacccaccttattttgcaaacttttactaacgccagtattttctttaatttttcctcaattcctagcgagagcatatgcaacaaacatgttctttcctcaacataatgacttgttcctatgaagacacttgctattggatagagatccaagacactatcatctggaccactaattatattagcttcatgttctctgaacagtagttaagatctagtcatgcatccgcatgtgctctaggatcaggtttcagtattcagattttggtctatccatatatctcactgccaagtgccacatgtcaagtgcctgacattccaagttagacatgcttatttctcaataccgaacatctagattttcaagtgcttccgatatttttccttactattttactactaaaaataaatgacatgattcttcaatgaaacttagctaattgtttccctcaaaaaaagacctgagctaattgtatgtcttatgatatcatttggtgccgtgcataataaactttccatgaatgaacaacatgaagttcttcaatatatcatctcaaaaattaaataaaatacttcaagcagtcagcgctggattttaatccatatgatcctaatacagatgcgtaagtatagcaaaagtatagcatattgcttagtacatcacaagtcacaatattcaggagtatggaaaaaagcagcttactttcccagtgaaacagcagtagaagaggcaagtgaccctcattgtctcaggatcccaaatacccatccacgacatcaggatcataattccattgcacgaaaattttcacctaattgaatgaaaaaacagaagcaaactcattacgttgaagcatattaagtattaatgtacatagccacattggacagaccaaaatgcgcagtggtatatcagaatgatatgtaattaaaaatgggatcgacaatcattccaagtgaataaacaacatgaattcctacgcaataacgtgatgcaatgtaactatgtgagcagatacaagtatcctgtttcaatatgattaatgtataattaaacttctgttctgaagtgaggtgtgctattctactcagtgctctcatttccacaagtgttctgaaagtaaagcaagaaagcaaagatgttttagtactattttaaaggagtgagaagttgggcctggcttggtcatacagataatgttaacgaaactaattgaaagtactgcttgaaagtgacaaatggtaagagtttttacatggtacaacacatgcatgatgatacttaccaaagaaaatgagaacgagtcaaaagtgcacatgctgccaagtaccaacacaaccctcacatataaattctacataacctacattgctatcttacaaagaggaagttcaaagtggtcctattctgttccaatcaaagaacatttatcatagcaatctgataaggagacacgtacatacggcagtatggatgtatttaaggaagaaaacgagtggatagcaggatggaaatatgttgagctaacaaagaggtagtcagcaaagaaaccataagagattgataaaatctatactggacatatgtgcagctgcagatgttccactagttaccaaaataataaactgagaagttctcagtaaacaaatgagtaaaccccaaggcatgagattcaccttttgttacatcgacaacagattgtgtgaaagatcatatcgctcttatcagcctaatggaagatgtcacactaatactgcttcaaacatcttccagattactctctcggctgcagcgtagtttctgtatgttccttgttttgatacctagcctaaacatcaaacttccaggtagctttgtttttcccaagtgcaaattacacttttcatcaacccctgaagctttccttttcatgtattcagctgattgtgcctgaactgtcatagtacaagtagccgtattggaaatttatttgaagcaaaaagaaataagcaccgaatttggaaaaatctaatagaagatttagtgccttgatttgatctatgtacagggaatgctacatcaatccaacaaaataatgaac

SEQ ID NO: 8864 - DNA, 23022 bp, Oryza sativa
ttttaagtggtttgggggtttcaattggcattttctctacctccttacctacccttttaccaggaactacaatatattttgtcgcaccatttgcagaaccctctgattgacctgcaccaagcaatgcccatgcatgacccaatgttcaccataataacacacaaacaagaacatagcaatgttaattttaacagtgaatagcctggataatataaaaaataaaaataagacccttagagaagaacagaacaataccttgaattgccagagagcagttcgagcagcttttatctctgcatctttctttgttctggctgcagcaccaatatattgtattccaccaatctctacagtgcatatgaaaggagctaagcctgaggctgatttggtgcaaatataagatggaatggcataattcatcttctgtgcatactcctgaagaagattcttgcacagcccagtctcttgctgaaaacatattaatatgtgtaaaaaaatgcacagtgatccaggaaagagattataacactatgctaagtttagtcagcctgattcctaagaactaaagaacatccaaattatctaaatcctggcagtacgagttcagtagctattaaacgactaatttcctattgtattcatgggaataacctagtagagttgtaagcttgagaaaatacaaataaatcatgacagaagacaacaataaagactttctgcaatctcctacctggccgatctatacaaataccctcccttcttgctcactgggtcctaactttagccgacaatctagtgatctacaaagccgaaagctctgagtattcctggagttatagtccatggtttgccttttctgtctctgtttttataattcttatgccgttcttcagatttctgagaattcaaaaccaacaactgtattgaaagtttgaaacaaaaagacaattacaatgctttctaataatcatctactacagcagcaggtcccaatagcccttgcttgcacaatgctccaatcagctgccccaacactggtgcatcgtgcacaaatagtggctccaacagtaactcctgtgactgtgtggcaccatcacctgcctgcagcaagcctatcagctccgacaatgctggtggatcccactgcaggccacgccttattgcctcctgcaccaactccctcactgtgcccatgtccccggcagacatgcacccggcgactaccacaccaaatgtccttacatccggtgggcacccggcgtgctccatgcaggtcatcatctgccgcgctccggcaaggtcacctttcctacatagcgcgctgatgtacacactatacacatccacgtctggtaccagccctctcaggagcatttcatcaaacacctcctccacagaatcgaactccaagcactcgctgaaagcttgcattgtcaatttgaagtatgcaagtgcaggtgccaccctgttagagcccatcttattcttcatgacctcatatgcctccgctacctttccctcctgcagaagcgcatcgaagacggcgtggtagtcagatctgcttggggaaatgccccaatggcacatcttgtccaagaatgctactgcatcctgagcggaagcgtactggcacagggaggagaggacagcacgacaactggccaggtcagggtcaagaagaagcgagggcatgcagcaaaggaggtcggcggcagcagcggggcggtgggcctggcagagtgtggagatgaggatgtggaaggtggtcgcatcaggggagactgatggggcagcgagcaagaggactttaggggcaaagcggaggaacgctggggaagagcagatagcagcgaggagggagttgagggcacgagcagtgcggagggtggaggagaagaaggtggcagcggcagcaagacggcagtggcgtgcaagggttgccagaaggcggtggtggtggtcagcttctcggtgcatttccctcaggttcagttgctgacttcctgtgttgcacaggccagtctcttgctggaaaacatattaaggtgtgtcaagaacatagaatccaggtaagagattatagcactatgctaatttagtcaggcgttaattcctagggactcgaccaaaagagcatcaaaattatctaggtcttggactcggaaatgatcacaaaacttaatatgtgtactttgatgtttgcattgttcatggttcacaaaccggggaagagtgagttcagaagctctttaacaaccaatttcctgttatattcatataatacctgagtagaattatgagcctgaaaagatacagacagatcatgacggcagataataataagaccgtggtgactgacagcaaagctttcacaatctcttctatgcaaataccctctcttcttgctctctaggacctaactctatccaaacatgaaagccctgattcgttctggagttatcaggtgagtggctatctcattcttcggattcgcgcgaattcaaaagcaggcactgtatagaaataagtagactatcccaacacttttactaatcttgtactacaccagcaggtcctcccaggccccaggtattccatcatgttgagttaaacaaaaacacaagtagagcagacagtgacttacaacagctgggatgtttgcgttggctggtatggacttgacaatttccatgagggcaacttcagcagcagactgttctgcagcctttctgttgaagaatccgggcagggagtcatagctggtgttattaatcaccactgtggacttgaagacaggctcatgggaaggtccctccttgaaggtatgatactctggagtctggaggccggctttctgcgcatactcttgcagccggctcttgaagacgtagcagttctcaacccctgggccaaatcaagcataccacaactcagaaaatagcattaccacgatgccgggaagagcaatttttgagatttcgtcccagcaaccagctctctatcaagatgacataataatgcaagtaatgtttcggcaacaaatgtagtagtagttacatcccaggcgcatcaatgcatcatgtatgatggtgaatgctctccagtaaagcaatttccatttaaaaagtggagaggaaccaaaacctgcggttagctcgttggaatgaacagtcctcccttggttcttgttgagaccaaagaagagtgttgagagggaggggggagagagagaaacatactgattccggcggtggcgccgttgggagcgggcgaggtgttggcggtctccggcggaaggggcgtgggcggcatgtccattcccacctcgccgccaccgccgccgcagcgtcgtcgagagtcgagagagaagagaagggttttggttgtgtgcgtggtgcgatgccaagaaaaggtggaaaccaaattgtataagtgcgtgcgtgtggatggtcgattcttcgaggcccagcgatgggcccacttgtaagtgcctcagaacgactacttattttttttattaaaaaaaggaaaagaaacaaaaaacagtagctttctgcttctaagcgctcctagcaattgattttttttttgggtgcaaaacatggtggtggtataaattgtggccaggaaaacatcctcaacataaatagtacaccagtatgatctgatgatttgcattcgctcctcaagtcgagcgtcaacaagatcgatcctttattacacatctcaaacacacagacacccttattactcactcactcgaccaatgtgctatgctcccgacgctaatcagttacttcctccgtttcacaatgtaagtcattctaacatttttcacattcatattgatgttaatgaatatatgtttagattcattaacatcaatataaatatgagaaatactaaaatgacttatattgtgatccgtttcacaatgtaagtcattctagcatttttcatattcatattgatgttaatgaatatatgtttagattcattaacatcaatataaatgtaagaaatactaaaatgacttatattgtgaaacggagagagtacaggttacacctcagtagaatattttccccagggttcttgctcacttccaactctccaagcatcagaatattttccccagggttcttccaagctatggaacccaggtacatttgtgtatttgccaccgccatatgccttcatttgagtttctcatccaagacagtttcagtatcagacttccccagtgtttctccacggtatgaaaacgcccaatagaatcatttctataccaactgccaaaatgccttcatttgagtttctccccaagacaatttcagcaaatgtaagacttccaccagcattttcccggtcctccaataatagatccagcacatccaaaggtcactggtttgtctggcgacccagacaaagccacaaagataaaacactcacagcttcacatcactacttccattaaactatttacagacccaaagtgcttccggccttccaatcctcatcattctacctcaacatcttcccatgtagacatacctgattcttcaactgttgtgtggcgccaaataaacccaagggcgacctcaaaacatctttggacgcattgcatcaaagtgggcaactgtacaagtacaattcatatatacaaaaggacaatgacgccctaccttgatgcactggatgactgtccagtgcttacaatgaaagacttaaaagaaggcattgattcatcaagccatgtaatattgtgttagctggacaaatgcatctatctattgaacaacatctatgagagacatgcgcatgcattctccctgggcccatataaacaaccacttgcccaggcagtccccactaacctgatttatcatatggaagcacctccaaacctttttacatttgggaaaggaagctggctaaggagaacaacaatccaaataggatgactatttacagtttggttaacctagttatttgggaagcctccaagtgtaatgatgggaccagggcaagatgccactttcgcgaccttctgcaagggaggctaatgaaccctgttttgtatcttacaaactgcaggtcagatcagagatgtagatatgcccaagaagcaatgcaccagaagctgtggcacttctataccaccaccaccatgtcactgaccaggctctccataacatcttgtatcttgtagctgtaccattggtgtggatcaacgcttggccatacatgaggccaactgaatgcatcatcattgcatcatggaacaagctgtaaacctcattgtacttggtaattgtcctccgcgtagatagaaacaagagcattatcaccagcaccagcggcaaggagtgatttgtatcggtggaaagaaaggcagtttacgctgcctattcgttgacccataaaagatggctggtagcgaattattgtcaactgttctccttcaagactaaacactttgatcatctgcttggctgagccgcttgcaataactggggcatgccgatgaacagctaatgccattaatgaacccctatgtgcttcaatagtgaggtagggttcagatgcccttctaacatcaaggaactgaatgtctccagcttgagatgcacttacaatctgtaattgcataaataacaaaaagggagctctgtaaagctcaaataatcccataaagttctaaaaaattggctgctctaacaattaaaactacaagaaatacagaagatgtgcacaaagagggaggatttaccttgtagggatcaaacccaggctgaaatcctataccaacaaccttttctgatcttggggcatgtggtcttgctgtatatactagcctacagcaatgggaaaaattgaacttaggaagtagcataaatgtgtgcgcgcaaataagcatgcatatgtgtgttgtgggcggaggatgcacatgaagcgaaatctctgcaatggaacatgtggttgatatctcatcaaacatctacttacctatcaggtgtacgcacgtcaaatatcctgacagatgcatcaagaaaaccagcagcgaattggccacatcgaacctgagatgcagactgaaaaaagaagctaaaatcattattttaaatttttcacactcaaatagcacatatgcacacagtaacaaagaactcacaagagctgaaatcccgctatcagcagttgactggatggtgttgacaagttgttccttgtcaagatcccatacaaggatagaggacatgtcaccagatgcatactgttttacaacaaaaggagtaagttccatattacaatagccttgattaatgagacattgcaatttgcaaaacatcgggaaaaggctttagagtttcaccagataacccgactgttgctgccaatcaaatacaatactgcgaccagcacttcgatagccttgaactgatgagaaagcagttacaagtttttgtcctcccttttgagtatagtttctccatatgcggacatttccatcacctacaatatgaaaaaaaaaatacatatcaaaatggtacaaaacaaatgagaacagaaaaaacataaagataagagatatacttgagccaactaacaacaagctatcatcaagctcattgatcagcaaaagtttagataggcctctgtcagataacttgtggttttcaaaagtattcactggcagcgcatcatcatagttccatactctgaaatgagaccaaactttagcgcaactgcactagtgtatctgaagcacaaaaaaaaaatcgattttaacaagagattccagtataatctgtttaccgtatttgctcattttcatccgcagcaacaacaataggagaaaatggcaacaacaatgatgcttttgtacccaactcaaacctcgtatcccagctagcaatttggctggtcatcttgcaagctgctaatgccaccaacacacagaagaaggggaagcatatcattaatcagataaataaatagaactccaatagcaaaaatataatgtaaaatagtgttgctaggccacatacaagatcgttggcatttagcaatgcaatccattgcaattcgttctcgctcttctcttctagcatttgcttcctcgttatcatcagaaccagttagaagtggcctagaaaagtgaccacaactccatctgtaaattaatgattggggaagtatatcgagccccatgttgctgggggctgcactggagcttaaaagaggatcagctaagccatcaggtgagttcaaaacatgtggtctgaactccatcgagcacactcggcgcaatcctgtgaggtagtcatgctgagggggactaacaggaggagtcctaaaggccatcgagaaatttcctacaaaatattgaaagagctgaattcaataatcatttacaccccacacaataatgtagtgcatgcaaaaaggcaggcatcctccaagcacttggcaaggatagaaattattaacctaccagagttcatatcaaaccaggaagaggagcgtgccattccaaagtttgatgaagggggcacagatgtctctcctgggtgtgcacctccattgctaagtctactgtttctcatgcttacttgctcaacacctatgagggacaatgcccttttcccaatacttgcaattcttgggtaaggatctttagcaacattgcacatagttgctataaattgggaatagatcccattatcaataggcctcgatcttgagtagttgagaccaccattacttgcattctctctcagtaatatgcctgaatcagagtgttgggaagaatcatctgactgtggagaaccatgcatgatgctatttgttgcaatcgggctgctcgtagagattcttccatcacgagcagtggcactgttatcactgccaacccttaaaacgggaccaatatgtgaggcaaggccactgctaccttgtattaagctgctgggactgtaaacattgctcgaattaatattagccaacgatggtaatgacttgagcagtgaattggtttgaggtttccagtactcggcggcaacagatttgatatgtttattgtgccccattgcaaagcgggtaagcgctgcaacacatcagatcaactcaaaattatcgccacaaaatcaagaggaatctataggcttgacacattactaaatgagtgtaagtccaatgtattaggcaaattcacgtacctacggcaacctcagatctaacaagagggctaccatctgaagagatctgcagaaggcttcggacaacatttatttcagctctcaccttttcatcatcatcagaatcgtcgtcagctccattcagtgatggagatccaatatccacaagatttccaagtgcaaaaacagcagaagctctgacctggtaagatcaaatatttaacacgtatgttgtgaagcaggtataaggaagaattaacacaaaatgacagcagccatacttcaggttgaggctctgacaataagcatataacaatttccggtgcgtttgattgcagaccaagtaactgagcctcagggaaatcttcccaaagtttgccaaggcataaacaaagccattgcaagagcaaaggctctgtctgagcatcattcggattttcaggttgcagatgtctcaggcagacatatataagccctgcattagcacaagcctcttgaccaaccctatgcccatccacaataacggctaaaacgaaagcagccattgcacgctgctctgggtaagcatccaaactgtcaagaaacctgataaagtatgcatgccctccatctttcaccaagtcaacctggcatgactgtcatttgaaaaacagagcaactaagtaaatacctgaatcttgagaaataaaatgaactgtcagagatttcaagttttcaacatagaacaccaccttatcaagagagagaatttttgtccatatgaacacaagaatttggcgcaactccattgcacttgtttgaagcagtttaagtacataagggaagatgccaacggacaaagcctaaaaaaagttccagaatttgaaatacgggtaagataatatacaacaacacttctacagttctacccccaaaaaagggcacgcagaacggtcaactccataccaaatcaactgcccaaggtcccatgtcaagaaatcttccaagcagaacaagtgctctaaatctgtgtgactgactaagcaaaacctacacataacataagtgtattagagcaaagtaaaacaattgataattaaagggaacccatgtagcaaatttccagcataaatactgaaagcagataagagatgggcaaccatgtatttaacaaagttcacaaataagtaacaagggcattttgcaagatggcctgtatgattatgcaatgatataaatagaaccaagaattgcgtcacaaaaaagcctcatagatgtccacccaagtttattttgccatcatttggagagtcagttaccaacttaccactcaaataacaaaaaaaaaaaacactagcatcttgaatagctggatggaaaaaaatgtcttgcctgaagaacaataggtagctgttctgggggtttcttgtcttcagagccatgatcaagccaaacttcaaatgctgtcaattgctccgtgaaaaatggactcggctggtttgagtaaggaaatgaacaaagtgatggtactgaagtgataattctcaaacaacataacaatgccaacaaaatgttgatgtccaaagtattagatcattcaaaaaaagcaaagacggttaatagcacctgaaactctgcattaggatcagcaattaattgaggaagcttagaaaggcagatctctgcagccatgtcccatgcatccctaaaattgaaatttaggaaattaaagaaaatggagaagaggtagctaaactataaaaagaatggctagtgccatcaattaccacatatggtgctgatgagttggtggtaacaaagggtatgaaattggggaacaatttgcggaccgcatgattctctcagcaagtaagaagttgcgaaagagactagcaaccaaaagatcctgcctgaaaagtctttggaatagatctgcgtagtgaaagttgaatcataacagattaaaagaaaatgaatgagaaagcaattgatcactggcattaattgtgattaaaatgactatcagtaccatgaggaagaacattccatgcaatagtgtctgtgatagcagtgaaaatccagttcaactcccctagaagagttttgcggtcattttgccttccaggaatttggtcaataagattgtgttccatggaatcacggagtaacgatcggttacaaaacctgaatagtttatatacatgaatatagaccattattgatgcagatacagcatgagaaattctatgtctacaacaatcaaacatgagaaggggacgaaccagtgcagtgccattttgatgggtgtggtgaggcaagctgtgaacacatcagcaggaaattctgcgctctgtgggagagtttgatgtgcctcacaggccgcaaggagaatgcagtccttcgatgaagatgcagacgagctagaactccagtctaggcgctaaagtgaacatgagtagtcatagtgaatatattaaacagtctaacaatagaaacagataggaaatcatcattatcactttcaacttcaagtatctggcgtacgtataaaaattagaaggaactataccatacctccagaaaagctttcacaatcattccagctgctgagcagtcaaaaacatatatagaaggtgttttcagccatgaatcaagatcagtaatgggaagcggaatatattgtgtgtaactctgcacaaaaagtaaaaaaagggcacttcgtcaaaaacacacatggataaacaatgcagcagcttatgcagtgtctttgcaacattcaccttgttaaatacccaaatctccccattagctgtaggctttggtacaccatgaccattgtaatgaaaaaggactctctctgttctagcaaatttacggcaagtattacatagcttcttaacttcctctaatgtcggatccagctgaagcttgtaacgagcctgcaagcatcattcgggcatgatgtaagtaatgtcatcataataaagtctataaacagcaaaagaagtgcctcacctttggctgccagcgctcatattgtgagtgtaatgttttcccaatagtttcaagggcttttggaggtgccatagaaaatggatctgaaaaataaatgaaagagctatgagaaaaactcaaagcaactgtacaaacgcattaggagtacaaagatgaatcaccatgtttattttagataagctttctcactctagaacaatcaacaaataataaattttattgatcaagtccctatcctccacaacttaaaggtccggcatcttataacgcagacccggaaattttaatcctctacaaccaatcctcaggctttcacaaattaatacacatttggttataatcaaacagaaaattaatggtaattttacagaatagcatgtgtcagaccagtctttgctgcaataacctctgattacaaaataatcacccttgtttggcatttagagcagtcaataaaagatatagcttaaatgagttctaactaacatttgcacgtggagagaaaaaatacaacaatactggagttgcataccataaacatgaaataaaactgccaactgcaggcagacgtaaattttccagctgactaaaattcaagcatatacatatgaccaaatgtttacctatccagcactcctttcttgcacaaggggagattttgatcacatccggcggatcaacactaatgtttaaacacaacacaagtgccacacagccagttttcatctgcactaccaaaacactattagtaaatagcataaaagcaataacatccaacagtacaccagaaaataaaaggaacagaaatacaaatagaagtatagaatatccaaaagaagcatccagaagaaaagaaaaggtattgggacagatttctgaccaacgtagacagtcatttgaaaagcaaagctattttctgatcagctacttctagataaaactgaccacaaccatggagcaattacatgggttctccatcatgtcatagtaatttagaatattctctttttttttatgaatcacatgccacaaactgggttactaaagttcaacacaatggtccaccctagataaataaaaataagatgcaaatcccactagggacatcagtcatctgaagaagaaagaaataatttattcaacatgagtgttcttttgttggaaccaagcatttccacgatgtccaaaaggatatatggggcaaccaaacatctgcattgtacaagcgatttgttttgcccgaaagcttacaactcataaaactatcccagatggggtctcaaggttcctaattgtcatttgtttccagtatgcactacttcccgtccatcatcataattccattgcagaattacagcccttaaactaccgcatgctcacatgctagagcaacatatggtggaaatctgatatgcctataatgataggtttaccttggataaccaagaactgtaacattatgactatactaccgtaatgctggttttgtccattgcccccactcaccattttcacatatcaacttcccaaccaaactcagctgaaactatagtttctctttctattaacttcctcaccaaactcggtgaaactaagtttctctttctattaacgtccccgccaaactcggctgaaactaaagtttctctttctgccaacatggtgccaaactgccaatcagcaattagcaaatactgtcacttggacaaatccaccctactagatttaagattcgaaggacaagcccaaaattgttaacctcaagactaacaacaggctggctctgataagaaagatgagatgggcttattatctgaaacatgcatataggcgagtcggggatcgccatgctgcttttaaccatgcagcaaaatggtgcaacaatatagcaacaccactactatgtcccatatgtatcgattaacatatgataaattcaataaaatgatgcattttttagccctgcacctgagcggccctcattgataaagttgagtgtcctgcttacatagcactactagataaggtaacatcaaccattgtatgacttgagaaccccaattacaactgaaagtgtcgtcataatcaatcatcaaataataataccaataatatgtggaacaaaatggataaaagatattaaaattactagtacgccaccctctcaacccagtcaatagccgcccctaattttcattgtcagctcaatccattaaacgcattgctaatgactaccctatgaatcctcctcctaaacaggaaccagcaaagagttgaagagcagcagcaggcagaatagcatccattacccggtctttggggcgccatttggagacgggcccgctggtggagggcccggccgccgccgcggcggcctcgtcgaacccctcgtgccgctgctcgcacagcacaaccacctggggcagcaaggcgacctgcggcggcggcgggggcggcggctcctcgtcgggcacgtccctcctggggtccggtccattctccacggggaggtggtcatcgacgaggtggttggtatggtgattgggcagggcggcggatggctcggcggaggaagaggaggaggagtggacgagcctggaggccatgagatcccccaatgccatctacgcttggtccctcctcgcgggcggtcaccccgaagccatcagaatcgaatccggcaggcaagcttgaagaatccgaatccggaggcgggagggagggagccccgggcggcggcggtgaggacgatgacaagattgacaggacgggagtgggggggaggggtttagggttagggtttggagaggggggaggagagggttggggacgggaagcgacggggaggtcaggtggaggaggaggaagacgaggaaactatttactaaaaaataaaatcggaaattggattctgtcctctcctctcgcttgctgctgctgctgcttcttctccttttgcgagtccggtccgggcgtgttgagtgtgagatgcgcaggctcgtggccgtgcgcttcttcttgcctctctgctctgtttttttctctctttttttccttttcttgctctggttttttccctagcttgtaatcctcctcgtattttagttcagtgcccatgcttaagcataagaacaaatggaagtttgcatctaaaaaggtgcatggatcctctaactcctaagtcctaaagttagtgactccttttgctagtttatactgcaggatgtggcatgtatagcttaattggactggatcacctaactttctttttacttgtgtttagtaaaagtacattaaataacaattgtgttgctagatatactttaaactagcatggtggcccgaatagattgcgcgtctagcatcattatattttctctcatataatagttaatagtatgtagtatgttttctcattatattatttgaatatattaaaatgataacataattttaaattttgcaataactttacaaaactactaatgtgtaatattcatattgtattttatatacgtgttagttattaattatttttaatatcaaattttagttatttgtaaattatatatattgacttgttttttaatattttttttaattccgaattttctgtaaattgtatttttatatagactctatgctattcttctaatattatttatttttatttctgaatttttattatttctaattgtatttctatgtggactctaaactaatttttaatttcaaatttcagttacttctaaattgtatttctatattgactttaaacttcttcttcccatgtttttcttaattttgaattttagttatttataaattgtatttttatacggactctaaactctagttttaattttattatgtttattccaaattttagttagttttaaattcctatatggactctatactttacttctaatattccttattttttaattccgaatttctaatttttcttaattgtatttctatatggactctatactctacttctaatattccttatttttaatttcaaatttctattatttcctaattgtatttctatatggactctatactctacttctaatactctttatttttaattccgaatttcagttatttcctaattgtatttctatatggactccaatctcctcttccaatattccttattttttaatttcgaatttcaactatttctaaattgtatttctatatggactctgctttttttttctccgattaatgtgagaatttctaggccatgagagcgaacgtggaggctcctttttctattcctttaataatataatagattatttttcaggcaacgcatcaaaacatttaggcccccatcgtttgctccatatagagtaagttttaacttttaaaagttattttttgaagtttttcatcaatatttatttttttattggtatttaaatatctaaggacacgtatataaaaatattacccataattttttttctaatatgtcattcggcatattatcagtatatggccaaaagatggggcattaaatttataaaaatcaaacattgaaagttgggagcattagaacaatttagttaatcaacaaatgtaatccttctctctcttgtttttcttacatccacgtagttaaaagccttacatgacaatatctcctaaatagtgacaccgcaaaattgttcatgtcataagagaaaagcgatgaccattagaacgacgctattagatggggatcgctttcgagagagtacacggtgcctcgtgcttacgcatttatataaatgacatctagcggataaaaacatcgtataaaaaatactacatataattttgaatagaagaatgttttgaaattctacttatcctataataatgatatcgcaataaagcctctttactttcaacatttttctgctacatatttttgtaaacttttgaatgtgccatgaaatgctttaatacaattggtaaatgagagatacactttgattctgttaattcctttttcattcgttggatcgcatgatgagctctaggataaatgtcattctcgtatccacaatttgatttaattaaccatatcagcaattaagcttgcaaaccacattttacatgtagtaccacttgccaagagagattttccaataaacgtgcaacggtggatcccatccatctttctacctataataaattagaaaagaatacgagaaataaatggagaaacaaaaacacgacaaaaagaaaagctgatttgagtatggttgtcgctgaactgaatgcaccgggctaatcaacatggcactagtgcaaccatttagttgcttccccatgcatataatagtgcaaattggatgtgcatatgttgacctctgaacgactcatctgttctttggccgataaaaatatttaggtagggttgcatgatctagcaacacaatccattaacgtttcttattgctagttatatcaagaagatgagagctccctggctaggccacgtctcctccttagcattggcaggccaacaaccgcatgcctgaaatagatttttcaacaaagtttgcttaggaaattgcagagatagaaagaacaaatcaacgtaaagagattttgcactcgatctggagaactgcagaaacacacataggtatagtatcactaaacaatgattaataacagatactcagttgttgtttcaggctgataacactaaaatatgatgtcaaagtgcagagattgttctaaaaaaaaggaagtgcagagattgcaatggatggtttgcatagagtgagctgtcatctggtagcaaaggaaacatggcagatgctagttggctcactcatcacacaccttttatagctgcaggtacccacatttgctgtgctccaacgtcacctgggattggagcctaccactccatatgtagtattgtcacaggtattaacataatagtgtgctactcctacatagtagtataccgccatcaacatgagtctttctgcatgaaatgattcctgggagccaaaaaccctaccacactttgctgctagcatttgggttttggacactgccaagtgccaaccaatgtcaggttgacacccactcactcgcctttactcgactatatctatgaataatcatcatcccgccgaatgggatgattgtcactctgtcagccaccgtgaattgttctatgtagagcttggtgtcactcttaccaacaaacagatctttctggaccagattgtttgctgctgatcattagcaaggctctcttcttattagcatttttagttaagttgttagcaggcttcagaaaatttaggaacttacattggtgtgatgtgcaaattgggcaagagaacaagccctaactgccgcatcaccctcaggtacagtacttgagccaagaaacaaatgcctcggtttgtctttcttgtttgtaaattaattaatacatgtgcaactgtccaagagagcgtatttcattagaggatatttcagctcatatacctgtactgtgcatttcggatttcagtcctccctgccaaatttgcagtttcagaatatgattattcagtaaaagcacagctcagttaattaaaacttaaaacgtcctaacctgcagtgcttgttcatcaatgtaatacatggttggtggatgtgaacttttgtttggagcaagcacgatgtcaggagtagtcaggacgagggggtggagtgcactggcacagagcaacacaattacagaagcaaagaagagcaagctagctgtttacaggtaggctgcttcagaacaggattatgggtggtgtggtcataggacctctgtaccttttggcgcatgtgccactccctgctcttctctcctttcttgctcctcaaccgtgttcatctgtgtgtcacactgtcagcatactagaaactctgcaacaatctggcctttgttttgtgagagtacagtgatgagacttgtcatccacaagaaaaaaaaaaggtagcatttcttcaaagcaaaagaaaagtgcacacatgactaattaaaaagtttttttttctttttcctgtggctgtataataaactggtaaatagacaaattgaagtagccatgtgatggaactgaaaatgccccagaagtcagaaacaacattatagatgagatctaatatagcatttcctccatacactttaatttcacatgccacttcatagcataaaggaagcaattgcacatgaacatgaccaatttatgcctatcttgtaatgtgcatttgcattatgcaccttgtagttgcatgcttggcatgatataacctaaggtagcatgaacagtatgtacagttatatttttattaccatgaatagttgaatttgagtgaattacccaattaagcttttttgctcctctgctgcaaccagatgggccatagttctgcccttatttctcaacctcctttgctaccacccattgtcaacagacaccatggacatgctccagaatggagacttcctcatggggcctagcaggagctgttctgaacactattgttggaccattccctgcagaaataattacagttcaatgcatagatgagtactttgcattccatcaagtggacaaaatttgcagagtaaaatagcaaggtctacaaattcaatattaccagtggacatgtcaaaggttgatcagatgaggaggaagcattcaaccagcagcaatcggttagaatgatgaagcagaacctatccattgtgtatagcattatgaaattcgaaacaccatgacaacagtagatgccctttcacgagttcgacgatttattgtgaagaatctacaacaaactaggatataaagttctatagattgcaatcccaggctgttccgtacccatgactcatgaatcatgcctaatatacttaacaaccataatcaaattcagacctagtagacgaatcacctgattgcgaggggaataccgtgagacgtgagatatgaccaaatcatgcaattccgttatgctaactaataataataaaaaaagagaaacacttccaatgtagcctttttcacctttcagattcacttgatatataaagcttctgtaaaccaaacaaaaaagtggcccagaagcagtttcagcataagtttggacacagccacacaactctgaacattcaacaacagaaatctacgattacaaatatctgtcagagcaacactaacatttttattcatctttcatagccatctcatgcctccgtttctgtgcaacctcaacaagcagagtcagcagggcttcacatacctgtgatgtgtctgcctgatccctaggttcctctttgagtgaagaataaaccatccatgcatggtctaacttccgctctggccggactactactgatccaggaacttcagcatccttccttgtcacaagaccatcactcttctcaccataccttgccaccagaagttgtgagcatgctgccattgcagctgaaagtggcattacaactgggatcctagtaggattcccatcagctgcagctgggagctccaagtgtgcaacatgagagagggcagtaagcacacttggggtgatgctagcctctgtatggaatgagacaatgggaacctcaggaggcaatgggttctgccgcaggaattctttcctcctctcatatgtcaggtcttccagagcctgaagatcaccctgaaggaaaaaaaaagagaaaacaataaacatcagtgtcgtccattgtgcaggctgacaaggtaacaatcaagctcatcaagacaaataccttaaggactttggataccaaaatctccatgagtttacgtaacctgacataatcaccaagctggccttctcgcaagatatctgaagcaaccgggcttcctccatatgggctttgagctaaagccaaacctgcgaccttgtctttcagttgtggccagtaaagggagagggctgctgctgcatctacaccacccttgctatggccgagaagtagcacccgcttcttcgatccccagtatatttcttctatatattcctttatttcccttgcatttttacttactgaagactgtataattcattatatgttacttgatgaaaacaatattaagagtaagtaacaaagaatattactgtatggaagtacctcactgtgaatcttggcaatgtgacaagccagacccatcttggagaaatatgattttgtcttgacaaagtaaagaggcccatggttactaaacaagcctgcaaacaatagaaaagctaatgtcaacacagaaaattgccaaaatgcgaattcacaaccaaagtggcagcaaacttgcctggaaccaacagatagaccatcgaatcaggcagcttgtgttcattttttctgacagtgaatcaaatgatcacatgagataaaaaagacgaagcatacattacatcttttattaagagcagttgcataatttaaacattgaaattttgaaatgcaaattattatgtttgctgacctcacagcatcaagaatttccaagaatctggcagttccgtcctcagttggaggtaagctttgatcctgctgaagccatccaatatcatcggctgagccacgaacagttttccgagcacgttctacaagactgacaaaaagatattaaggatatcaaagactagtcctcccaacaccagaacatcttataaaagaacacctcatccacgaaagctaaattttatattccaatttactcttaatggacatcaaatgacacgtgttttcatgcacacctattgacttgattatttggtacagtgcataaaatagaagtgtgtgcactaaaaaaagagtcagttccaatagatgtcaattgcataacaacttaacaagtgcacttaacacttcataaagttcaagcatgcatagtttattcatgatatagtgatgatatggtatttgcagcttgtgtcacactatcacctatttgtttgattagaattcacaggacaagacgaaaaaccaaatgcaaaagcagtctgtacccttgaaacagtgaagccccattctggaagacgcgcaaaggtgccatctgttctgtgatttcttgagatgagcttccagtattatcaatttcaccaggagatgagtctgctgactgttcggaagaagcctgaaaagaggatccaccagcagttgatgcaggtggcagcgtcgctagctcttgcccttcgtcagaaatagctgtgcaataaatcaaggagatgcagcagaattaccacattgtgtattttgttatgaaattggcacaaaagagtcattcggcgaagtcaaggagaagctaacctgtgtaaccagatactgggaggcactgggtaagatatgaagctgtctgggccagataagacgcagcttggtttaaagctgggacggagaggaagagctgtgaatcttcaatcctgttggctgaataactagcatcaacctagatatatcaatgaacattaacaaaattggaatcatgatatggctgcctatgatggcaacaaaaggctatattgatccaggacaaacttttggcaagtgaatgcataggggtggtccagcaaatagtaacatagggaaaaaaagtagaagcacatacagatgatgcagaagtagaaggctgacccagatttgaaggtaaatcctccatggttggctctttatcctagcaattaacattaaattggtgttggtgaatacgcaattcatggatgtactacatgtgaagcaacgagaatagaaaatgcaataaccagtgggcaatcatttagaaggctatgagatggagtcactggtagcgtgtgaggaagtcaggatttagggcatcaaagatgtcattactggtgggcaagcctaattaaggtatcccctatctgatctcttgagtaaagaggagggaaaaaaagaaaacattccttgaattcgccgatatcggttaccaaccaattccaagtttacggcagctaggcaagagtactcgcaagtggggatctccaattctcgattcatccaaggaagaagaagaagaagaagaagaagttaccgcaatcaagaagatggagggagggtttggaggcgatgccgatgcgttcctttccttgtgctccactcgactcgatcgttggcctgctactgcgactgcgctccctcggaatctgattgggatttgggacgaacaacggaaagaagcgaagccccgccccgccgcgccgctttcttccggagtccagacttttctggtcttccttctatttgggctgggcctgcaatcatcatcacttcagttcacactgtgaaaagtctggacctcctcctatttgggctgggcctgcaatcatcatcacttcaaactgttaatgaggcatcaccaaaagctaagctttctgtatgagtatgatgatgatgatgatgaatcagtcgtcttctcatccaattcaagctagttacagccagcagcagcatcgaaaaccaaacaagatatttcaagggcagagccgacaagatactaccaacaatatgctatactagtaacgggagtaaaatgagactttttttcaacaatgactccagcaatgagctatctatcttatccaacaacaagctgcttgccttcaatgattacacgttcgaattcgccaggaaattctcccatatttaataattcggggatcttactcctagacttgacctgcaggcatgcatagctagttacaggtctaacacgctgagagttgagagttgctgaggctgggaatacaattcatcagtata

SEQ ID NO: 8865 - DNA, 21330 bp, Oryza sativa
aagaaaaagctgaagattggcgggggcctgggggctcactccgatgcacccgggtcgccagccttgtcgccactatcgcccgctccaccgtcatcgtcctcctcgtcggagttgagggcgaacgcgagccgaggggccgaaccctcgaagctgtggacgatgtggtcggcggcgtcccggacctgcgcgcgcgcgccgtcctcggtcccgggaggaaactcatccagcgccgtccatggggagaagtcggggtccctggcctggtaactcgccagtacgagctccactgctcctcgggcgaggtccctcgaggatgacttaatcgtcctctcgagctcctcggggagccgctggagagtcccggccatttccgagaggcgctgggcgaggcccccctggttggcggcgtacttcacagtccgcccgccccagaggccagcctgccggccggcgtgatctagacgggagacggcgtcccgaagcatgccgggccctacttcgcctgccaagcggagggcctcgacctccccggtggacgagtctagcgcgccctgcagatcggcgatggtgtgttcggcagctgcgaggcggacggctaagtcgctttcgcccgtggccgccccgccgatgcgcgccctcgcgtccagctcctttgcctgcgcctcgagttcagcggcccgctggttcagtgcggccctctcggcgcggacaccttccagattgtggcgcgcctgctcctcccgcgctgcctcgcggagggacaggctgtccgctagccgttgcgctgcggcctcggcctcctcgagagctcgctcccgctcggtgagcgcgtcctcgcggaggcggagtgcggactcctcttcggcgcaggcggcctcgtgcgccgccagcgttgcctcccggatggaaacagcggcctcgcgatccaccaggcccctctccaccacgccggcacgctcttccagcgccatggcacgggcctcaagggcttcttcgcgccgacgggatgccacctcggtctccgccgcccgtcgttctcgggcagcggcagcgtcaaggacctcctgggcggcgtcgagcttcttccctagctccgcctcccagctcccgtattgaaggcggagggtgtcctgcgcctcgttcatcacagtggtggcgatgagggcagccccccgctcctcctccacctccttggcgatctcccccagcacctttcggcgggcttcgagctcagagacgtgccggcggtgtgccttgcggcccacctccaccatggcctccaccgagcgtcgccccttttcgacacgcgcccatgcggcgtcgagctccgcccgctctgcttgcagggcctctacctgggcacttaacccgtccaacaccgtggtgtttgcgacggccaaggcctgtagaaggggttctgcgctcagtggagcgacggaaggcgtggggaagagccgcctcggagaagatgccgcgcggttcggctcgccgatggacgtgccggactcagggacgtcccccggacccggcttgtcctgagcgtcgcctgagggattgggcccaagcgattcgcccgcagcctcgtcgcgagctgcctcggaagtcgtcgtcgccgtggcctggtggagtctggcctcctcccgagctagaagtagcagccaccaaccaccgacggcggcgacaccgactgtacggtgaagaaccaccggaacagccgaagggatgggcgcaccccgctgaacatctcgcacaggtgcgcaaagatggccaatgtcattaccgcattgggggtgaggtgcgccatctggagatcgtaaaactccagaacatccatgaagaaagaagaaaatggcggaaccagccctgccattgcaaaagggaggaagaagacggaccgccccgggtagcatggcgctgggcgtccctcgcccagcatgactatctcccggccggtggcagattccggcatgaagcggcgcggcagcccggcctgcctctcgcttacgatgcgggaaggcggcagcatgctaccatcgagcagagcggagccccgtgccatgacgccggaggaagagatgattgagagcgagcgcgtgtggcgaaggtagggcacaggaaaggaggagttagggcgcaagcggcgaagacaaggggaataatggcgaaaggaaggaagcaaatctcctcctcggcgtctttatacccttgccaacgctgtgcccggctcctcgcttctcgcgcccactatctcgctccctcgtttctcgcgcccacgcttccactaatcccgttcgcccgcttgcggcgcatgaggtggatatgcggttgtggcagtcgagatggaacatatcgtgcgtgcattaattgcgctcgctgaccgaagtgccatcaccatatctccaggcaaaacgaaccggctcgtcccgattcgcgtgctactcgagtaatgtggcagtcttgaagagaccgctcattattgacagccgagtaaccattgccgatgtgcgtgatttgcgaccgttgggtttctgcccaactgtggagaccggtcccacctgtcaccaggccttaggaagtggcgtcacgcccgaccgcttccctcaaggagggcgatcgccctggcataacgccgggggctactgtcggtgacatgggaccgggagtatcatgactagaggcttgggcaggagcaatcacccacgaagcctgaccccctcgggggggtcgggcccgagggtgatgtggccgcccccccctctctctttgtctccccgaggggtcggactgctcccgtttcggccccgagggctgaggcgccctgaccccttgtaggttttgcgccgcgtgtatgggttaggtgagcacagcggggctcacctaaccgcatttattgcggtttggacgagcgcgtcacgccgcatgtaacgcagtgcagcgcgctcgtttatccggtctgtgaccagtctcagaccggtcagatcgtggattaggtggcgacaggcggtctgacacacgcctcgccccatcccgtcaagatgagtgcctccaagcactcgtccctagccggagccggcgtgttacctcctggagatggcacgttggtcccggtcagatatatgccaggcttcatcctaaccattacaggcaagatattgtatgaagaagggcgaacatgcagattgtgaaactgacacgtggtggacaagaatgaccggtttatgaccggtctgacactggtcatgtcatcagcagacatccatgttcccacgtcgcgcctgcctccggcggaagtggaggtaggtatgggccgtcccatcagaaggtcattcggagggcaaccaaacaaatctccgtccattaatgaagagaagtgaagttagagggaagagaggagaagtcccgacacaaaaaagagagatggtgcatgtggtatccccttgagatataaaaggaggaccttgcccacctagagaagaggaggattcggatccagaacgaggaggggctggcttgcactttgtagcttcttcatacacagatccatcaaaacacaggagtagggtattacgcttctcagcggcccgaacctgtatacatcgcccgtgtcttgtgtgtttccactctcgcgaactttccacagattaggagcttagaatctcacccagggtccccggccgaaccggcaaaggggggacagcgcagtctcccggtgaggagctccacgctccgtcagttgttaacggataattcctcgcgaacgtcgtcggcttgatcacccgacatgattgcgaacggacatccggatatgctttaagttgggtacatgagtcatgctggccacatgaggtacacttgcaataaaccaactctagcacttccattggtgttcgaggaataattctgcttgcttactggttctcgcaccagtacgcagcaatctctcacaccgcaccttccatcggtgtacgagggataattctgctcgctcactggttctcgcaccagcacgcaacaatctctcgcaccgcaccttccatcggtgttcgagagataattctgctcgctcactggttctcgcaccagcacgcatcaatctctcgcaccgcaccttccattggtgttcgagagataattctgctcgctcactggttctcgcaccagtacgtagcaatctctcgcacctttacttcagatggtcaaggtacgactacggcagcgtagcggtcctcgtaccacgactccaagtgatcgagggacacctactcaccggttctcaaccagttgatcgtagtgatctctcgtacatttgcttcaagtggtcgagttacggctactgcctggtcctcgaccagcgatgtagtattcctccgactacttccactttcagtggtcgcgttacggctactgcctggtcctcgaccagcgatgtagcgttcctccgactacttccactttcagtggtcgagttacggctacttccacttttagtggtcgagttacggctactgcctggtcctcgaccagcgatgtagtattcctccgactacttccactttcagtggtcgcgttacggctactgcctggtcctcgaccagcgatgtagcgttcctccgactacttccactttcagtggtcgagttacggctacttccacttttagtggtcgagttacggctactgcctggtcctcgaccagcgatgtagcgttcctccgactacttccactttaagtggtcaaggtacggctactacctggtcctcgaccagcgatgtatcgttccttcgactacttccactttcagtggtcgagttacggctactgtattgtcctcgaccagcgatgtagtgttcctccgactacttccactttcagtggtcgcgttacggctactgcccggtcctcgaccagcgatgtagtgttcctccgactatttccactttaagtggtcgagttacaactactgcctggtcctcgaccagcggtgtagcgactctcctactacctttactccaacaaagttggtatcaggtacacaatatcgccaagtgttttacccagagatcccttaccacgacgacacctagcgttgaaacctatcctactgtccctttacgccgtcttggcaaggcctccgaggaacctaagggatcttcggctggggacgcccagagccgataaggccttgtcggatccttcagagacgaaagaccatgtaagatctggtcgtgtaagagttctcgccgtgcgtattaaccaagctgtgtaatcggaaaatgaactttccaacttcacggctgggggctaggatcagtgcttattcaaccaagacaggtcaagggtccaagagccttctcctccgagaacgattctccgatgacaaggctgggggctagggagagtgtacaactcaaacgactgaccaaagtcgtgaactgagaagacactcttacacaaaacattggttagtaaatttgattcattttcagtttaccatacatattataacatgtcaccctttgagcattcgctcgggggctatttctatttgatattcttttctgagtattgatttcaggaaaattctattcgacattgtggaagactctatgtctctatggttctacacaaagattgactaaggcgagtatgaccaatgtcgacaaagctccgtcgcagactctacgccttctcgatcgctcgagaacggttgctggatctcgacaaggaatacggaatgaagagatggtgtacccgccgagataaaatttcttgacttcaatccaaattctcaactacagcaagacgggagacttagtcatatgctctatactttctcggtcgacatcagagattgacttagacaaaccctttcggtgcccgcacgaggctgacaaaggaagtccaacgttatatctaaactcaccgagaacggtcacatgagctcgataacagttactccaatgtctgcgcgtggttgagaatatgaattcattcatttgcattaaagtcgggggctactgtcatggttatggataccacatacctaatagtagttgactaaatctcagcaggacccaccacatactatgtcctatacggaaacaaccttcggatataggaggagttccgataaggaaagacaaccagagttctacatggaaatgacaaggactactcggattgtatccatattggtttccctagttctacttagacaagaggacacctatgggtataaatacaagcccccctaggaggacaggggacacacaccgaccatgagacgatcaccacgatcgggacgaccacctcatcaacacccaacacaatcaacatacaagcctacatacgctaagacacgccgccggatatcgacttcagggataggcatggctactcctttacggtgtctccggataccgtcaagagagacgaaagcgctatctctgatctcgccggacacggattcgaggaggaaggctaccctgttgtcgactacgagtcagaccttcagaccaccatgtcgacaacagttagataggctatcccacatattgtactggtgtgattatggtaaataaaagcaactccggctctggccaacaggatgtagggttattacctgacaactcaggggcccgaacttgtataaaaatcctcgtccccatctcttttacctcagtctcgcatatatcctagcatcaacggtccccatactatgcaaataccagaatgatgacatcaaacgtcgatacaatcatgcctactccctctgtttcaggttacaagactttctagcattgcccacgttcatataaatgttaatgaatctagacacacatatatgtctagattcattaacatatatatgaatatagacaatgctagaaagtcttataatatgaaacggaggaagtatttttctactgccaggagtagctagctacttcctccgtcccaaaatgtaagcatttttgaggttggcacgggtattaagaaagtaggtgagaatgattgaaaaaggtgtgtgattggttgaaaagagaaagtaggtgaaaaagaatggttgtgattagttgagaggagaaggtaggtagaaaaatagcttcattttggaacaaagtactgtgctagaaatagctacattttgggacggaggtagtagcattttcgaaccttgtaccagtccacgatagatatctatactaattgattgaaccaatagatttgaaacttcatttattatgcatatatatatatatatatatatgtcttatataaagtacagttgtatgtacacaagcttcgaatttcaagtaaaacaaataattatcctagactggaatatgatgatgatgtatatatatcaaggttatgagccatgtgaacttgaactgagcaattaagagttgaatgcatcatcatgtatctaaaatcttcctctactccatgtccgtgcattgagatcatgtatctaaaatcttcctcctctccacggccgtgcattgggcgagtcaatcttgtctaggactaaaaacatcgcgttccatgtcatcaaaatgctgcctcctaataaatcatgccagtctgagaataaacatagggagaacttgttgggaccaagatagtggatgcaaaatacatatgcaatctcacaaagaactctcagtaccagatctgcatccaggtcacccagtcgaggcatatccttgtaatgatagtatgcacctgaaagcacacaggttttaggggagataacacacacaacactcaaagttaatttcataagggaaatatcagcactaaaagatgtaatccaaaataaatcaaacgcaaggtttgcaagaagaagcagtcaagccactcaaaaggtttgcaagataatttgcagcggtgatgccttcgcgacacaatggcgatgccttaaaaaccatgcttggttcctttttgaatctcagctaatgagagtggacatcacactatctacttgttgcagcaaaatataattcatatctctttgcttattaatgaggaaattatgcaatatgtcacgaaaggaaattcctacttccaacagctaatccggcactcaatcggagaaaggttgttaacgaccaaatttggtaaatcatatatcggatttggagttaaggccgaagtggatttaaaaggaaatcgatgacaggaacagagtatgaatcggtttcggaaccacatcggctacggtgttcatcggctgataccgaatcggacaaggtgagccgatgtagccgattccggcaagataacattagaatcattgtcggatcagattggtgtgcttcatgaggattgccatgcacggattgagtccgaagaaggcaattgtatatattaattaggaatagtctattagttttctttttatctttaggaaagtgtgtttagtgtccgattaggattttatgttttccttttatctttaggaaagtttctttattttcctacaaggactagtatctacccatgggtataaatatgtacacccggggtcattgtaatttatctctatgatcaatacaattcggcgcatcgccacttttttaccttttctactttattttatcgttcggcggaacttggcacctgacgcggggctgcatcggcttcgatctccggcgaatgggtaagtccaatgttccgctggcccaggcaattgtatcgtctacgtcggcgtcgttcaatgctgcatcagtacattcgacctcttggattgctctgatttggacaatatgtttgcctggctatttatcatgtgtctatattaatctagtcttagaatctcaatttagctctatcggttgtctctcgctttagggtttctgccggtatcggctaaatcgccctgctagattagattaacttagacatctaccaccctgaaaatcagtcaatggcttaattgtttagatattgtatttctttttatacttagtgctgcatcagttaagtttgatctactaaatcgtgcttagaaccataatctctagcctgctttttgactgccaataagggtttcatcggggtttcagccgatgagttatctggacattgcatcggcttataaggattacatataagttggatttagtcgatcgcaataaagactttactgattaatctaatcttgtggattttatgacatcggacccccagccgatgtatgtttttacccttcggattggtacttgttctattacatcattttgttggccgattggtttctactagattatattgctagatcattgttatttatcatcatcagccgatcacctttatatcattatctacattggacatatagccaattgtttaaaaccctatcgacatcggctcgaatcggcatcggctaatatcggctatcggctggaactactacatcggcttgtcagccgatcggctgttttatccactgtttacatatcttgtcagttgcaggatcaaactgactggcacgcccgcatctcatcaacctttggacctgcattggagctaagcagatctcccagaccagtgtgtcatattttttcgtcaacaaaggtgaaccctggaccctatggttccaatagctagacaaatattatcttatgccatgcctagtagcattggaagccacatacagatttaacctcatagatagtcataggtatgggcgtatggcagtacactgttgttgcataccagatgattcattcattgaggacaaattgtaacaggcagtacgtctaccaagaacacaaaagtgccttatatatactagtataaaaagttgtccaaggagtgctgtgggagcagaaaagaagcaactaattaacataaatagatgtagggtttggtgatggttcattcatgtcgctggcaacctcgggcgagctgagcagtgtgggaagagagactgggccggagatcaggaaggaaggaagaagctgaggaggagtcacaccttggggatgatcgattcgattctgcacctgttgtgttggcgcttgaaggtgcaatggcgatggggtagctgcctttctgaggaagatcgaagccccggcgctgaggtgtcgtgccggacggcgacttaattgggagcgctgccgcggccgaggggacgagtcgtacgtgagctcggacgagcgcgcgcgtcgtttttttaagcttacaaacagatcaatgcatttaacacgaagaaaatcacttcgtgattcccgattcctattcctattttgttgggatgaatataattcatcgaggagataatccatttgatgccactgagtttgttatgggcttaccactgactttgtcacgttctataatatgcagcttttgcttaacttctacgatttaccatcgccgtccggttagtctccgttagtactgtacactttcatccaaatgaccaaaatacccttgagacaaaaactttcaaattttggacaaaaattctgaaatgtcagactttaagtttttggccaaattttgaatgtttacaatcttatgtttataatatggtatttcgaaatttttgtccacattttggaagtttttatatcagaggtattttggtcatttggacaaaattgtacagtagtaacggatataaaccggacggcgatggtaaatcataaaagttaagtaaaaatcgatggcatattgtagaacgtgacaaagtcagtggcaaatcgtagagctctaacaaactcagtgacatataatggattgtctcttgatcgagactaccgaatccagatagaattttgttaagattcctttattccaatcccacacaaaaccaatcagcctaccatcagcgagcaaacccaatccaattccggtcaacacctaatataatactctactcttgagtagtactacccccgcttttttaatactagaaaaaaaaatctgtgcgttgctatgggtgaactacacgttgtaaacatacaaaaggaaaacccatgaacaatttataagtaagcttttaattgagtttataaaaatacatacatttctaggtttccatctatttgtgactttgggtatggggcgacgtggcatcgctgatgatttggatgcaacggcgctcatggagtccgtgtcgatctggttggcatgtatggagggatccaaaagggatgttctgcgtgtgggatatacaaaatctataacgctaacaagcccaaagatgaattatcaatccaatccaactttattcagagcaattatctacttcctccgtttcataatgtaaatcattctagcattgtatatattcatataaatgtaaatgaatctaaacatgcatatatctagattcattaatatctatataaatataaacaatgctagaacgtcttatattatgaaacggagggagtatactcttaattgtgcaatcatactttaaagtagtagtatagatacgtactgactaattatcaacccggttatctatactctaatttgtgcaattattcagagcgaatctccagcagcagccgcaagcgtcaacaactttgctggcaatcaaaaccaacaagccatgatgcaaagccacgcgattaggctgatgtgtagatatcgcaaacaactttttagtaggccccaaaatcaatgaaagcacgtacatatgttgctacacttgatcggctagtgaatggaaagtagaatcctgcgagccaatcaatcaagcgatagagaaaaagaaaagtcgtgtgttgcacggagaggcgcatacatttggtatactcgcacacacagtagaagatcttagatgggctgagcaagacaaagggagtagcgtgggctgccatggcactcgattgtggaataagttcactttgactcccttaaaagtgacccgaatctaattcatgaccctgaactgcaaaaccagatatcttgacccctaaattattaaaaccggtgcaatttgactccctcagcggttttggagggcggttttgctgacgtggcgcctacgtggcgatattgaccgagtcttcgttccacgtggcgttgacgtggcattagaattaaaaaaatatgcgtgggacccattagtcattcacacaaaaagaaatatggggtccacatgtcagtcctccctgtctcattgcttcttcctccatctctcccttctctctctttctctccctttctcctttcccttcggccggtggcggcggtggtagaggaagcggcagcatcaagcagcgagcagggaagaaggtgggcggcgcggctcactgcgaggagcagggtgggcgacatcagggtggtgccggcagagcgatgtggccgtggcggggggatcccggcgaaccgccacaaccttgcacgcgatgcggggatccgaccgataagtgcttcgagtttttcccctcgtcggagttcatttctcgccgccgcgccgccgcggccgcatcccgaagcctccgtcggtttcacggctgcgaaggcgaagccgtggagggtgggaggagagcgagaggaggaagaacagtcggcctggcttgtggttctgcttccgctgggagtcaccaatccaatccctaatcccacgcttcttactcttcgccatctccatgctacgttccctatgttcttagtgattgtcgatggggctttctgtgatttttgggtggttggaacagaaggctcaagtatagttccctatgtatttcagttggattcatattgcaagttacggataaatttttggcctgtaccagttttacttgtttgttaatctgtatgttacttgttcggctgtgatatccatctcttttgcaaattatactgctatatcatgtaacgcttaatcacattcgtgagctaacttacatctcatggtggtaatatggattgtgcatctcctcatataaattgttcttctactcattgagcttttgcttcttccacttcaggtgtgcagagaaggggcaagcagcatctgcacaaactctactggaggcatcgtctatgattgctgattcatcatcctcttctcagccaaaggcagtagcggtagctcaggataccattgagttctccgaaccatcagggcgctacctttccttgtctcctgtctcacgcatttggtcccgactgatgcatcaatggggatggcggcgagcaggagcaggccgacggcggcatcaagtagcgagcgggggaggaggtggtcggcgcagctcactgcgaggagcagggtgggcaacatcagggcggcgccggcagagcgatgtggtcgcggcgacggggatcccggtgagccgccacgtccttgcgcatgtctggcttggaaggggagagagagagaagggagagaaggaggaggaaggaaggagacaaggatgactgacatgtgggcccgcatgtcagtgggcccacatttctttgtgtgaatgactaatgggtcccacgcatatttttaattctaatgccacgtaagtgccacgtcaacgccacatggaacaaagactcggtcaatatcgccacgtaggcgccacgtcagcaaaaccgtcctccaaaaccactgagggagtcaaattgcaccggttttaacagtttaggggtcaagatatctggttttggggttcagggtcatgaattagatttgggtcacttttaagggattcaaagtgaacttattccctcgattgtctagatggacctgcaggtgcgcgtgaaaggctgcagctgcacggtatggagattccaagcatgacggaagttggaggcgatctgatcattttatgcgtggaataaggtcaacggagatccctcaacttaacaacgagattttttgaggcccctaatgtcacatcctgattttcgtttcaggatttataaattatttaataaattaataatagaatttatattaaattttctttaatttacaagtgaagtaaaatgtgggaaataaaatttcttaaatctaaagcatggatggatttaatttttattaaattctccatgattaagtcaactctctgaactattctcagatttttcagggctcaattcctaaatgatacaaagaacagttcagtaattatttgatcattaatgatctaattatatttgttaagagcttttcttgtttaaaaatccttaaattataaatttttgtttaaaaggaattattagaaatgattttaaaagcctaaaagagaagatctaattttaatttgttaaatctcaatataaaactgggctagataaaattttgttaaatactttacttgattctataattccaagatttttctgggatttatttgagccaaggaagtatttttaataaatggaattgcatttcatgaataatttaaattgaaaaaggtttttaaaagtctcttttggctttgggccaaaagccggcccaaaacctcctctctctctctccccggcccaagtcggcccagtccgtagcccgcagccgagccgccgctctcttctctctctctcagtcgctgacaggtgggtcccacctgtcagggtcgtcttcctcgcgtcgccgccgccgcccgaaaccctagcgtgcgccgccgccgtctctttccaaatttggccgatcctttccgtttccggtgaaatctttagaggggaaatgatcttctcgatctcctcttccttttctcttttggaatcatcgcctaatttcgtttggaaatccgtggattcgaggtcgaatcggatcggtctctctctctccgagcccgaactttccttctcgtcgccggtcgccgtgggcctccgccgccgcctcttagcccctttaaaaggaccctcggagtcgccgctacccgccgccaccttcgccttcgcctctcgtcgtccgtagcgccctagcgccgtgtgccctagcaccgccgtcgctccagccgtgcgccgccgccgttccggtcatcgtcgtcgctcgggaagaccgccgtcgggatcgccaagttgtcgcccgtcctcgtccgccccttcgccgtcgttgtagaccgccggagcaccgtcgccgccgtcaacccgaagaccgccgccgcttcaacctcgccgccggtgccgtccgttcctcttccgccgtcgctttggtcgccggtgagttcgccgcgttgcgctctacccgttggtgtcctccgttcgtgccgaagcgtcgccattcgccggcgggcttgcgcgtccgagccgccgccgccggtggtgacgtcatcgccgacgtcatcgtcgccctctcccgtgagccggtcgtggaccgttcgatctcggccgttcgttttgaatggatcgatctcggccgtccgatcccgtgagccgtcgcccgtgcgcccggtccaccgaaaccctagccgttgacgcaataaatcctctttttcttttcaaatataattcattattgcgtcataattcaattaaaatccatataagtgttttaaaccgatttaatctttgaaaattcataactaattctttgtaactcagtttaatgtggttcaagttgcaaaagttgtataaaataaagatctacatattaaaattgtccataaattgaattaaatttatttaattctttttaaatgggctttaattagatttaatcttgtaaaattcataataaattcatttgaagtcagaatgaggccgttcaagtctcataattcatctaaaattatgatctacttgtttgtttactttttatgtattgtttattttgtttttattagtttttttcctcgttttgcgtgttagcttgtcgtttccgtcgttgcgaaggttcgcgagtgcgccggaagtattcaagaagattaattgaagaccgattattgcaaggcaagtcacacagatcctaaacacaatcctttgagcatgttgatcctatatttaaattctctatttatttcaactgtgcatttattttcgaatgtcactgggtggtgtgaacctattcctttgttatggccagtttgcattgattaccctattccttgataccttgggttattataacttgactagttgggctttatatattggttcagctagatattagatatgattgcttagccatgcttagaaacattagcacactattgggataacttatgactcattattatttaatgatggcttaatgatagttcatgatggttaatcgtgattggttaatcaattacttgccaactaaaacttgataatggtgggttgtgagcacatggttttgagagtcgtgctcatgacaattaaggaccggttcgcgagctactattgtgaaacattaatcgtgccaaccacaagccagcgtgggcaacggctttaccttttgtatagcatggttcattgcggagcaccagactgagaagtggcggagataagcccacgggggtcgctggggagtccatgcctctggtttttgagggggtgattatgatccaggaatggtgcgctgcggtggattgtgttatgcaaggggtattgtcacagctcctttccgagataccgtggtggtattgaggcacatggtgacatgttgtggggctgtgtcttgtgggtacagtggtacacctctggccagagtaaaactattcgaatagccgtgcccgcggttatgggcgagttgagcaatgtttttcgtgattagtctcacacctctcacaataattattgatgctataactggtaataatttgtttagctcctggtttggagttagatctgtacagccgggtatggttgttcaggatggttgggcctgtgcagcatgggtgtgctgttcagtgttaattaaaatttctgattaattactccactgttttacttctcttaaatgttttgctaaatgctgcttttgcaaatgagccaatattatgccatcctttggtatcctcgtgcacttgcatatttgctgtgtggcttgttgagtatgtcatatgctcaccttgcaataatcaatcaacctcagttgaagaaaaaggatccagaaggagaagacgtttggcttataccccagttgagctgcctgtgggagtggagccggagcttcgctagattttattttccgctgcagttttcttcttggtgaggactaagtgcctcttaagtaagtatttatcgttttagttaatttgatgaatctgtatattaaattgtcagtttgtgtacctcggctgattcctggacgaggattttatgcacaaataagttcggaaattactagtgaatttccgggcgtgacacctaactacaaaactagaaatgtttacccctaaactcacttaaaccgtttaaagaaggtcccatgacagtatttttacccgattttactatcatggcatcccagtaagaaaaaaaactaaagaaattatatagggcccacatgtcacattttttccttctcttttattccccttctcttctctgttctctcctctcttcgccggcggcaggcaaaacggcaatgggcgagcacggatgcgggcggcgggctgtgtaaaatcaaaggtgtttttgattattattttgtgatgaacaattgggcattgaagattattggttttgttatttggaatttattcacgaagtggttttggagatgattggatttacaggtgaatcgcaggtttatcattttatgtggaccagtcagaccgggctctggtagctggtcagaccggcgtgtatcgcgcggtcagaccggtgcagcccacggtctgaccggccgacactgtgtcggtttcggtttctggttttttgtttggatatccgtgattatttcatgattatggcttctagatggatactatacgtatgtaatactattgtttgttattaatgagtcaagttggagatagcttggtctcggaatatggtttctttgtttgttccatgtataggtgactcgatgtctcgggagagtatttgcggtgatggaccgggagtcagcttggagataagacgacgtccgtggtggtcagagatcatgcgggatacttaggctagagttgatgcacgtggttgatggagattccatatggcatacgatggagttagtgtgtgcgtatgggatgcggagtcgaatttggaaggagtccaaatttggtatgattggttatgtaaagtttgtttcttgtactagagggtttcctaaggtgtttaggactcctagtatgagtttggttcgtggctttaggctgcctacctcgggtataaatagaggaggagcgtgaggcttcccggtatcgcttttgagagcaattgagttgagttttgagttagggtttcgagtttagtcgaaatttttgtaaggagtgctgttggtgcactttgtaaacacagagagaagtaataaagtcgtcatccactttaagagttcttcgatttgtgtttcaccgggtttcggcggtctaaccggcaactcaccggcggtcagaccggtggcatagcggcggtcagaccggcgggagcacggtggtcagaccggctgcggcgacaggcgctgcaggcgatctcggcggtcagaccggagattcaataccggtcagaccggcggcatccactcggtgagactggcagatcaatctcggtcagaccgacttccgtcgatttcgagggtaacttttatttccgctaaaagttttcggtttttgggtataccaaccattcaccctcgctctggttggcttagttcttgtgattcgatccttcaagtggtatcagagccttgttttctactttggatttttatcgatctagagtttttcttttgccatggctgctctggttcggttttcaactaagcctcatgttttcgatggaacggatttttctcattggtgtagtaggatgcaattttatattctggctgaagattatgatatttggagaaaagtttctcatccttatgtgattcctgaagcgattaatactgctgctgaaaaaattgcttttgaacaaaattgcaaagctcgcaacattcttttgagtggtatttctcgttcggattatgatcgtgttgctcatcttcaaactgctcatgagatttggactgctttgagtaattttcatcaaggaacaaataatattaaagaacttcgtcgtaatcttttcaaaaaggagtacattaaatttgagatgaaacctggagaagctttggatgactatctttctaggtttaataaaattttgagtgatcttggatctgttgattcttcttatgatgctaattatccacaatctgagatttctcgccactttttgaatggtcttgacatgtctatttgggagatgaaagttacatctattcaggagtctgttaacatgtctactttgactttggattcactttatacaaaattgaaaacacatgagaggaatgttctttctcgaaaagttgattctaagttgaatgctttggtttcttcttcttcctctttggaagttgatacttcttcatctaagtcgtcttttcttgctatttttaatgccacatccggtgatcaactcgaacaaatcgaggaggaggatttggctttggttgctaacagaattgctcgagctatgaataatgccaggaacaggaaaagaggtggtccaaatcgttgctttgaatgtggttcaattgatcattttcgtttgcattgtcctaagcttgggagaggcaaaagagaagaaaaagatggtgagaagaccaacaacaacaggcccaacaacaataagtcgaagggttcatcccaagggaggaagctggacaatctcaggaaggcttttcaacaagtttgtgccgccttcgagccactaagtaatgtagatggtgaaagtggagatgatgataagggaaagaacgtctccgatgtttgcttcatggcgcgtggtgaatctgatacagagtatgaagataatgagatgagtgcttttgaggaagctattaatattttgagtgcaaaaaataagaagtgtgagaagatgtatagaaaacaggaatttatcattgaatctcttaaatctgaaattgatagattaaaatctcttattcctaatgatgatgattgttcaaattgtgaggttttaatgaatgagatttcaaaaattagagatgttaatgctgcacatgatttgaaaaataaatcttatcttgcttatagttttgttttgcacacacgcactttggatgagttgtttttaactaaaaggttgttgcaaaaatatcaaattgcttttcatgctagtttgatgtttaacatgatttgtgctaaaaatttaaaacaatctcatgatgttttggattgctcaacatgtaatttgaataagatgaaactaaaagatgctttaggtcgtgttgagtacatggaagatgttgtgaaaaacaatgaagtgctttcttgccccaaatgtcgtaaaagcaaatgtgtcatggtagattgtgaaaattgtgctaatttggaaaaaagaggtttcttatttgaaaaattttttgctaagattttctgatggtaaaaagaacctcaatatgattttggatcaatctaaggttagcacacacaaccgtggtttaggttttaatccttatgctcataattctagacatcctcctgttgtgttaggtgttggtgctagaagttgtgagattttgattaaacctgatactaataaaactgtgtttaaatctgctggtatcatgtctaccttgagtgcatcttcttcaaaatccaatgttgtgcatgcaaaacctcatgttgttgcttgtgttgctaagtcttctaattctaacaaggtgtctaatcatcgtgaaaaatatacttgttctttttgtggcaaagatggacatattgttggtttttgtttcagattagctcataaacagaaaaaggagagagagattgcttttgcaaaatcaaagtggcaaaaatcaggttttctctcgaggaaaccggtcagaccgcagtgggtcccacggtcagaccggctactgagcgtcggtcagaccgggcaccggtcagactggcggtacagaagcggtcagaccggccactgtacctcagttagaccggcctcggacgaatttttctgaaaattctcaaactgtttttgcacatggatatatgcctattggatcttctggtcgtgtgtctcagtactggattcctaaatttttattatcatctaaccccagtactgaggcttcgacttctacttgtgtgtaggctttggtggcaaggaaggagaacgtgtggatcgtagattccggttgttcgcggcacatgaccggtgataaaaattggttctcctccctaaagaaggcatcc

SEQ ID NO: 8866 - DNA, 12095 bp, Oryza sativa
tccacagaagcacgaaaagttatacttcatccgtttcacaatgtaagtcgttctagcatttctcacatatgctagaacgacttacattgtgaaacggaggtggtatatcttaatttggtatctgctccctggtgagcttcatgacatgagcagtttggcaattgatttcttatctttacagcagttgctttatgtagaatgtactcctacttattcacaaaaaaatctttttatgctgcacaaccatcgataagtagcagtaactctcagtataggcaaatcaacttatcttcttccttttcatttctgcgattatgttcttccctttctctttacatgtaatgatgtaaatgtcaaaaacagaaaaaattgatgggggccaagtactgtgcacttatacctacttagacacccacaagttaacaaagaagaaatttggccaaattaaggttacattattatacatatatcatttgtgcatgaggtacgcatacaagaactcgttccagacatcaggaactccagggaggcaccaatgcgtgcagtctgcgtagatgctcgggtttgcaatctgctctttcgtcagaggaacgtactgtctcctgaatatcgttggatgggcgtccttgcggtactcagaaagctgggtgatgttcagtatctgaacatgtatgccctttggttccaatgttccaaagatctccttcgccttgtccatcatgccgtagtctgtggttgcactcctataatcttctatctgaattggttctgtttcgtttagacacttgttgttgtcatctcctccccagttgctagccctggaaaacatccatttttgttccagcattttcttgtcagaatgcacatgattgtcattttcagtgtagattgattgtcattttcagtgtcatgagaaacacccgggcctcttcaggctagctccacaaggtggtgggcctagagctaaccggcctgggttcgaagtctcatcccttctaattatttaatattaggtctttccctaatattcgtgtttttttttcattttcagtgtcaaaaatataagcaagctttgaacttgagtagagctgatgaattttattggttttcagaatgtttcgcagttgagaaatgatgcaagagttgtacgttctctcaccaggaatgggcaggtgatgagcctgcaaagaagattctagtcttgttcttgttgatattggctccaagatattcagttagtttcttgagagctatctcataaccatcaaccatttccacctcatctaactttgcatccccatcctcaaatgaaccatacctacatttttgcataatgacttactgatcatacttccaaataagagtttgttgcattggaaagaggaaaaaaaaaggaaactttttttgactgaaaaaagtaagaaaactttctgatgcctccaaatctcactttgttgcattggaacaagaaaaaagagaaacctttttttttcctgaacaggaaagtaagaagtaataattaagtacttacatgactttcatcgtcataccatccctctgcttcctccaccaaaggtaggagttgaagacgatgaaatcagcgtccttccagacattggcgtgtttctcaatcctgtctgcccttatgatccgatactccactctgtgaattatggggttgtcgctgtttgattccaatagcagtggtgaccagtagaaatctatcgtcgcattgtactcctggagcaaacaaaagaaaatgttcagatcagagaacacagagtagtgcttctgatttctgaattcagaagcatgttgggatgaagagattagtgagacatacaaatgctttgaaggagataagggagccgttgtaaacgcgcatcttgcggccatcagggatgaagtgctccaccatgcacaccatcgacacccattgatttctgtttactgaatcgcccacaaaaactagtctcttgttcctaagcttttcaagaaactttgtggcattgaatctgttttgacagggtaaagattgcgacaccatatatcagaaaaaaaaaacaattgatccatagtaagcattagtgaatagtgattggtttgtgtttcataacggatctttcactgttaatatttcagtcctgagaactaacaatttttttaagaataactcaaaactaatcaatagtttgtctgtacgttttctagttggccattggcttacagaagcaaccatgcatatattataaatttagcaatctggacacattataaacgacgtttttttttccactaggtaccttgtactgttttaattggatattaattaggggaggaacatattaactgactctttggatcaaaggaattgagaaacacaggaaaacacaagaataataaaagcacagaaattggagtgacgtgtcaatgtaatcataaggaatatgaacaatataggaattactcaattgtgttgtttggatgcttcacaaaacagtacaggaatttgaagagaggatgacacaaaggaaattatccaagagcttggagctcatgttatatttcctcaaaacttccaatggatttgaccattacttcatataggtatttgaaaggtccattcttatgagtgcgacaccatgtcagaagaaaaaaaaaagaacttctgaagttctttagctagtaagcattggcgattggttctctcataactgatctttcactaactgtatcttcggttatctaaaagaacaaccgatcttttgctgtccaataatttattcctcaaaactaaccgttgtttaaagaactcaaaaccaaccgatttttctctatatgttttccagttggcacctgggactctgggtcaggtttcgacatttcagattgaaattttccaaattttggacccctccaatacgatattattttggccgaaattatttttttaaaaaaaatcatgaattttggtaatatttgttcaaatttgactaaattttgtcccaaatttcagaaatttcgccatattggcaccgtccgatacaaacaccgaaaacgaaaagttgaaccctgctctgagttacaagatcaatctggaaaaaaaaagttgatttttttttttgcaggactaggagagaacattttcccctgctttcacaaaactaaaaacgtttttgttaccatgagtagctcaagttggaagtttggtaagaaacactgagacagctcgtacgaatggagtgtagtactaagtagtagtgcagtttcagatccttgcagcagtagtgagtgtagtgtcaaaattgatgtggattagaatggagatgagtcgtgttgataccttggaaggttgcaaccgtgaggctgccatctccagtgctggtacttggtgtcattccttccatacttgtcgcaggctacctcgtcgaagataaaggagcacttcaagccggagtaaagtggccgcgacgagttgtcgtacacccaccgtcccaacgaccagttgcactcctcctcgccgtcgacgccgccgtcgccgctgtccgtggccacgtcctgcagctcagatgtccactgcacctgcgcctcctggctcctcagcgacgactgatctacgaatactgatttctgctcgcccactgctgctgatgccggcttctgcttgagctggacttcttggtgctgatgctgcgcgacggcgagctgcgcctgagcatcctggctgcggtcgaagaggagggagacggagctgacgacgatgaagaaggcgacgagggaggtgaggatggtcctgagccccagcggggactgcagcaccgtcatcttgttggtggcagtcgcctgcggcttgtggcagccggcggcctcacctgctgctgctggcgacttcattatcaacttctcctccttaactccgcttctcttgtgaacctctctcagatgggagaagagagcactccacatggcaattggctttggctggctagctaaatgccctgagtccactggcacctgcacagagtgagtacctctcaagcaacactgacccttgggctaacctccaatggaggagcttatatattcatctgagatgataaatgggttagaattaatagaattggaatggttgtgtgtttgtttggaatgtggtggtgaaacttatatattcatctgaaacattcatcatctcagcacatgcaacaactccatcattattcatggcaaagcatgagagcaggttagcctttttagctcgtactgaaactgaaatggctctgcatgtgaatgttggtccctctgcagcatgtactgtgccctgaatttgagaaattatctacagtagagcctcccttgctgtttaattatcatgttcatatatactgtgcctcgtttagctaacgaaaagcaaacatggaaaattaaaaggtgatctgaggtagctagagtgctggtttctggtgaccgacacctctccatctataagtccaccactgtatcgcaccaaacatgtaccaaaaagattattccgtgtatcaattgtaaaaatgatgagattcacatgcaacttaggccacgaaaagttgatggggagcattcagcaaagaaatcttttccttatcaaacatgcattaacgagatatatatataaggtaatctttgtccactaagcaaagaaatgatcatactacttattttacatgtgtacattcttagcaactttcagaacatctgagtcagcgatgataatgtatacttttttggtcccggcgtcgatgtgcatgcaacggcgcccctgatctttctgaacaactacaactgacgtcggtttgtctttctctctaatagactggtttctgaataataaagttgtgattttgatctcaaatatatatactagaagatgagtgaaatatataactaagccaccagccagcatgcatgcgcttggatttacttagaaacggacaattaataatggtccagaccgtcttaattcgccttccaatctttcttttctggcaaaagtacggccggatcaataatggaatggataggacatactagtattaatttttgtttaacaccatgcatgcaggtgcctagaggtaaatggcacatgataaatcaaaacattctagcatcaatttggtatggtggtggatattgaaatatgtccctactcagtattaaatagtagactccctttgcattctcttctttccacacatagcatgaaatgagtacctccaaagaccaaaatataaaagggttaggtgaaaaagtatgtggtgtgatttgctttattgtttggtatcctgtcctaatatataagtggggtctaataggaatgcttggctgctgaaaacttgagaaaatatatatgcatgtacagtacggtcatccatggtgctaatcggatagcatgtttccattttctttattaaaaaaaactgtttctgacaggtatatgatcggctgcatgctttgagtaaggctctgttttgttccatcctaaaattttacaccctatcatatcgaacgttgaatacccgtatgaagtattaaatatatataggctaaaaaataactaattacagattgcgactaatttacgagacgaattttttaaacctaattgctccatgatttgacaatgtggtgctacagtaaatatttgctaatgacggattaattatgcttaataaattcatctcgcggtttactaacggattctgtaattaattttttattaatactcgaacatcccatacgacaccctatataataacatacgtgacacgctaaaactttacacccctagatctaaacaccctctaaaaaaatgatgaacatatctgcaagtgtggagaatggtacaattattactgcttggtggtacatcagctggtgagctagtgagccttagaaggttagtaagattgagatcgatgtgcagagtagcagcagttgggatgaattgtacctaatgctccgcatgaattgaatcgaatgaaatatggattgcttcatgcacaagtccaattagagggcgtttcaacttgggatgcatgtctgcaggtccctgtgttcttgtcatgtgaggagtggtatatattcctttcgatctgtgctagctgcgaaggcacgcattagttgcaaacgactttgtattattaaatatatgatgctagctactaacaaataatagtaatgaagcttgattgattgattttgaaccattagctacctaaagtgagtaacctacagatcatatgaaattaataaagattattatagctagtttaattgccgacagagcactgtctattttctcggtctgtcccactcttttgacgacctctgcatcctactcgatcgatccatgtacatatatatgattccccagtccatgctatgcatgattatataaagcctgaatcaatgcatgaactagctagtcatgataatcaggggctgagctacagggcaaaatccatggttgataaattcctcagacaatggacgagatatcaaaatctgctgcaacccaaagtggtttatcggctgttattaggatttatctatcggctggacgatcgggcaacatcatcgatcgatcaatctgttgacagttaattagttaaaccaacaaattaaattaaccggccttgtgcgcacaagagtacaacactgtaatcacaatcacgcactctgcttagctagctgttgattggtacggtagatcaacaagagtctcttgaaaataaagatgaccacaaattagagagggcctacgcctgcctctgcctgcatggctgcatctgcattcacctaacctatatacctccgaggggccatgctgtcgatctcatttggccccttcttttctccgtcaaggcgtcaactaactaactcaccaaacccccccccccccccttgtctgacactgtttacacacaacttactctaatgaaaatgatatcctctttttctttccttctttttattttttaattaattaaggacaaaaacactgatgacaattaatcgatcgatccttcctgggctagctttccagatgggccaaactacaaaaggaaagaccaggtattatataatggccgtacgtacgtacgtagattgattgcaaatcttcagtctgaagacataacattacacatgtacagtagtagtacgaatgaatgatctatctatctattatattattaaaggaataaaaaaagaagcctccacgttcactctcatggtctagaaattctcacattaatcagagaaacagaaaaaacagagttcatataaaaatacaatttagaaatagctgaaattcggaattaaaaaataagtaatattagaagagaagagtagagtccatatagaaatacaatttagaaatagttgaaattcgaaattaaaaaataagaaatattagaagaggagactagagtccatatagaaatacaattaggaaataactaaaattcggaattaaaaataaggaatattataagtagagtatagagtccatatagaaatataattaggaaataactaaaattcagaatgaaaaataaggaatattataagtagagtatagagtccatatagaaatacaattagaaaataaaagaaattcggaattaaataaataaggaatattagaagtagagtatagagtccatatagaaatttaaaactaactaaaatttggaataaacataataaaattaaaattagagtttagagtacgtataaaaatacaatttacaaataactaaaattcgaaattaagaaaaatatgggaagaagagtttaaagtcaatataataatacaatttagaagtaacagaaattcgaaattaaaaattaaagaatatttaaagatgagtttagagtctacatagaaatacaattagaaataataaaaattcagaaataaaaataaataatattggaagaagagcatatagtatatatagaaatacaatttacagaaaattcggaattaaaaaaaataaatattaaaatacgagtctagagtccataaaggaatatatataatttacaaataactaaaatttgatattaaaaataattaataactaacacgtatataaaatacaatatgaatattgcacattagtagttttgtaaagttattgcaaaatttaaaattatgttgtcattttaatatatttgaataatatattgagaaaacatatatgctattatatgagagaaaatataatgatgctagccgcgcaatctgcgcgggccaccatgctagttatattattaaagaaatagaaaaatgagcctccacgttcgctctcatggtgtagaaattctcacattaatcggagaaaaagaaaaggcagaatccatatagaaatacaatttagaaatagttaaaattcggaattaaaaaataagaaatattagaagataagactatagtccatatagaaatacaatttagaagtagttaaaattcggaattaaagaataaggaatattagaagagaagactagagtccttacagaaatacaattaagaaataactgaaattcggaattaaaaaataaggaatattagaagtggagtatagagtccataaagaaatacaattaggaaataactgaaattcggaattaaaaataagtaatattagaagtggagtatagagtccatatataaatataattaggaaaattactgaaattcggaattaaaaataaggaatattagaagtagagtatagagtccatatagaaataaaattaggaaataactgaaattcggaattaaaaataaggaatattagaagtagagtatagagtccatatagaaatacaattaggaaataatataaatttagaattaaaaataaggaatattagaagtagagtatatagtccatatagaaatacaattaagaaaaaaaatagaaattcggatttaaaaaataaggaatattagaagtagagtatagagtccatataggaatttaaaactaactaaaatttggaataaacataataaaattaaaagtagagtttagagtctgtataagaatacaatttacaaataactaaaactcgaaattaagaaaaacatgggaagaagagtttagggtcaatataggaatacaatttagaagtaactgaaattcgaaattaaaaattaaagaatattaaaagatgagtttagagtccacatagaaatacaattagaaaatataatatgaatattacacattagtagttttgtaaagttattgcaaaatttaaaattatattgtcattttaatatatttgaataatataatgagaaaacatatatgctattatatgagagaaaatataatgatgctagctgggcaatctgcgcgggccaccatgctagttgggatcaaaacacaagaagggatccttttgaatggttttgtgtaacgccccgattttcgttcgggattaaaaatcattaaataatgcattttctagaaattatttaaaagttaatcaatttaatcaagtgaattattgggagaattaaaatttttccttaaaaatcattggccgagaatattttgtaatattctttatgccctaaaacactctccggatttttccgtgaattttcggagctcaagaagtaattttaatggcacaaagttcattgaatcaattaaataaaatgaaaaacgaattaaaaacctcctctctcccttttgggccgctcccggcccaatccccctttctctcccgcggcccgcgcccctctctctcttcctcggccggcctcccctctcctctcttgggccgtcggcccgtttccccttcccctcgcgcaaagtctaaataaccccctgggttctcctccctctctccctccccgacaggtgggcccggcgaccccacccgtcaggccctcctcctaccttcggcttcccaggccgaagccgccatggccggcggttgccgcccacgtcctgccaaatccggcgccctcccgctcgcgccctcgcgcccaaaccgagtaaaatcggttccccaccacctcctccacctcttcccccacttttccccaattttcggcgccgtttcatgccccatcttcccacgatgcctccccactttgccggccgttcccgcctctcccggccacgatctccatccccgagcccaatataaagcaccctcgtgctctcctattccgtttccccctcctccccgagcttccccgtgcccgaaaccacatcctccccggagcccacgcgccgccgctccccgccgaactccagccacgctgcgccaccgctgccgttcaccccggactgggccgtcaccctccccgacaccgcagccgccgtgcgcgccccgtccaccgctccatttcccctctccaccttcgaagcgccgcagccacgcgcaccacctctctccgccgccgccaccggctccagccgccgcttctcgccgcttcagccaccgccgtgccgtgccgtcgccaccgtcggcatcgccgcgccgagctccaccccgtcctacacctcttttccccaatctcgcaccgaaattccacctccactgtccacccgagccgcctcaactataccgcctccagccgccacctctcgccgctctagccgtcgccgcgcagcgttgccgcgctccaccgcaccctagctgccgctccactccgtccagaaccccacgggagccgcttttccaaagtcaaggtcttgtcggccctcggccgtggcttcgttgtggtcgggcgtcgtcggaacgccgttcccgccgcctcccgcgccagccaccgccatcctttccgccgccggtcgcctccctatggttgtctcgccgccgcagccctcggtaagctctccctccgcctcctcctttttcccctcctccgccgctccgcgtgcccgctgccgcgacgcgctgccgtcgccgacggtcgtctggccgcgcgccgccgcgcgccgtcgttcgaccgggtcggctttgtgccgtgcccgtgtcctggctgtgccgcctcgtggccgcccgatcggctttgggccgatccgggctgtcggttcccgtggaccggcggtagaccgcctcggtggtcccggtccacggtggaccgacgcccttgtgtcgctgaccggtggcgcccgcatgtcggcgccggccgccccttactgacgtcagcgatgatcttttcctttgtaaaaataaataataattgcgcaataattcgttaataattctagaaattcatttaaatggctcaaaacttctaaaattcatatctaattcattagaactccgaattgagccattcaacttgcaaaattcatctaaaattgagctctacatgtttgtttactttttatgtactatttcattggttttcattagagtttttcctcgttttgcgtgccagcgtgtagttcccgtcgtttcggaagatcgcttttgacgaggatcagagttcggaaggttgttgtgaagaagcaaggcaagtcacacattcctcttgagcattttgatcctaatttacaaatgttttattgtttgcaaataaaattgcatgtcttgctaattacataggatacgggtattacctatctgcttgcttgtgccatatttacttgatatctgtcctttgtcaaccttgggtaataaatcgactagctcatgttacttatgtgacctagctagaactatatgcttagccatgcttaattatcactagctcagttgatgggataattacagtattagacctttttagtatcagaatgagctgcgtgctcgagacatctggccatgcttcatggtcgtaattatccaactaaaatgtgacttcatggtgggatgtgggtgcatggttttgctagtcgtgcccatggcaattaaggaccggttcgcgggaaaccctagaagaatttatcgtgcttaccacaagccagcgtgggcaacggctgggtttgtagtgtagctttcctctagctgacgcatccaggcaaggctgggcgtgatgaagtttggatgggccctgcgatggcctatgcggc

SEQ ID NO: 8867 - DNA, 12883 bp, Oryza sativa
catgcatgtcgggtactccagagtttactatttaaaatctataacccacactgtggatagcataaccaagaaacacacaatcaacagtttttggtccaagtttccgctttttgactataggtacatttaccttggccatacagcaccatgttcgtaggtatgagagatttaatttcttcctttcccattcctcgaatggtgttacttccttatgcttcattggaattttattcaagacatgacatgcagtcaaaactgcctcaccccaccattccttggaaagccccgcagtgtctaacatggcattcaccatctcagttagagtacggttctttctttcggccaccccatttgattggggtgaatagggaggcgtcatctcatgaataattccaaactcttcgcaaaaggatgcaaactcattagaaaaatactccccacctctatcagacctcaaccgtttgattttcctttcaagttggttttctacctcagctttatagattttaaagtaatgcaatgcctcatcctttgttttcaatagatacacatagcaaaatctagtgcaatcatctatcagtgtcatgaaatatttctttccccctttagtcaacacgccgttcatttcgcacaaatcggaatgaacaagttctagaggtgccaaattcctcgcctcagatgccttgtgaggcttgcgaggttgtttcgattgaacacaagtatggcacttggaacctttgaccaaagtgaattttggaattaaactcatgttagctaagcgcgtcatacaaccgaaattcacatgacagagtcgcgaatgccacacattagactcatcattcttgctaatatggttcacagcattatgattattacacatgtcattcaaagaaaaacggaacaagcctccgctgtcataacctttaccaacaaaagtcccatatttagatacgacacatttattggactcaaacacaagtctaaaaccttctctacacaatagagagccgctaactagattcttctttattgaagggacatgctgcacgttcttcagctgcacggtctttcccgaagtaaacttcagatcgaccgtaccaacaccatgaacagccgcaagtgacccgtttcccatcaacaaggaggaacctctcccgacctgataagaagaaaacagagaaatgtcagcacatacatgaatattagcaccagtatccacccaccaatcaggtgaatgaaaaatagagagaactgtaggtaatattttaccgtaccccgatgttcctccgccctcgctaatgatcatgttggcagacttcctgtctttgcgctcaggacagtccttggcccaatgcccagacttgccacacacaaagcagtctccctttgcctttcccttgcctttcttcttaaaattggttgcaaccttgggtttgacatcaggcttgactttcttgttgttgtgggatgcatgagggttcttcttctgtaccatattggcactagaacctccctcaacctttttgccccggacgtcctttgccctcgccttctcctcaacacccaaagagccaatgagatcaggaacactgaactcttgtctcttgtgctttagagaagtggcaaagtccgaccaagaaggtggtagtttggcaataatgccacccgccacaaacttgtccggcaactcacagttgttgttctcaagttccttagccagcatctgaatctcatgagcttgttctactacagaacggtcatcgaccatcttgtagtcatagaactgctccatgacatacagctcactgccggcgtcagaaactccgaacttggcctcaagtgcatcccacatgtccttcccagaaggcatgtgcatgtacacgtccactatgttgtcagcgagtacactgatcaatgctccacggaacaggcaatccgaagcctcgaacttagcctcttcctcaggagaaagaggtggttcacttcgtttgccccgtgaaacatagaagcactgcatcgctgtcaaccacaatagtgcacgtgctttccatctcttatagtttgaaccatcaaaagcatgtggtttcagtgcagcagcaaagccaactaccgaaaatgacctatcaggtttttggattgttggaaatatagtcattattcggcatattttaatccaagaaattgaaacaatgatcatggcataagcagtgtagggtgatcttaacataaccagtagcatactatgcgcatcatgaatgtcagaaacaggaacataccagtaacgcgataacatgctagaggcatcatgtagaacaggaacaagaacatagcgcacacagtatagcgctaacaatgggaacaggaatagcgctaacagcagtagcaggaggagaagattataccccgagaatggccctccgctggatggtgaggcagaattgcctccgttgttgtagtcgttcacggcacctcctcctggcgcaccagctccggatccagctcctgtcggcggcggcgcaccagctcctgtcggcggcggcgcaccacctccgccggtagcggcggcagcaactccagacatggcgatgagcagtcgtgcaggaggcactccccaaaaacctgatcacccgcctacccggtgcagatctcaagcaaaggtgtggtttcggaggcactgcttcttccaatctctcgtgcgcgcaagagatcagaagcggggaagcgagagcaactcaggcgcggagagggagaaactaacaccgggaaagttgcggagggaatcgtgggaacgtgggttagtggctgcaaaaggatagcgacgcgacgcgacgtgatgcacgcccgccgccgccagcctcgcccacgcccacggcccggcccggcccggcgcgcgcgcgcgtgtggcattccgacccccacctcaactggtcaacagggagcctctaataactccctatttaggttgagatatttctcgcttaaatcctgaggtggtattattatcctcaacatttattatggacctttgagatttaatattataaattgggcctagcccaattattctaacactcttcagtctcagtagcagaatgcaagaagggatctggtttgtagcaggtgcattgataccgaaaacaactctcacctgccaatattcttctgctttacacgtgtgccggcatagtgctgccataccactgttctactgtgtaagatctgttctaattttcttctggtgttatactatagtgtcgtcaagtaatgtgccatttgttccagacaaaaagtataagttgggcaatttggttgttttttcatctagccaagagatgttattgacaaggccctagtgggctctttggtgttgtcttgtttgcggtgagcaaggatggcaaataaatccaagcttgtaatagtagagttgtttgactatggcaggtcggcagcatgccaaatcaatgacttactgattcaactattgaccacttagtatttgtttaaatgtagtgcttaaaacaccattgttgactttcagttgtgctgtactatttgtcttgagagatgatgttattgaaggctgttatgtgtcttgcaaccaccaccacctgcaagtgtagatatctgaattctctttttggaataatgcccttgaacattttgtaatgatatgttttaacaattttcttggtgaaatgtaggtgcgccatgacgacattgttgaacatgtttcatcaattctaaaaagcaatggcattgctcattctgggaaaagcattgacactggaaaatttgaatggtttgacatctattggctttatatatatatatatatatatatatatatatatatatatatatatatatattcagttcatgtttttgtgcatataatttatgtcttgatttatttgtgttttgaagctaccaacatgatggggggatgccgattggcaagtcagattcacaaagaggtgtgtttcattttggttgatcctattaaaataaactagaaaggaaaatagctgtgaaactttattatgtgtccacccattacaaagtcatttgctgtggtgaatgcacaactttggaacattgcagaaagcttatggcttgcatccagtgcaaaagggggggcaatcagactctgtacaccaacctcggaactatgctttccatttcataagctgtctcatgaccaatttcattgctgattacagtgggctatggggaaactattgaagcggacaagtcatcttctgatacaggcgaagttagtaaaatggtaatgagatacgtaattaaatttatttgttgagtctaattcatgcgatgaatttagtatgaaaacaagattgttcctccaaatttgctcctactgacccaatcaattaacaagatatggaaatatttgataacataatgcataaccatcaactgttgccttgttaacaacagaatgaatactcactacttaaatctgagtgtttttataattttgtttatacgttcagatgctaattttctcatgtaaacagatcctgggaaagcaaccacctaaaggattagccataaaggaagtgagaaatatgttcttcccatactggaaatcggtgttgtctcgtcggttgcagctgaagatagttccatcctgtcaaccaagcaggaaggacttgctaagtgctgaagcgagcaggaaggggaccaagagtattgaccacccgtgtaacacaatcaaatcaatgggagatcgtggtttgatgtcaagtgaatccagaaggatgctttatactgttgcttcaatgtcccggaaggtgtttaagcgcacttgagtacagaaaatctttggtggtatgcttgttgaaacacatactccctccgtttctttttatttgacgctacagtgcaaatcagaatcgtttttttgtttgacgctaccagttcatccgtcctagtcacgtttgttaatttccatcgttgccctccatctcaacatcgccacggcgctgcctcgtcctcatcgcgaccggactcgctcgccactgtctcctcccacgcgccgctgccgttcatgcctcccgtgcgccgccgccgcaccccaatttggcggcaaccggccaccccgagctgtggcctgtggggcaagcaagagtcgggcagcatggcgcacagggagccggacgtcgggcttgctgctgccgccactgttgttcttgccactcggctgaaaccaagcagaacgtactgcatctgcagatgacatcgtcgttattgccgttcggctggagatcaaccagaaccagggcttctcctctccttctgcttaaattgtaaattgggcaaaaccaggcaattaggcaatgaaaattggaggaaatgagaaaaaagaaattaaacaagctggaagttggagaaggcgagatcgaggagctcacttacagagagggtgacgagtgaggagccgaggtccggggaggacatgctgcttggagacgagaaaggaggaggactgaatcgagaaggaccgcttgatctcaggctccaacgccgctttcaccgggaaggtcggagaagaaagggcgacgcggcgtccgggaagagcgttgtgcagcgggttcctcctcctgtggtcgcgagcagcggcgtttgggagacgacgagcgaaccggcgtcgaggcagcgcgggggagatggcaagggagccggcgtggagggagacggccgcgccgcgcgcactgtgctcctccctgtcgtccaaaagggatgaagggcaaaatagtaaaatcgctctatccttaattttgtccatgccgtcggaaacgtcatatatatcgaaacggagggagtatattttttctataataagcttctagaatgtcttttggtcatagtgccccctacattctcattgttgctttaatctttgtgcaggtctcagaaaaagcaatgaaactttgagcttacatcagacgtttctatcctgttgggctagaaactgtgtttcatggttatggtccatactttttaatttgaaaaccttgattgcagtgtaatattaagatttaacatatattccttctgtcccaaaaaaacgaatctagtactggatgtgacatatattagtactacgaatctggatatagagatatgtcactatgtcacatccagtactagattcgtttttttatgggacagagggagtacgatggaacgtcatttatttcttgtagtgtgccaggcaaaagctgacccggtaagtgatcaacgggctaaatattgtgctgcctctaaagtagaatatcgtggtatggaaaacatgtctagtggttgatttgttctccgaacatgcgtttatatttctcagagaaaacaacttctatatttcagtacatcaattttttttgctgaatttttattctaatcattagggcctgtttagtagagctctaactcctaatttaacttcaggtgttagatctggagtagagttgtggagctgtctatctagtatctgctagaccattcccatatttgtatttggtatgactggtgagtttgctagttgctaccatgttgatgctggcacattaccgtggattctgaatccccgtgtggccgtgtgtacagaaagacacccaagtttagctaacccaagtttggtactagtgattaatatggtgtgcatagatacctgccacatcacagtgtaaagaagggttatcatgttgatatgtgcaacatggactagcatatatacaaatgtaaagtaggtcaatctagcagattaatctgaacattttatcaaaggaaaactaccggcagagggtaaattcaacagattttttgatctgcatgtattgactaggctgtttgagttgattggaagagtatgtgaagcagtggtgcgttttgacgaaatggtacaggcgcagcagcaggcacattcggaaagattgatttcttcaccttttgcttcttgctttgtttcagaggaacatcttcactttcttttttctgtttgcgtgcttctggagatatgcaggctactaattaaacaaccaaacagggtttatcatcttattgttttatacattaaagatttttctctctataaacttttgagaactttttccgagatgtcatattctatcaataaagaactaggacttgtggaagcagaattaagggtaccttcaaatgtccatgaaatgctgaatgtttaattgcttcttgtgagggaaatgtttccttccatcaatgagaaatgggcccatttgtttcagctcgcaaacaactctggaccctagtcttcgtaggccggaacgggagttagcccatagcagagcattgtggcccaatcatgattatttgcatttggaaaaagtacaccgaaggtccctcaacttgtaatcttacaaaaccgttcattttaggtccctcggtggtttttaccccggttttgtccgacgtggcggctgagtcaacgtaggacccacgtgggccccacatgtcaaacagtccatgtcagccacttcttaccctccctctcaactcacttcctctctcctctcctctccacgtcgatggccggcggagagcagccagggtgcggcaggatggtgcgacggtcacggtcgccggtgcaacagaggagcacgccgcggtcgagcgccgcaatggcctcccttgtctctgacgtgccttcatcactgctatggcctcccttgtcttcactgcatagagcgaggagcacgcgggcaaagtgatgcgcgaggcggtcactaacctcgccccgagggccagcggcagagagcacggcatccacgacgcggcgtgccccatcgaagtctccctggtcgacgaggttagcgcacgcgagctctgcggaggctggccggctggtggggaggaggcctgcgaggcgaggtggaaccgtcggcgaaatcctcgaagctatcgcagcccaccaccgccacaccctcgcccccgcacgcgacaggatgcttgtccgcatggcctgccgggtcccgaccagcgcgaggatgtcgtgcagttgctcccctgctggacgctgcccgctgcagatctggcgcctgcgcctcggcggcggcggcgtgagggaagccctcctgctccggcggcgtgggagggcaagcacaggaggacgaggcggaggtggatggcgccgacagggagaggaaggatgccgccgttgtcatccatagccgcacgtggagagacgatggaggctggcagcgtgggagggcaagcgcgggttgacgaggcggaggcagatggcgccaacagagagagagaggtcgccgccgtcgtcatccatgcccgcaagtggagagacgatggaggccagcggcgtgggagggcaagcgcgggtggacgaggcggaggcggatggcgccgacggggagagggaagtcgccgtcgtcgtcatccatggtcgtcatccatggtggcacgtggaaaggcgacggaggccggcggcatgggagggcgggcgcgggaggacgaggtggacgtggatggcgctgacggggagcgcgaggacgtcaccgcagatctggcgcctgcgccgtcggcggtggcggtggtggcggcgtggggggagaccctcctgcttccacatcgtcgcggccgccgccgttcgccggcctcccgacatcttcctctcctgcctggcaccctcgccccgccggctggcttgctcggactgagaagaaaaagtgagagaaaggaggaagggagagaagaggggaaagacaaagtgatgacgtggacaatctgacatgtggggcctacgtgggtctcatgctgactcaactgccacatcggacaaaaccggggtcaaaaccaccgagggacttaaaatgaacggttttgtaagatgagggatgtcatatatctagttttgtggttgggggacgattttgtaactcgattacaagttgagggaccttcggtgtactttttcctttgcattttactctcttctgtttcggatcacacaaaaagttgtcccgcactcggcaccaattcattttatgttgtttcaaaaaaaaaatcattttatgtatgtccagtaaaaaatggtttccacgatctgtataattgccacttttgaagctccagaaacagttgctgagttacctagtcatgattttgttctaaagtgtgttaactttacactttgcaatccatgcactttggtgatatgaccttcagttaagcattggtcggcactttctgctaatctgaaaagctaatgccagcacgcggctatgcattgtccaggatatacataacatattcagaaacacacacacacagagtagatcagcaaggaaggcattgtggtatttgtaattgatattctgatagagtgattcagttctgttgcaaataataatatttgcctatataataagcttcaaaaacaacatagacgaataatgtctaccacttactaatactactaccactaagctttcaaataaatcaaacaattcataaatgaaatataagagtatctctgtttctactctctggctgctctgtttctgaaatgtctagataggccgcttctcagtctccgcacaagttaaaattttacattactgcagacttccaactagcaacaacatatgtgcctgcctgacatagacaaaaaaaaaagattaattggatccatgccactgcaactttgcaaaatttttaaaaaatgctactactatttgtcatattggctatgtgccactggaaatttctaaaattgaaaccataccactgaaaatttctaaaattgaaaccatgccactcccatccctttttccgtctcctctctcacgccgtctccgttcccgtcctcatcccccttccgcgaggaggcggaggccgccctgcactcttgtccatcagtgccggtgataacgatggcgacgacggcgatgcaacggagcgccacccagtagcccgagtagtagcggcgagctcggagaagaagatggtgggcagaggagggagaggagggagcgggtcgacggcgccgagtgaggctaacgtaccttacccgcgactaccaccggagggctcgggagccaccgccaccgtcctcaacgccagctgcagtgagaggtctatggagctgtcgctaccgccgtcctcgacaccatccacacgggagggctcgggagtcatccacattggagggctcgggagccgccgccgccgtactcgacgccatctacgacgggagggctcgagagccgccgtcgccgcctctgtcctcgatccatgatgggaggtctcaggagctaccgccaccgccatcctcgacgccatctgcggcgggaggtctctggagctgtcaccgtcgccatcctcgatgccatccgtgcggtagggctcgggagccgccgccgctgtcctcgatccgcgacgggaggtctcgggagctgccgcctctgccgtcctcgatgccatccacggcaggagtgctcgggagccgccgccactgtcctctttgcagtcgcgccggatggaggaaaagatggggagatgaaactgacatatgggatgggaacggagacggcgtgagagaggagacggaaaaagggaggggagtggcatagttccaattttagaaatttccagtggcatatagccaatatgacgaataatattggcatttttttaatttcacaaagttgcagtggcatggatccaattaaaaaaaaagtctttctactacacttacaagtggtagtagtgggcaattttaacatgatagataacacattgatttcacaatctctcttgatgaacacgttggcagcattttcataatacaaatttatgtttttgaaaaacaaaaacaaaaaaaaaagataaaaagcacaaacgggcgtgttttcaatgagaatcaatgtttgaataaaaccgaaaccgtatttgattaggctagataagcgaaaaaaagaaataaaaggcaaccgaaccgatcccctttggagcggcaaacaaaccctagctgagtcgagtcgttcgaatcgaggagggatcgatggagggcggaagcggcggcgattcccagcagttcgggaagatggttgtcgaatccaaatccaggaggaagagacggcggggagggacgactatccttgcaggcacaatggacacggaaggaatgatggatcaagaagaagagaaggaggacgacgaacaacctgctgatgttcttgaggataggaagcatcgagatggatccatctacaggggtaccgattactggagtatctattatcgtatcgccgataccaacgaaagtaagagacctcctccattcccaccgaatccaatctcctttcttagttctattatcattcgaatccccttgattcctccctatgtttttttgtatgtatataagtatattgattgattgtgtgtatttggctggctcagctcactgagccgatatactaatttggatgctgtaacaccctaaaaattcgaccgacaaaatcaaaactctaaaaatacggatcttcaaaaaaaaaaactttttaaataaattgcatcatgccaattttattggattttgatttcggaattcatcgatcacaaataggggaaaattaattagaaattaaccctgcaattagatttggttaaagaaataaataaattataatttaaaataaagattaggtgggatagaaataaataaaatattatcgcgaccatatttggatcaattaaatttaaatacgatggaataagaattaaccctaaataaaactcaaataaattacataaaaataaaatatgagtaatattaatctagggtgaattcattagttgagataatacacatattgagtaaacttcatttatgcaagatttagaaattatagaatcaaattcatataggaaataaactaaaattggaaaaataggaaaaagacactattcattagcctctaggtgttcgacgaggctccctagccccttcccctcccctgccatgcgcgcctcgcgccccgagccgtcgccgtcgccgcctgccgccgtgccgccgtcgcctgccgcgccgcgcgccgctcggccgtcgccgtcgccatcgccgcgccgcgtagccgtcgcgtcgccgctgctgccgtcgcgtcatctcgagccccgcgccgccgctgccgcgctgacgccgcctcgcgccgcgcaccactgccgcgcccgcgcccgcacctcgcgccgcgtgccgccgctgcccgcccgtcgcgtcgcccgtcgcgtcgcccgtcccgtcgccgctcgtccgtcgccgtcgcgccttgcgccccgcgccgctgccgtctgccgcaccacgcgccgcgcgccgtcgcccgtcgcgtcgcccgtcccgtcgccgctcgtccgtcgccgttgcgtcgctcgtccgtcgccgtcgtcgctcgtccgcgcgccgcacgccgccgcccgtcgcgtcccgccccgagccccgtgccgcgcgcccccaccccgagccccgcgccgccgtcgcgtcttcccctccccttatctctttctcttcccctatataagccccgctattcccctcttctcctccgtctccaccccctatctctacccactcctccacgccaccgcgccgccgtctccacgccaccgcgccgctgtctccacgccaccacgccatcgcttaaagccgccgcgccgccgccacgaagccgccgcgccgcgccttgcgccaacaccgccaccgtcgctgtcgccgccgttgccgtcgccgtcgtcggtaagccgccgcccaacctttcccccccccctcgcgtccatcgtcgccgccgcccgggagagcaagagccgagagaga

SEQ ID NO: 8868 - DNA, 23252 bp, Oryza sativa
tcctttgatatatctacaaatgtaaattcaattgatatgacatgtaagtgtattataatattaataaaaatattgggtaagtaaatatgtatttattattttctttaaaatataaaattacaattctatataactaaaattgcatttataaattcagttgatatgacatgtaagtacactataattttgataaaaataatatgtaagtaaatatatatttttattttttttcgtagttcgttggatgtaaatcttaatgtaggaaaactctgagtgattttatcactgataaatggataggcaaaaaaagaaaaaaagggataaaaggctttgtgggaggcatgggccggctgcggaccgtgggcctggaacaggttgcaggcgtcaaaagaggcattctgaaaggccagcaggcccaagagcccgttctttccgatcgatcgaggaagccaacagacagcgccgccgcagtccgcacgacgctcgagcagattggcctccggcgaccgagaccgcgagatgaaacaagccctgcaagagaagcggtgccctgcctgcagggagcaccccatggtttgttcttgtatctaacttagtactccctccaaatatttagtcccttcatctctaaatatttgacgccgctgactttttttaattatgtttgactattcgtcttatttataaacatttataaaatatataaaactatatgtatatataaaaatatatttaaaaatgaatcaaatgataggaaaagaattataattacttaaattttttgaataagacgaacggtcaaacatgtgctaaaaagtcaacggcgtcaaatatttcgaaacagagggagtattatttaactggtcctgatagggcatcacacattttagccggttccgtggtagtgatcaagtatatatgaaggtttaagaattagttagaatttcttagaaagtcgatgaaaacataaaggttgcaaagataatttaaggaatgagtcatatgtatggactgaagaaagggaagatcatggtggttggcaaaaagttgaatgcctttttctagccttttgctttcctctcttcctggccccattgttcagctggtatttcctgcaggatgcatatatacatcaatacatgtataacacgtcagtatatctcatcatgtacagttactctgatggagtatattgctgttgctgatgtgtactagtgttatttttcagttgagtaatatgccaagccaagcttgtgaaaatcttcattgtttctttttaaaaaataatcatgtacccaaaggtttttataaatatgttcctttacatttttatatatcctttttgggatacaggtgttttcagtagaattcccagtgatgcaatattgaagtggaggaatcttgcagaataggtacaattgggatttccattagtacgaaagcattactacaatccctcaatccctgtatgtgtgtattagcatacggataaccctgatgagtctaatggacacttaaattaaagtgcatgtactctcaacttcagaagatgttaaatgtagaggtgaggtccatcattggactactcagaagacatcttaactaaacttttgaacgtatgaatgtaattaaaccagtagcactttatcttttaggtacattttgtacaacattaattaattctccctattgaccagctaacctgtttttctttgatacaaaagaaagagagaaaaccggtatatcattgttgaattgttgcctggtggcatgcttgttctctgaaaatttcatgaagcatataagcatacaacataggtttgatatatcaccgtttcaaaaataaggaactaataaagatcagctggcatgatgattactgaacagagagattggagagccatggatcagttacatcagtaccttagcaatgcatattatttgcccttttctcattattattccaatttggtacaatgcaagttcttccagctggtgactctggtttcaaagcaaaagagatctagctttttcaaaatctacattaaacaccttctttttctttatcattccatttcaaagcttaactaaccaccatttgcgaggcaagattaactaactcactttcctaatcagagaacacgaatgctaatcatcatggagaccaattggaagataggaaaaggatcaagtttaattgccataataaatagcatttcactgtatgaggagatcagttaattatgatcacagcaataagaaatcagctggagttgtactgggaattagctaggccttgttgactaacagaaacagtactagaatgagcttatatatttgcaaggccgttccgttcttagtttgtactatgactcaaccaactaattaccacctagctgattgctgcgtgccgattagttcaagaattagagcgatacaagcagtggtgaggaaataaaacatgtcagctgttccaatgcagcatgcatctgcatgtgagaaatctaaacaagagaataataagagaaaaagaaaggagcacacacatttgtcatatcagtccggcaagttcaccaaccttttgaatagctgaataactgaatttggtggtttgtcaaacatagtggctggttgccttacctgcacctgcagaaaaacgttgctgctcttcttcagcacctgacatgtattagacatgtcaccatcctcttagaaatcggaatgtctccaatctccccaactgcttgatcgacgaggtcacggcattagtcactgaaccaaattcagtataagctatgatactttttatgcctctacatatgctcttctgtctgagaaaagcagtattcttgccatgcatagggcatagaattgttccaggattccagaatagttgaaaacagttaaacacgtttccattatgtattccaaacaagaggtcttcacagggtgcactgtatagtgtttctttgatgaaattgcagtgtaaaatcttacatgttgggactcacattagaacatgtgggtctttaacaaaattccaacaatgtacaatactatatgtcgtagcttgcacagtcgatgtttttcaccacagctgttctattgacaatcatacttgaacagaattatcatgtgactgtcacttccactagcatggagaaaagcattgcaaactgatgctcctcacgactttcatttccattttgattgtaaactttacaggtgtcaatatcatatcataggccaggacaagaattcatcacccacagtttctgggcccttttttctggagagattaattgtggaggaagaaaaagacccaaagctgagggtcatagtgaggggaaaaggaaagtacagctattaatcttgtggcagaaagaaattagggcgaagaaaagttcaactgtatccccgccttcccgaggtcataatcaaactgttttaggatgtggcagtaattcacctgggcaagaggggaaaaaattcattcagtaacaaaataattcaatttcatcagttactttagagggatgtcaaagacaaacctctatgcgaaataatcttgttggcacaactacaccaaatcctgcagaactcctgaatgtttgtagaaactcagcaagagggaatttcctgagatcaggctctgttagtttggcaagatttccagctgagacaaatgcatggccatggattcccagctccctgagcggcttcagaggtatatcaaatgacagatcagcaaaggctgtgaccgcaatgtcacctccccgtgcacttagctcaggagaagtggaagcaacattttcagaattctctggggtactgctttgcaagtctgtccccagccctcttttcttgaaacctaatagtgatgatggtccacccaagcggcacataagagacctattgccacccaagtagaactgctctgaaagtggcgatatagagcccgtcgatccccttgccaatgggtggatgatcccagcagccactccagcattaagggcgccattcaacacacccagcggtaaagccactcgaagatcaagttcctgatataatgtgaataaaatgagtgatgccagtgaaaaaagaacaatatgattcctgctagttctagtaatttaggcttgaatcagatcagttgtttaatataaaaaaaaatcagatgtcgagcacattagatattacaaacagggataccaagttgtgccattcaaaggcgaagtagtgcagaggctaaaaagaaagggaaatgccacaaaagaatttggaatgcttgaacaaaacatttaattccagaagtctttggtactttaatgacatgattcatatcacacatgaagaataaactgcttttaacaggcaaaaactatggagcaagtcatgtgatttcccctttcaaggaagtggcagatatagaacacaaagataaagttgttcaatatacctgtctaatgtaacgtgcatctttgctctctggtgcaaggcctccaacttgagaagaaaatagataagcatatcctcgcgtcggtcgaattcttgaatctctctggtcaaccttgtatgcatatttaatagaggacaaaaggctatgccctaactgcccccttatggaattggatgacatcagtgctcggtctgttatagttcgccatgacagattgtaagcgaggttatggttcatggtggagagcaaaccaacagaaacacccatcatgtgttctctgagtgaggacttcaaccagtcctcagagagaaatgatattcgagctaccagtggagtaggtattgctccaattcttggtattgccactccagtacttagctccactgtctgatctaatccaagatcaccggatgcatcccatgtctcacaatatccaaataggttcttcaacttcactgaaccttgaaccgaacatgatctagtctgcaataaattcaaaaggaattatatggatgacacaagaagatttgaaaagcaattgaaatcatgcagcagatattagccatcatggcattctactcccagcaaagtaggttatgaaacttgattcatggttcactagtaaaattgcagtagaaaaaacaaagaaactgcagtggacgagttgttctttatactccaaggaatcaaagcagtgtaattgaagcaaatagtataaccatatgcgcattttagtagtccttaaagagagctgtgtggtttccaccaaaaagcgacatagacacattgaattttttcgaaacaaatcgcattcattaactaagagatgggcttaaactttccctattcatgtccatcatcaaagtcatggtaccagcataacaaattaacacctgttgtctgctgagatcaaaattatggtacaacattgcctcatttccatgtgaaaaaagaacacttcttttcgttggaattggctaggttgactcttgttcctaatgcgaagcaagattgtttggtctaatctttttagtaactcaagcaaagtaagtaatcatgtcaacatggatgttcaattttatactagaaaggagagattttcagtaggaagcgcatacccctttgttagcgaagatgccgagttcgccggcggcgcggccacgagcctcggcgacgtcaacaaggacgatgacggcagcgttaccggggatccctggcggcgcggcgtcgagggtgatggacacggtgtcgaaggcgccgaggcgacggatccgatcggcggcggcggctgcagcgcgcacgaggtctctgacggtggcggcacgcggcaggtccgagccgaccgccgcctccaccgcggcgcggcgcgtgcggcagcagccccggatctccacatcgtgcacccggatccggacctcctccgcggtgaggcggcgcaggacggactggaggcgagcctcgtcggacggggacggggagggttcttggtcatcatcgtcctcctcgtcttcgtcatcgaggtcgtcgtcgtcttggaagtcgtcgtcatcatcctcttgcaggtcggggtaatcttggacggaagcgggagaggatgcggtggccattggatgatcggaaggggatctcaactgaattgggagacgaagaagacgactctactcactcaaactcaaggatgccttcacaagcaacgaataacactatcaacttccttttttggggtaaaattaaatttatgcagagattgatgcaattcaggagtttcacaagtttctttttttaaagaacaacaaatgcatgatagaatatgtgaaaaattgctacgatttatatggtatagaggtaatgcctttgatacttttttttttgccaatatgcaaaagatttgagtatcattatattaaactgaagggaaatgtttaccacaaacatgagaagaaaagaaacacaattaagaaatatatatctagccgcatgagttggtgagcacaatagaacggcaacaacttttttttaaaagaaacacaacaggggaaggccccccgttgttagataaactttattaaagaaataaaaaaagattacaacatcctaatccagttaagaattactacatctttatcactttcattaagaaactagggaaggagacttattctaaaaaaatatagccattcctttgcttctaaatattccaagctcccaatagaaaaatttccatgaagcaacaattctgaaaagtgcacttagtctgcaatagcatatgatcagaggacaaagaagtgtcccaaattatgcccaaagagttccagtagctcaccgaaaaagagcaaagaaagaacatatgcaagagatcctctactgattgagaagaataaagaatacacagtaggtcgcagtttggaggagtatagtgcttatgatccagcatatacttcgtattcaatctattcattaaaagcagccatccaaaaacaacaacttactaagctcgtatttcggttgatcttcgtagcgttgccttaaatgctaggatacatcgtctaccactgaaataataattagttgtaaatgcaaatactcatgtcaaatctagaatttaaatccaggtggttggttccaacataaccagttgagttacgctcactttctcgttgccttgatatatgagagaacacaagcaataggtatcttattataaaaaccatgccttacattgtcgtatgcatgctctaaattataatccaaaattacgtttacattgtgtcattatctacttaaataacttcactaacatgcttattggtactaataagttactccctctagtttttttttacaagatattggctagttcaattttatactagccagtgtcatacatataatggaggtagtatatagtacttcaaatacacacaacacaaagacaagattacatatgggttaaatgctatttatttccttttttttctcacctttacaaacctgcaaactcatttctgcaaagaaaaaaaaatgaaaatatgttgcagagtattcctaattgcctactatgatacaagaaaaaagaaaacacacactgaatttcagtttcaggctttcacactgaatttgaggccttaactgaatttcaggcggtttcggaggaggcgatctcaagctccgcccaccacaggggcttctccctcggcaattatcctttaattagtttatctgctgaaatagtttatttcttttagagaaatactgaagtggacttatcctttaattaatccagtaatttaataactgttttaaaatttcgagtcgttcttttttttctcattgtagtatgacgcaaaatctcgtagagttatccaatcaagaaactataaacgtttcatagccacaaaaataaagaaccctcactttgctaaacattttctgcaatgttcaaatcctccagtaccatcagctacagactccgaaattgtgccaagctctttcaactcggatggagtttcactggaaaacattttctctttgagtaatctgcaaagatcatcatggtggttaaggttacatagtacagcagaaagactaaagctccactgaaaggctgtcattcattgtaaagcatcctatacgtacaatgcaactgacctaaattacttctaaagtatcttgaataactgttaacaggaagtgcagtgatctataaatcttggtgtactgctaaatgtgatgtaagtaggacatcaagaagtttaccctttgaaaaatagtttgtaaatatgtaatgtgactatgtgagatgcacttgatagtgcagtgggaaggggtatgcggtttctacttcgtgatcctgtgttcaatcctcaacacgctcacaatttcttcttaaaaaagtttggagggatgtctctccctccaaatctccttttttttttgtaaatattcatgaaatacatgttcggacatggggatttggattcaaatcctccctgaaaactccctcataccaaatatggtttcagtttagtggaagaggaaagattggatgaaagcataataacttacaagttgagcactctgccaatcaccttcccttctccccgatttgacaaagaatcagttgatttgtctcgctcgctctcgctatatctcaagagagctctccctgaagcacaaaacttaaatatgtttaggttgaaatctaaatccacttgggcctcctttcaattcaatctttagcaatcaaaagaacatctcaccttcttcactgcagggagcacaggacccaaatctcgcagagacaagaaagaaggagaacactatgaagtagaccactctaatggtccatgcctccatttctgattttctgtcccaatctgaatttttaggaagagttggaacctcttctctcttcagcaaaatatcaagggtaagtaacaaaagcgcggtgattatggaagaacactgcaaggaggggaaatgattcgaaattttacctgtgaggtgtgtggaggtggggctagttagccagaaagctaaaatcatgttttggattgtgaaagcacacatgaacatgattgatgattccacagcacctcaagaaaggtatcaccgtgtaaagaagcatcgtctcgtctcccctcaaagattgaattcttgctcttaagaataacaaaaggaaatggcagaaagaaatggtaaataagtgaaacaagagagtaaagcaggacgctgcaaagagtggaatcaagtgaggaagcagggaaccggacacaatcataaatctgttctgcaaggaccaaaaatgtacagtagttacaaaggaaatggacaagaaagaagagccaaggaaggaaagatacctgtaaagaaaggaatccaatccattctacgcgtactagaggtacttaactacttggatctcttggctggtatgtagttggaaagagagaagccagagaattctcaaaaaaaaaaaaagaagcccagaggaccacacaaagtcttgagcttccagagaggagaagagtcgagcagtggctaagtcttgaggaataatcgaaatgttatctggagacaggggcaaaaaaagaaaacttgcaggcagctaggattttcgagaacctcacctgtaaagctttccacgccacgagtcttgataaggtaacaaaacacgcggaatatcgttgtctacttttgtgaaatcggagccgaatgtctgcccttctgtagttacccctgcctgccaggtattatactagtctagtgtatgcaggtatatatggcagtggcagattttgttttaaaccttatggcgtgcagaaaatgaactttctgagtggggctagggcacttactacttctgctttagtaaaagtttacttgagtgcgtttatgtcggatattttaattatccggcagttcgcagctgatggtgtctttctatatatcttggccatacatatggcatgcttcctactaaccagccattatatatcgacaaaaagatgtacttgtcgtagtagaagtagccgttgcagttgttgtatggtaaatattgtagcaaacagttccaactcttcaagtttttgttaattcaaagttttttttcttttcaagatgggcatccttcttactactttcttatgtggaataattctcaccaacaaaagtttgtggaagctttcacacttgaacatttctcaaaatttgcacaaggcgtgcgttagtaggtcaagcctgcctcccacaggttatattcgttgatacaaaacaaaaggtggtagagaagagcttcacaagttgcattgcacacctcacacaccttatacagctgattaaatcaaagcagagattgacaaggcacctactttgatgcgactgaggcagattaaccatcttattgtgtttagtgattagctacttcttgtgcttctattggcatgtttatgtttgagtcgatcgtcaatgagagtaagtcaacttaagaaagcacaaagaaatcttcacaagacatcgagacagtgacagcttcaatgcatatgaaacaggcaggctcctcgcctcctcatctgcaacttatatgacctttactgatcaaaatgctccaaaagacaaaaggatgatgagatgaaaatggaagtggtcagttaacttctgaatttcttttcagacagctgctaactccattagtcctagcaattacctactcgatcgttcgtgtacaatttccacttggtttttctaagaaagattgcagattgtaccatccaatacttggggggaaacacatagaagaaagctttatattcatagaaaaactagatttagttggtattcgtacctttcatgaatcatggaaacatgcacgcaggttaggctacttcaatcatgcaaggcaggccatgatacccagtatatgtgcagaattaaattctgcacgttccgtaatcactagtctatcaaaacaaaatgctgaaattatttctggactagcacattttctatgtcaccatttgtgtgagaatcgtttaaatactgggatgataaaacgtctatcaccagcgggtgtttggtcttagtggcatgattctcgcttcgggtgcgagaggtcatgagttcgattctcgcaaaacacccctaacttttttctatttacaactaggtccttctcttacagatgtgatgtactctttctgatgttgcaagtctctgtctttttctctttccttttttttggtcctgtacatggtgcaaattagaagcactccaagataattggcagctaaaattgggccgtttgctacattatggtgtagctgtgatgaagatgatatggtagtgtatattgcaagagcaggaggagcagctgcatgatccaacgaattccgcaacatgcagacgacaatcaagctggacaaggtcacgttcagaggtaacgaacccatgtggccacgccgtgcattctcattctcatattgaatgcacattccaagcatgtgctccaatctttttgtatattgctctctagagacaatggatcatggatgcacatcagcactaaactattttatcttggagcttctaatgttttctcaaaatggatattcaggtcatcagagaagcaaaagatttcacaagtaacttggtggtgccatacccaccgaaaagtgcacaaggttcgaccgatcaaaagatcagattcacgaaaacagacactaaattgctgttcatcatacgagtcgcaaacagggcatatgccatatctaattcagtcgtacggtatcatcatgcatcaattatcaatatgatggtatcgtatcaagtttcggggatggtaacaaaccacccatctgaacgagctctatcaagatggtagcaaaataaaatcagtaatgtggcttaaacccccacttagtttacaggcaccggtgcaacttatacatcgtctctctgaaaagaccaaatccaacgccatgtcaacggagtgacagcccctacttcaccggaagtagattgataccagtgggatgtcaacgtcgttgtcatcatcgtcctcacaagccaccaccacgtcaagatggcgccggtatgggggcacctccacctttgccacctccctcgccacatcgaccaccttcttgtctagacgctccttgtgcctcgggaacattgagttgtacagcagcgaggtgccgcaagatatgctgtatgcattcaggcccttctccttgagccagtccagaagctccctcagcgtgatgttgccagttatggtccagcggtcccaaacagtccaggccatgtcctggtgcttgatggtcttgggagggaccggctcagccatagagaagagggggattgcaaggtttgcaaatgtgttcctgtagtcttcaaccttgtgcccaccaccgagtaccttgtacagttccaagcagacaagaccagtagccatcgcagttgaggtggcaatggcagggatgatcctgccagctatgaacttcgccttcagcttgtccacttcaggaatgctatagttccttgcccgcatgttagcaaaaccagctatcacgtccatatggtaattggtgtcatcatcctgcacgtacatgaatgcggcttagaaaaccaactctcaaagctaacacaatttgtgaaactctttagggtcacaagggtgttcatcctagaggtgcatggttggctacaaaggaaaagctaaggaaaacaaaatcacatttactctctcgaacttatcagggaaaaaaattgaaactaaccttctcaaactggattggtttcatctggaatcctggttgcagtgttttggaaattgcttctaactttgcaataagctcttcaatgacagcagcatcatcaacagatgcagacgaaagactagtagccttctcatctgtaactatcttaaccccctgttttggttggaaatcaggaacaatcaccttgtcaacagcttcagccatctttgctgggtttttgacccagtcaggtatgggtatcccaaatgtctctgcccttaaaattgcagcagccaaaataaagttaagctggcttggatcagatgtcaagaactccagtggtcgtgggaaacgctttggagcagaccagaaaggagcaccagagctggtcatcgcatcttcagggaaagtgtatgtcagttgcttcacacggttggagaaataatcctcaaacctaagatgaacaatcaatacaaacaaaatgcaaagtgtatgtcagttgctgcaaaatgcaaacaacaatcaaaaagcaaatgctttagttgcaaaatttaaattttggaatattcttgcatattgcaataatgaaattcaagcagatgtacacagcttcaccccctatgcgtaataagctaaaggtgctcaagagatgtgctaacttacttgagccgggcccaggtaatacaatcttggaatgtctcacacttctctctctcgagacattcaataacgcgctcaagctgatccctagcctgtgcatcaccagcagttcttgctacagttgcatatccaccaggattcgataggaaggcatttacttcagtgggggtcttctcaagcaaaccctcaaactcagacctagcccaggttaggcaatgatcaatattatgaggaaatgaatgtacagtacacatcggcgcctgcttttcaggtggatctctggatgcgccatagttctctgttaggtgaggtatgaccatctgtgtgttacatttagcacccagagtcccagattccaagagtggcttctggaaatatacacatcgggagtcaatatacattcttgcggtaacattgtccaacgcattgacaacagcatccaggctctcccaaaaggcatcgttgaacacattttcagtctcaggacttgctctgttctgaagggcctcgacatgaagcttaggattaattgccatagcagcagtagcagcaaccgtggacttgggctgaccaatgttccagtcacggaagagaaactggcgactgagattgcttttttcaataacatcatcatctgtcactatcagctttccattctgattgcaagaaatgcccattagcgctaggtttttcaagaactcacatccaagcgccccaaaaccaaccataaatattttcgcctgctcaagtttcttttgaaggttagatccaaaaacactgatttgtgcatcatatctagtattctctggcttcaactcggctggctccaatggttcaacagggagagattcaacagaatcaaaatagaagaactgcaaaaccaggaaaattacattaatgtttacatgaagagtgcagataaaaagggatttacgttattataatgaaggaaacagattataacctggtaaagtggatggaatttccctgagcatgctttcacaacctcttgacctacaatgccaccaaacattgcagccatagggttcagaacagccctggaaccacttgcaaaatgatgcaggagctttttgtcgagctcttcaagtttgctatcacccagggactcgttaatgctaatagcaaaatctatcagtctttgcacatcatcactagacccagcaatagggaatcgcctcaaatcattcctaaacttatccaaagcttggaaagccaaatgcagaagtggtggacggtcgaatttggagaaatcgctcatgagaaattctcctggttccttaatggcgtctttcaaggttttgaatttaagaacctttggtggcttgacctgagtaacaataccacctctaacatatgtcccatatgaggtagtgtcttcttctagagtaaaagaataaggcctagcgttcttaatctttcttggtttcccatcatttagttcactcattccatggacttctgagaacacaactaaatcaccatcctggaactccagacgctcatcatcaacacaggaaacaagcgcagggttgtcattgctgatcgatgctactattcctgtatgtggctcctctccatcaacatccaatacagtaaactcaggaccaaagtcacaaaagacactgccaaaaaggccacgaatttctgacttaatgaaagcaattggtggctgatggttgtggcagtaactgtcaaactcaactgctttctctaagctgatatcagtaaagaccacagcctgtatgttcacatggaaatggttattccaagaataagaaaatatgcaatacaaagagacagtcattgctcaaaacagaaagatggctctgaaatattatcttgaactactacagaccttttgcaggccatattagtatgaaggatttactgccatgccacaaaattaaagcagactcacacgattgtctctgtagtctactgagatgatgtggaactactacagctttactcttaatttttcttatcagtaattggcacaaatttaatagagctattgtgtgggaatacgatgataacactaactactaagaccaaattcactaagtttaaatagtatgtgttgcactgttgctaaatattaaatatggagttccaatgaatgtaaaagatgtttctttgacaaaaatcaagcaatcaaaggaaaaaggcgataataccacagaaacctgagggctgaaggcctaatgaatgcaacgaacctttatgctattccaaatatcaagcagaagaggaatttgaggaagctagtagtgatacacatgcatagttaatcctaaactccatgaaatttggtgtgtaaatactattttgcataccttgattgtgcacttccttatacataattgttgactttatttcttcattcaaacatatatttagtaaattgtgaaaccgcactgtattgcctaaaagaatttccatactttctatgaagagtagcaacaattcctagactaagatcaaataacaagatgcacagcctgtagtcacagacttgcagctcacatggactgaagtacaagcgaaacgactacttgaaatctaagattaacaggcatacacgatgaagtagaagaaacaaacagcaaggaaggagatcacaaatcaactgcatgctcacatacctggaaattagaaagctgctccttagtcaaatcaccggttatagtagagataataacagcattattgagctcctgtagcttctgaacacaagtttgagcacggttttgaccaacatccttctctgtgaggaagaagttgcttgataagtcccatagctccacattgtcatcatcgtgcaagtttacggacttgacacccgcaaggacaaggttcttggctgcaggaagacattggcattaagtaaatttcaacagcatatctgaaagtatgaaaaaggcaaagccaaaaacttgtacaatcatgtgatttgaatcctcaaaaggtctcccaatttcacaaggtagacattgcattctgagtggttaagcattatatgccaagtctcaagcatcttagcttattgcatagcacaggggactgaccagaactaacacagatttgttgtatcatgcaagctcctaaaatgtaataagggggtaagagcaccacagcacaactgggaaaagtttaaactctggttcaaagaatggactcaagagtcaagagcgtcaatgtgtttgacaatttgagctgctcctataatcattgtttacaaatcttaaaattgaagaatcagttaataggaagcgcacgctaccacgcttcatatttctagtaacaagatgtagaacttgcggaactgagggcagtaacccagcatggagatcgtaaagcacgcattgagataaaatttgataataataactagcgaaagatcaattgtgcacaagtgatatcgattaactgtctacgggtctataatagataagatcgattgtggcaggaaagtggtaattgaagacaagttgcccctttactcaataaggtcgatctgtatgtagagtagatgaggggctttgggaagctaattaaggcgtaccgatctcggcgccgaggccgttgaggccagagacgaggacgttggaggcgaagaggcgcttcatggtctcgcggccatagacggcgagctggcggctgtggaggtcctcatcgatctcgggcgctctgccggtggtcatggtgtggttgtcgtcggcgggttcgtcgtcggcgcgggtcttcttgtgcaagtcgtggacctcgccggcgagctcctcccgcttgcgggtaagcatatagtgtagggcgccgccgaggaggccgacagcgagggtcgccgcgaggacgaggctgaaggcagccggcgagagctgccgcgtcagatccaggtcgcaaccacggcgagacctacacacccgagcggctcggcgtgagacgggagggaacaccgcaccaagagatgagggagttgggcgacggaggaactcacctaccttggattcgtctcgttcgtggatcgagctgttcttccttcgcttcccttgtactatactctatatctagggttttgaggaggaaaaaagaagaagaagaagaagaagggctaatttgtaaattgtggccgcttctcttgtgcgtctgataataagaggagaaggggagaaggggagttgtttgagtttgagacgagacggaagatgtgggggtggggcccagctggcagtgaaagaaacgaaaggcaaagcaaagcatcagtgctttccttggcgttggcgccgtgagcatctgcagttctgcacatcaactccatggaaccatctcgaaggaataagttcatctaaggtccctcaactttacaccgaatccgattttcgtccctcgatcggaaaaccagacacaacggtccctcaactatcaaaatcggtgcagattaggtccctcggcggttttaaggacggttttgactgacgtggcacctacgtggctaatttgactcggtcttcgtccgacgtggcattgacgtggcgcttacgtggcaattcgacccggaaaaataataaaacccatgggacccacatgtcagtctcacatagaaaataataaaaaaaatagtgggacccacgtgggcctcacatgtcagtcaaactcacccttcctcttcttcctcctctctccccatctccctctcttcatctctctcccctctcctctcctcttccggcgagagcagcgagctggaggtggcggcgagaccggcgcccaccggcgagagcagcgagctggaggaggaagccggggcgataaaaggggatcggcgacggcggtgggcggaacagatcgacctgagcggcgacagcccccccccccggagcagcgccggcaatcgagatccggcggtggcggccgagagaagggcggtggccggcagggagaaggggcggcgtgcagcgatggccgccgaaggaggaggaggagatgtagccatgcggggaggcgtggcggtgacagccgaaggaggaggacgtccgccgtgcgctgctccccccggtagtggcagcggcgcgggggccctgggagtcgccgaggatgccgaggtcgacgtcgatgtcgtccgcggccacgaccatggcgtccctgaacgcatccggcgtgcgccacagaagcggcggcatgggaagcggcgcctcagctactgcggcggcggcgttaatggggggaggggaagcggaagctcctcgctccggtgggctgccgctgacgagctcggtggtggtgaaacgcgacggatcgagcgccatcctggcggctaggggccctcctccgacctctgctccagaccgccgccttcgtcctcttcacccgtcgccggctatcatcctcctcgcttcggtgggcggtcgctgacgagctcgatggtggaggcgggttgcggcggagggcggtcgccgctccctctcccacgggttgccgtcggctgcgcacctctcccttcgtccgtcgccatcaagcccccgcccatggcgctcggccatcgccggcctccctgcgtccttcctccctgcccgcctcgccggtctttgcacgttgctccctcctctcctgccgccagccgcgtgccgccgcacgccgttgtcttccgtggcgcctggatagagcagagatagggagatgaagaaagggagatggggagagaggaggaagaagaggggtgagttggactgacatgtgggacccacgtgggtcccatgattttttttattattttctatgtgagactgacatgtgggtcccacgggtcgaattgccacgtaagcgtcacgtcaatgccacatcagacgaagaccgagtcaaattagccacgtatgcgccacgtcagccaaaaccgctctccaaaccgccgagggacctaatctgcaccggtttaaatagttgagggacccgttgtgtctggttttccgattgagggacgaaaatcggattcggtgtaaagttaacggacctcagatgaacttattccccatctcgaaagacacaagaggagtctcgggaaaaagtccacttcacgtctcttgtctcatcttatcgttaagtttaaaatacatccctcaacaataaacccaaatatagcatccttgatcttgcaaaaaccgcagtatgtatgggttggctccgctgatgtgacaaattgactcggtccactcacactgactagacacttacatggcaaaaacaaaatatagccccacatataattctctcctcccttctctccctctcctctccttcctcctcccctttttctccatctctcccccgcaccctggtgatactcaacaccgcgctcaaaggatgtcgccttctccacatctccttgttgtggttcgacagcggcggtagcagcgatgacaacgacaacctatgcgggcgccccaacatcacgtagaacgagcccatattgttccttatctgggaccacctcatgctcgacatcttcactgcagaggaaggtgccgatgaggatcaatgttgggtgctcaacatactgctatacttcttgcttgatttggatggccagcgtcgagcttttacatgtcacttattgcgtgccttcccgcattaggtcactcctttcttcgtcggtcaccacccttccagtccgtcgtgagacaagtgggcggcgtcgacgcccggcttgtaggtgacgaggtgtgccaccactatcgagcgcgccgcatgtcggtcacaatctcctcgctccgccgattgtccgtgcctccactacttttgccatcgccaagaccgaaggatggggagagagataaggaagaatatttgtttcgctgacacgtggatcccacgtgagttttatcattttttatttttttcttttagtgtcacgtcagccaaaaccaccctcaatactgtcatgggatctaatgtgacctgttttgcaagattagagatatgttaacgtgacctgattttgcaagttttagagactaaaaaaatgcacgtgcgttgcaactgcgtagtctattttaatcttattattgttatacgatttagctatggtgaaattcaccatgggaattcgcctggatattttattttacaaaatcatgaattgcaattagaagttcgatcgttagcatacgggttttttttaaaagagatttcttatgcgattcattctgcatttttaaaagcaaatgaacctaaaaccaactcaaacacggatctatatttccaaaaaaaaaaccgactcaaatatgaagacgtactaaaataaaagtaaaaatatttcagtttttataatagcagagatacatgtgttataatgtggagcctcgccacgccagcaaaggtgggctcaaactcaaacataagctgtcacttaaggcccaattattcttgatgggcccatcctcttctctttctttctcttttattttttctgttctttcagaggcagcaaagcaaagggacatatatgcataaaaacttgccaggcttcgagttactaacataaactactaggaacatgacataagcacgatgaaacaagcattaacaccacaatggtttatcatattgttccttattggctgccagcaaaatctctctagcaacaaacgtgtaaatgcccccaaaatacaccatcaccatgactccatgcatagccacaatatcacaagtatcgctacagccagcggcgccatgttccttttctgcgaggacgcgcgacatacacatgattctgaagctctactgacctagacacagggggaagttcatgaccaaattggttggttcattcactccattgctactgcgtgcttaatttgatgaatacacagactcgacttattttctttctttagctgcatgatcccatggatggaagaaacgaaacctactactgcccttcacacagtctcctccattcaagcttcttcctcaagcagcttctgatcaaagtgccacacccctgcaacacaaattacgtagcaaacaacaactgatgagtcaaaccacaggtctatagatagatggtagtacatcaaatgaagtattttctgacaaaacacactaaccatgcccctttcccactcttctcagctgggcgacatactcagagatcttcttgatggcttcaacctttcagagcaaggcagatattttcagcaaaacatacttcactaaagcacagcagttgaatatttaacatctcaagagctagttcagtacccaagtgggcagaaggtttttacctgctcctcaaggaattcgctctcaacgaagtcggtcagctgtggatcattgcaccttgatgccacctgttgattcacagcaacacattttcaagtttcaccatatatttcttttcaaaatagtgttgagaattatacaacacattctaaatccatgttcagcattactgcataacaggagaatatcttacactgtgcaggttgtgcaacttctcatttacaagcttttcgagagccaaggccaactccatagctgaaatcacaagcaagctagagggtaaaacataggggtacacaaagtttgtacaggtatgtacagcaacaaacagccagtgcatgctacttcctggagacactagcaaatgccataaggtgaaatggtggaaaatatacaatgacgttttctcctttaggagcttttagaatttagagaatctttactgtgcagtccaaaatgtttaaaagaaagcttctacaaaacaaagtagcctttattgaaagttactcccttcgttttttaatgtacgacgccgttgtctttttaatcaacgtttaaccttttttttgcaaatataaaaatatttaaatcacgcttaaagaacatttgatgataaattaagtcacaataaaataaataattacatatatacacacacacacacacacacatatatatatatatatatatatatatatatatttgaataagacaaatggttaaaagttaatcgcgtcatacattaaaaaacggagggagtaattgacatcaggattcaacatggaacttttgaagaggaaagtatccctgttgaatctggatggcgaatgagctcattcaccaaggaagttcccctgtttttgcaaaaaaaaaaaaaaaaaaaaaggctcctcccaaccttaaggattgagccacttaattttcacatagataattaacaggcagacactcagactagcacacagtaagcagaagcataagtacatataccatggaataaaaaacatatataggacaagctgaaagcaactcaccatacaaggcatcccctttctcaggatggtcgaactctgtcaaaggtgtgacgatggactggagccgcaccctgcctccacgcatgttctgacaaagaagaacattgcagtattagcatttgggtgcatgattatagtggtacagcgtacagttttcctggtgtgccaattggcagcagaggtaaagttacctggtacttgatgagtttctctgcgtgatccctctcctcatcgctggattctttgaagaatctgaaggaacagaatttgtcgatacatgagtgacaattttcctacttggtgatgactaaatgagggtggtgatggcttacttggcgaatcccttgagagcaacgttgtcacgatcaaagtaggcgaaaagggagtggtacgcgtacgatgcattgtactccacactgcaaagattgaactcttttttaggattgaattccaattcggaatataactagaacggatgacaagctaaatatagctaagcacagtgtcttttctcctatttacatcaattattgtggaataaaataa

SEQ ID NO: 8869 - DNA, 22169 bp, Oryza sativa
cgtcttcttcgtcgcccgccccgccggccgctacatcgcccgcaagcgcaccccgcccggggacctcctctccgagggctccttcgtcctcgtcgtcatcgccgcgctgctctccgcgctcgtcaccgacgtcatcggcttcaagtttatgatcggccccatgatgctgggcctcgcgctccccggcggcatgcccatcggcgccaccctcacggagcgcctcgactccttcttcatcgcgctcttcctcccggtctacatggcgctcgccggctaccgcaccgacctggcggagctgagcctgataggcgtcagcgcggagcacgaggagaagttctgcgcgctggagctgttcgtggcgctgtgcgtggccggcaagatggtggggtgcgtcgcggcggggctcttcttctccatgccgttccgggaggccaccgtgctggcgctgatgctcaacatccggggcatcgtggaggtggccgccatcaacaactggggggacacgatgaaggcgacggcggagcactactcgacgctgacgctgtcgatggtggtcatcacggcggtggcgacgccgctgatcaagctgctgtacgacccgtcggggaggttcgcgcgggcgaagcggcggaccatggaggagtcgcggcccaacgcggagctgcgggtgatggcctgcctcttcagcgaggaccacgcggcgccgctgctggacctgatcgaggcgtcggggtcgtcgcgcgacgcccccgtgtcgctgatcgtgctccacctgacggagctggtggggcacgcggcgtccgtgctgaagccgcacaggaagtcccggagcagctgcggcaacccgacgccgtcggaccgcatcgtgaacgcgttccgctacttcgagcagcaggcgccgctgggggcggtgacggtgagcccgtacgtggtggcgtcgccgtacagcagcatgcagcacgacgtgtgcctcctggcgcacagccgcaaggccaacctcatcctgctccccttccacaagtcctcggacggcgcccggagcaccgccaacaacgccatccgcggcatcaaccggtcggtgatgcagtacgcgccgtgctcggtgggcatcctgatcgaccacggggtggcggcggggtcggcgtgcgccacggcgtccaacagcacgctgcagcgggtggcgctctacttcctgggcggcgccgacgaccgggaggcgctggcgtacgtggcgcggatggcggagtgcggtttggtggcggtgacggtggtgcggctgaagctgcgggactgggtggggatggggggccgcgacgagatgagggacgaggaggcgctgcaggagttctggcagaggtacagctgcgcgggcgcggagagggtggcgtacgtggagaagacggtggaggacggggaggggacggcgtcggtggtgcgcgccatgagcgacaagttcgacctgctggtggttggtaggagagagggcggcggcgacggcgcggaggggtcgtcggcggcggcgctgacgagcgggctgtcggagtggagcgagttcccggagctgggagtgctgggcgacatgcttgcctccgccgacttcgcggccaaggtctctatcctcgtcgtccagcagcaggccgccaccaggaacgacgccgattactgacttaattggctagtcatgctgatatactaccacattccctctgctcttctcttctctgctctgctgcaatattagtgttcttctccaagtaatcttgtgttttaggatttttggcgagcttctgtattttactgtacctaggattgcataatcttgctttgattctggacacagtctagatttctatcgctaggaatatgtacaagtatgcatatgatattgacatatatcatgttcgtgtagagtcaagtgtttctgaactgaacatctcattttggagttcagactgttatctcaacaatcaaaaaagaaagagcaattttatagtctttgagtaggtactatgaggtaccactttttctattgtaaatttggtacctcttggtatctaagtactacgaggtacttaaaaaattagtgtaaaatttagtatctcataatacctcctcaagaactgtaaaattgctcaaaaagaaatccttcttttgtaatggactagtgtggcagtgtttggtactctctacaatatggagtattattgtgctggactgctggcgcaaaaaaaaaatgtcggtaatgcactaaacatctctaacctgactaatcccccaagtcgtaatcctgatcaagtacatgacgtaggtgctacaaacacaaatgacgatggcatttggagccatcgacaacttgcgcctttaatcacgggggaaaggagaacatcaagtacagtgccgacctactagtacagagagtggctatttcaactgaagctcatgctcatcggccggagctgaaggacaatggtgaaggtgtatggatattttttttactgaaatttggaaataccaataactgttatagatactggagtagtatattctgatatgtcaatattactgcgtatgattgattgtctttcttttttttttttttgactacatgagaacaccaacacggtaattattgagtccatcaggcaaaccatcatagatggtcaatgttgtatattatggataagctatctgaatcaaagcctagagagtgtagtgtactagtgtagtctcctcctttccttcccacttgtagcaggctggtgggacccacaagtcacctcctttctctttgcttttcttcactccgaaatttccccgagtccgagtagagtagagttcccaagctcctctgtcacagactcaagtaggcaagtcaagcagcagccataggccatagctgcaggcctgcaactcccggggaagagtggagtgctgatacgatagaggtagagcaagaagaaagcatccatggggaacatcctccggtgcttcaagggagacgacgatggcggtgatcactatccctactacaagccaacctccaggccacactaccagcctcctcactaccatggtcaacctgcagcccccccagctccactccagcagcagcatctcggcccccatggcgtcacgccgtccaccgtcggcgtcgccgccctggcgcacgatctcctcaacttcgaatccacatccatggtaacttctacacatgctcctagctacatgcccttactcccgctttcctctttcattcagcttgcaactgtactaactagaagaggttactgtaggtctgacattaatctatcagcaattcagcatgcatttacatcctaattagaggttatccaattacaatacaaggtttctttggttggttctatgacaaaaggttgggtttggactttggagtaggtgttaattgcatcacatatgtaacttttctcagctttgaacccctctgcaattgaaaccaatctcttgttaccgaagccaatacttacaatattcctttttattggatttatcttgttatatgtgattcattcagtcatttttgtaaggggtttagtgtattgtaaaccaacctgattataagcacactttcgtctttttttcccctctgtttcttttggaatactgatgaatatcttttatctggactgaaaaaatatgctgcattgcgatactaccatttctgttagcacttgcaaatatgttcatattctaatggcgcatcatgccaagttcaattacttctttattcccagtttacatgtataaaataagtattatttgtccatattatcaggttcctgatggcctcagtcagcacgttgtatcatccaggaaagcacaagttaaatggtaaggatcagctctaaaagtctttgtagagttgattttttttttttttagattttgtacgtttggtgtacctactgatatcaaaattgctttgctttgtaggttaattttttaaataaataaatgattggttactgttgtactagcttaagttgggcttttttctaaatgattttatgactgtgcggttaaatgattttgatttgctatcctaggataggatgttccatacttggttcatatgtagacaaatccttatttgagaaggtgaaaaatataaaaaagaacgacattgaaacatacaagattctgttcatttctagtaatggaaatgggggtgtcatgcccttgataaaaaaaaatattgaaacatacaagcaaaagttgatgcaccactagtatggtctatttgtccaggctacttcaggtgttgataaactaaaaccttctcttttttttagggaagggtattttttacatggcctctacattcaaccggatatatgcagccatttaaattgggaagttatccccacaaacaatctaatttgaaattcactcatatgaagatttaaactcaggaccttggggtgctactcaggtcactgcaaccactaggctacatgcctttagcaaactaaaaccttctggcaatggttaaaacagagagtaggataagagtacgcaacggttggagtttgggactaaaaaaaaaatcttaccaaacgaaatgtatagttacatattcacatggaagttgaaattgattaagataaattgtgttcttggctacatttctggtacattctccagaagactcaggctaaattcgaaatcagccatgttgacgtacaagcttcggtcttgaattcttttacatattttagtaggatagaatttcaagtagcgtaaaggtatgtttaatatggttcttgttccaatggtatgttatactgtcagtaacgaaccagtttgtcacaaagcaaatgtatttggcaaatcttgcaactagcagctagtatatatgatattaatacaacttccactgaacaaacttcaaaggaatgtttgatctgatatcttagttggaataataataggtaccagaaactgttggaggcgtataagaatacaacacctccaccaaaaacaccagcaaatgctgctcagctaattgcaagagcccttaatatgatccagagagctgatttggaggtaactttgtttttcctattttgaaatactgaatagttcaacccgagtgaccacagaacaattcatgatcaaggatcgttttttacaaactgaaattatcaatcaaagcaattcactgcaatttgtgttatttctattgcttaaattggctatagatactctactcacctcgtctagaaactatgtttcctctcagggtattcttgaattttacaaccttccgatcccatcactccccacagcatcgtcaaactaccaaccatccttgctaccagagggcgtgcagtttgtgctaaacactttgccggtacggtgtgatcaactattacaactattctgaataactagaaaggaagcccgcgcttatgcgcgggcatctaatttaatgttgcttgaaatattactctatacatgtgaatataatatttgtatatgcgtgactgttcctgattctattctcaacctgtttttttgtcaatattttgtttgtgactattttaaatgctaattatccttgcaacacaaaaattctaaactaaaattacttacaaccatgaaatcttgaattatatgaaagtattatgttgcaacaatggagttggcccctataaactgtcatctaaactatatgctctttttaatacatatcaaatcttcgttttgggttctaaactttatgaaattcattttcttaagaatagttattgaacttcatgcaaaaaagttcaaatgttttgtgcaatttatatcgggctttggattcaacaaaatttgtttaaatttagcccaaatttcgtttgaattccagttgtcctttctatttcttttggaatattagaggcccatgttctatcaatcgttctcgaaatgattttgatctcttaaaattgggatgtaaacagaactatgttgagtgtacaactcgctatgggataaatgcgtcctttctaaaatcttgcctccaaaattgagccaaaaatattataacagtagacatagtgtgttttacttcctccgagatcaatatgtatatgagacatcaatgtgagtatgaattcagggacatgtaaaaatttgatttgaactataaaaaaaaacaggggaaagaaggcgcatatgtacttattgtagccatgcatggagaatattttagtattttatttgttagatagatctaactgtctagaaccatcagtttattagaaattttgtgaaaagagcattaaatatctttaaactactgaatctaactaaaaaaacagggcaaaaagggaatgtgataaggaaacggctacggttcctggttttgtcccaatctttcaaaatgctttgtatgtctgcagcgataatatatatactgtaatctccattttaataactcaagagcagcagcagtattaagatgatagagatctcgtccagcaaagtatatagggtcagacacataagatcgataactccagataaactaagctgaatagctccattagatcaaatttaaacagatagatgattaggtttacaatgaataaactaaccaaatctgtagataaactccacccgtgcagcaagaatgacacacaatcagagcaagaagacttcggcagaaatcagaacacgcccaggaaattaattcccgatcatgctcgtccaaaccaacgcagcaacaatggtggcaaaacgtcaggcagatggaatcaccatctccttcctgacctaggcggcggcggcggcacaatacaaaggaaaactaaaagccaatctcctaatacaaggaacatggcatatataggtggcacaaaggcctagccagctgaacggactaaagcccaacatgggctcctacacaccgatccaaataacagagaaaaacctcattaatgtaataccatgattacttggtaatcctgccgctaagcatggaaggaaagcagccacatgcatgcatacatgcggaggttgtgggagatgattttgtttttttctgtgggtcctcatcttctctcctcgcatcacgtggcagcttgagagcgtttttaggatgccacatggcagcttgaaagtgattttagaaagtttaatggacttttagtatataatagatagatagatagatagataggtttatcaccaagaatccgacatcacacattgaacaatgatttacagaattattgacaaatgctaactctcacatatcactgatattataggtttatgacaagtgcattggagatggtgatggatttactgcatatgttcccacaacggatccgagggaatctgcaaatgtgccattggaagtgcatgagttggtgatagcaagaactcaagcacgcaaatgtagggattaccagagtgctgatgctcttctaagcagccttgatgaagctggatacaagtatggaaactgatctgttttgatccttatcagttaatagcacaagattgcatatctgaatgacgaatcttctaattttccatacaagagttatggtcctaattttctgaatattgtcttttcatggaacaatgcaggatgcctaatatagtaggcacaggaaaataacagagcttaaaaattaaattgattttcttctaataattacagttaacacacaatccttgatatgtatatagatgctcttattgtccccacacagttgacacatgcatttatgcattttcggaacaaaacagtgaagatttttatagcagctattcatgattaaatgtggacaataattacatcagttcgatttggtttaatcacatatatgtgctagctttgcttggagatcacaggaaaacatggcttactatgaattttgatgagcaggataatatcttgttcagatgacgaggtcctcgcaaggaaatacagaataagaatgaggtaggtatctacgttgcacctctagatcgaataaaaatttgatgtactactgggaggggtgaagtgcatgatcttttataatttctatattaaaggggaattgatgcaccggagcttaagatgccctacgggaaggaatcacggactgcgttggtgaaactaattggtgggaagagcgtcaaaatttatgtatatgatctggaccagtttgggcgctacgttggtgatatctattgcaataatttgttcattcaggtgaaacataacctatttcatcagtacctccacatgtatcatgattttactgcttcaattcttatgagagaaattatgtgctctctttgagtccttcaggagcaaatgttgaagaatggccacgcatggcacttcaagacttatgataaacgcccagagtttgcaagagtaagagattcaactatattgtgtgttgttacttgttttgctctgacaccttttttttttacataaactttgtcgagtcatgcttacatatgttgttacttctgggtaataaagagttgttcacttactccctgattatgtagtgggagagagaggcaagagctgcaaaccgagggctttgggcgtcagggaatcctgagaaaccatgggattggagaagagaccaacgcaacgcaagacaggacgccatccaggtgtactgaagttgagtctccagctctcatttggccacaaatgtgcatatatgtctagttgggtaacgttgctgttgagtagcttgctgacaatgaatgtgtcaggaaccaaaagccaaaatgtatgtatggtttgtgttgtacaaaagagattatatatccaggaccaggagtcagctgtgccgtgtgaagtaacctgagaatgtagaggtgaaatgtggtcaatgcaagtgagctttgttcagaaacaagatcaacaaggccgattctccgctgcaaagcaaagttgagaagtaagctgtatatgcaatattgagctagctagctagctacggttgttatttgaagccaaaaccgtaacttattcagacagccccgctcgatcgtcagataaaaggccaggaccaaagaaacaagattgaaagccgaaggagggattcgatcaatggagggcggcttgtcgatcaattgagtgtgttgccattgccaagccgtgccagcttaacaggaggtttgtgattgccattgtcaagcgtggcatcttcatcttggtgctagacttgaaggttaagcggagtgacgcctcagaagcggaggagccagtccgtatgctccgtggcttgaaggcaaaatcacatgggcaggtcatccaaaacataggtatatttgattgcactaccgttatggtcagtgtgcatttggtcaaatctgccgggggccatgttagactagccacaaagattcttttttctttgttaattagcttcttatatatatagcctatgcaactttatttaattgctacttgtttagagatagtaacatatttccagagaaagctttcacaataattaccactgttgagaagtcgaaaacatatatatagcagtagaacaaagagaatgaatgaaaataagtacaacatccaaaagaagcatcagaaggatcagacaattactggtgcagattgtctgacggggaagaaatagcttattctacatgtgtgtgtcttggttggaagtgaaccaatcacttgaagagatatatatatatatatattcctttctgtttaaataattgcacaaatcatgaagcacttgaagggatatttaactgcaactgcaatccatcctttatttgtgctttaaaagttgtgcatttcacaagaagtgaagcatagaagcgcctccaaacacaatatcatctggtttatactcttccatcatcatctgctttatactcttctatccaccaatcacagctctcaacaaattgttgtctactttctagttctacggttctaccaatagtcattgcaggagcaagaaccatctctaaaacaatgaaatcgattgttatctcggacaatgatctcccgatgagttatcctcgatacgagtttaattgcagtgtgacagtcactgcaaactctgaggttcttggtgaccctaatggtctcccctggtccagtgatgagaaggttaaatgcaattgctagtttctcactatgatgcactagtgtgtgctccttctcttcatcttcaacatcaaacatcaccacttctgttgttggttcataacccatggttttcatttccaatcctaattcgtcgagctttttgtaaatctgatctgaaagaggatgcgacttgtctccgacacggaattcatggaccttaccttcaaactcaacccagctgcatgcaggaaccttctcgaccccttttgctttcatgtccaatctaagcttcgctgcatcctcccatctgcctctgttagagtatatgttggagagcattacatagttcccagaattccagggctccagtagaatgagctgcttcaaaacatgttcagcaagctccgtgtttcggtgaatcttgcagccaccaagaagtgcacccaatataacagcatttgctggcattggcatgtcatcaacaagttgatgagcctcctgcaacaacccagcgcgactgagcagatcgaccatacaaccgtaatgctcaatcctagggctgatgtggtataacttagtcatgttatggaaataccgtcgcccatcttgaatgaggccagtgtgtgtacagctgcagagcaagccaatgaaagtattgtcattcaatttcacgccagacttctccatctgaccaacaagggcaaatgcaatcttttcatggccagtcatgccaagccccaagatcatggcattccaaacaataatgtccttcttcctcatttgctggaacaccacccatgcctcgaccgtgctcccacacttggcgtacatatcaatcaatgcagtccctaggactggattgtcaagaaactcatcccagtccaccatcctgattgcctgccgtcccagatccaatgcacccaaccttgtgcaggctgatagcgccccagctactgcatagcaatctggcttcattccctctgcctgcattgcaaggaaaaggtccagagcctctcgtgggtggccgttggaagcatatcccccaaccatggcgccccaggccactgcatccttgtgccgcatcttgtcaaacacctcccttgcctttgccatctccccacacttgacatacaaatctaccgccgcagtggccacgaacacgctctgtgcaacgccctcctgctcggcagccctccaaacagtctccccagttgccaaatccgcaatccgagcacacgcagtcaggacacgcacggccgtgaagctgtccggtcgcataccattcgcaaaagcattccttgcgacatggacggcttccctgaggtccccagcatccatgtaggcagtgatgagagcggtccaggggacggtgctggggtgtggcatttcgtcgaacaccctctgggctcgatgtaggaggccgcattttgcgtataggctgaggagggaggtgaggacgtgggggttggtgtgggagggaagcttgagggagcgcgcgtggagctgctcgcccgcgcggagagggtgcggaaggcgggaggccgacttgagggcgatggggatggtgaggtgggaggggttggggaggaggcagtggacgcggagcgcgtggaggtgaagggcggaggaggtgagggcgcggaggaggagcgaggagaggccagcgaggaggtcgaggcggaggaggcgggcgtggaggagcttgacggtgagcggcgggaggcggttgctaggggcgacgccggcgaggagtagccgcctgatggcatcgccagacataaataagggggtgtttggatatagggtgtaaaaaaaaattttcttgtttcatcgcctattatatagagtgtcgtagcattgataaaaaaactaattataaaatctgtcagtaaaccgcacgatgatttattaagcataattaatctgttattagcgaatgcttactatagcactccattgtcaaatcatgtaataattaggtttaaaagattcatcctgtaaattagttgcaatttgtgcaattagttgtttttaacctatatttaatcatttatgcagttgttcaaacgtttgatatgacagggtgaaaatttctaaaatggtatataaaccgggtctaaataaagcgccaaagccaagcagtcaacgaatgaacaaatttagtcaaatattggaatatctcttcaaataatgaagaaaaaaaaagagcagatcggaatttttacatgttgcctattttgatcttggaacgaaatttcattgacccatgtctaacacgacatagtccttctcttcgactctcatcggtagcggcggcgcatcaacggcgacgatgcagccttctctctccaaaggcgccattgccgcctcctcctcctcctcctcctcgccacctttggcgtacagcacgtcctcctccacgtcgtacaggttggccgtcctcacctcctgcgccagcgcgcacggcgcgcagcacagccacttgccgtagtccgccgccgtggcccgcccgccgcacatggaccagcggtgcgctggcagcccgaagcgcctccgcatctgcgcgcgccagaacccgccgtacgtgaggcccagcacggacagcaaggcgcccgcggcgcccacgacgaaccgcagcgtgtcgtcgtggacgttgagcgccgccaccgcgaacaccagcaccggcgccgcgcacagcagcgcgaacgtgaagacgtgcacgtacatgttgccgagccccaggcgctccatgttccacccgaacacgcagaacgtgcacgacagcgacagcgccgccaccgtcgggtcgtcgccgacgtcgaacagcccgccggcccactccggcttcgcgaccaccgccctgtttctgttgctgtcacactgcgccgtcaccgcgatcgcgttcgcctcgtcgacctgcgagttcaagttctcctcgtcgtcggtggacgccgggatcagcacgatcttccggccgagcgggccgtacaccatgtacaaggcggcgacgatggggaagccgaggccgagcgccatgcagaggttgacggccaagtccgggcggttgtctcttccgaagaaccagaagagcgcgcagtagccgtactgcgcgaagcacgtggcgtggaacagcagcacgacggcggccacgtggaggcgctcgcggcgcaggccggcggcgccgttcttgcagtagagggcacggagctcggcgacgtcggcggcgcgccatcggaggagtagcgcgaggtggtggcagagcttgggatgctggtagacgcacatgatggtgaagagcgcgttgagcatctggttggccacctcggtccatcggcggcggcgcgaggcggcgggcacggcggagttgagcgcgccggtcatgaggaggaagacgaaggcgacgccgccggcgacgaaggcgagccagatgagcagagccgcgttcattgggtgcttggcccacgcgaggcacttggcgcggagggcgcgccagtcgacggagcggacgaacgccggcaagcggcgggaagcagcaggattgtttgtggtgcggagggaggcgaggcgggtgaggaaggcggcgccggagaaggagaaccatggcgccttggacggcgctgcccggaggaagtcgaggagcctctccttcttcttctccttgtgcttcttgtgctgctcctgcttctgcagcccatcgttcactggttcttgatgctgttcttgtggttccatgttgatcgatttgtagttttttcttgtggagtgaaggagttgcagaaaatctggtagtagtagctagctgcagcagatcgagtacgtagcaggagcaagctcgaaatcaaaaccatggaactgatcaacaaatatatatgcatgcaatgcaaatagttgacgaaagaaaggcaacattgtcaaatttggcagagcgagcaggtcagcgtcagccacagtttgctgctagttcaattactgcgctcgtgttgtttaattaccagccggattggattgaccgagctggatcggtcaaaacagttaagcgtgactgtatattactccccgtcctaaaataaagcacggttttacactatttatattcaatatttaactgctcgtcttaaaaaattgtgattagtatttttgttattatcatatgataagatatgaacattattttatgtgtgactattttttaaaaaagaaaattataaatttttaaaataaaacgaatatcaaacgttggacacgaatattcaaggctgcacttattttggggtggagttggtagtagtagctctatgtaacaaaacgactacatagtacagactactagaacatataggctgtggtcttatcccatctttcccaacccacttcccgcgttttctacgcacacgtttttcaaactgctaaacggtgcatattttacaaaaagttttttatatgaaaattacttaaaaaatcatattaatctatttttaagttttttttggctaatacttaattaatctcactataatcgtgtgttttgtttttcgtgtcgggaggcatggttgggcgaacacacccatagtacatactgtatcttctaaaatgactagtattactccagaagacttccaagaatatgtatgggcgtccattgtcttctatacacgctcactcatgttcaggaatcaatgttggcttgccatgactttctattgcttgttttgttggccctataactgaagcacaaccttgatcgggaataagtcatcttttgttgccttaaataagttcagcacaacaaaacagaacagctgaacagatcacctgtcggcgtgctctgttcaacattttcatccctattttgatccgctaagttataggccaaagctggatttcataaacttttacttccactgctctagttctgtaccgctactccctaagattaatgaaattcaggtggggaatctctcccccctttgaccagtctaaaaaaacttttacttcttaaaattggcttgatttatttttgatactgagcttctttttcaggttatggctgcaaagcagccaaaagtctctttcaagttatttttttagacaggtctctttcaagttatttcaagtccatatagtcaggcaggtgtacagtctcaagcatgctgcaattataaatactttcagtttacagatggccaataacgacgtttccctattcacagttggcgctctacaacattagaggaacaattggttcatcatatgatagttgatcatgttatcacacataataacttacgcaacaatggacaaaactgaaacaaaccttctaagatttccaaactacgattgctaacaattgtacaattcagttccttctgaaacttcagaagctatactgaaggttttagaaggattctaagttctaactgaaactacaatatctttgtagaaccaccccaagtgagtttcctgaaacacaagccacactgggcaaactgaaataatgagatataattgcattagagattcactatttccaaggtgcaattgcagctgggaacggattacaaatatacaatcccttcaaaatcctgtggcatctttatgccagcagtatgcctatgtacacccaaactccaaagaatgaacttcctctcgatcacaaccaacaaaaagaaatggagaaagatgagagaattcagtcatctagctaagtagctattgaatctgtagccttttgtatgcattttctgtgcctcactaacgaatgaatcccctggtgtagagaagaatgagcaaagaaaccaaagtgacaacatttatcagtctcttcaccttctccaccgtccagcttccatccgacaaactggccggtatctcatcatcatccacaatcaccaccgattccggaagaggcgaacccatgatcttctcatcatgaactgcactgcattcttcttcagatttatcaccttcaacgacgacttgctccaccacaacctgtacagccggtggaaccatctcctcatgaacaatcaccacatgatcatttgatccctctgatgctgccatgatcatcgtgtccggtggttcatggaattggacatggtgtgacgccagcaacggtagcctcttctcgtcttcaacgtcatcgacaacaggaagcttcttgtagaacgtctcgcaatcgatgtggtagaggctctccgtgcgcacctcctgcgccagcgcacacggccagcagaagagccaccgggcgtagtccgtcaccgacggcgagccgcagcacgccgtgctcgccggaagcccgaagcgttctctcatctggatcctccagtagccgccgtagagcaggccgcacacgcagagcagggccccggcgccgccgaccatgtcgccgatgaccacgtcgtggatgtggagcgccgacacgcccatcacccacagcggcgcgaagcacagaagcacgaacgtggcggtgtgcacgaacatgctgccgaatccgagccgctccatgttccacccgaaggcgcagaaggtgcacgacagggagagccaccacgccgtcgcgtcgccgccgcagtcgaacatgccgccggcccactccggctcgaccacggcgtgtcccgtgcatttgtgttggctcaccgagtcgaaggcgttggggcacgcgagctcgccgtagttgtcttttccgagcgggctgcacacggtgtacacgacggcgacgaccggcgcgacgacgccgagcacgaagaacccattctccacgagctccggccgcgtcttcttggtgtacccccagtacaggccgcagagcacgtactggcaggcgacggtgaggtggagcagcgcgaccacgacggccatgtgggcgcgctcgccgtggcgcgggccggcgccgtccttgaagtaggcggcgcggaggtcggcggcgtcggcggggcgccagcggcagagcaggaagaggtggtggcagaggacggggtgctggtagaggctcatgagcgtgaagagcgcgttgagaacctggttattgatctcgatccagtggttcctcgccgccggcgtggggaacgccccgtcgagcaggccgaggaggagcaggacgagcatggcgccggagacggcgacgcagagaagccagaggagcatggcgatgttcatggggttggtgatccagtccttggtcgccgaacgcacagagctccagttgatggcgattccggcggagaggtggtcgtcggcggcattgcggcgccacggtttgagctgcctgagccagtgcgcgcgctgtggcttgtcgaggaggaggggctcggcgagcggtggcgcaggctgggcgcggtagttgctgagcatcggggcgttgccattctctgcggtttgtgcatcgtcgtcacaatcacaagcaagaagcattgcaaaattgcaattcgcaaagcccccttctcgtccacctgcatttcaggagaaaaagaaaacagatgaaatttcaggaaaaatctacaatggacacaagaatctggacatgggaaaagaaaagaggggattttgtcgaaaagcagcaaggaagaaggggaggagagagtttggagagctaagtcttaccagaaaggagacaaggctgcaacttgcaactttctgtttgatccactcttattggatccacaactgaatataatttgtttttcagttgaaaagaggggttcttgtacaagcaagcaaagcaatggctctcccaaaattttggagcttgtagagtttttgcagtccggtgtcatcgtgggttgacttgagacggtcaagtcagttcaggtcagacttgggtggcgctgcttatatgttgcagtaattaggaaggcaacagagacatcttcttccaagttccaagtgaagtggacaagtcctatattaggaagaaaggcgttgagctgcctgccattctggaccctgttgctgcatgtgtgattcatgaggaaaatacagacaaggccttccttttcttctccagccagatgggatatgccaaaaaaaaaacattatatttaatttaagatgtatagtctacaggcattaactggagtagggtggtacttgaatcagtgaagtgactggagctggaggtgctgggagagggacggacaacagttgatggtcccataatctcacggactcattcaacaaaggtaaataggcccatcttgctccctgcaattccgttcccgtgcagttgcgttagtattacagttaccccacacagaaaattaaaagaaacgaaatttctctcaaggaacaactgagagagagagatcacacaaacaacttccttggactcatgagatcgagcagcgacggcggcatgtttccttggactcaccgccgccacctcctccaatcgcattctcctctccacctgctgcattactgcacctcctccacctccatctccagggatcccttcgccatcgcctccatggcctcctcctcctcctcctcttcacacctccacgcgcactcccttaagctgggcacgctcgctcacaccttcaacatgaatcacctcctcatctactacgctaggcggggccttctcgactcagcactcaaggtgttcgacgaaatgccgcaaaggaacctcgtctcctggacagccatggtctctgcctcaacgggcaatggcgcgccccacctgggctttcgtttcttcgtttccatgatcaggagcggcttctgccccaacgagttctcgctcgcaaccatgctcactgcctgccactccatggtggcccattcctccaataagctcctcatcgccctttcgctccacggtgttgccgtcagagctggcctggatagcaatccttttgtggggagctctctgctgctcatgtacgcaaagcatggccgcattgctgctgcacagcgtgcattcgcacatatcaggaacaaagatttgacgtgctggaatgccatgctcgaaggatatgttttgaatggttttgggcatcatgccattcgtacggtgctcctgatgcatcattctgggcttgcacctgaccggtacacctatatttctgctgttaaggcttgttcaatcagtgcgcagtgggatcttgggcgacagcttcactgtcttgtcatccacagcatgctcgagtccaatacctcggtcatgaattcccttgttgatatgtatttcagagccagacagaaggaaactgctgcttctgtctttcgcaagattagacaaaaagacaccgtgtcttggaataccatgatttcaggttttgcgcatgatgaagacgacaaggcagtttttggctgcttgattgacatgtcacgaatcggatgtaaacctaatgaggttactttctctgtcttgttgaggctgagtggtgctaaagagaatgaatcattgggccttcagatcgttgcccttgcctaccgtcatggctatactgacaatgttcttgtagcaaatgcagtaatcaacatgctatccagatgtggattgctcaaccgtgcatatggcttcttctgtagtctcacatccacaaacattgtgacatggaacgagatgattgcaggttatggtctcttcagtcactctgaagaaacaatgaagctcttccgcagtttggtttgctttggagaaagacctgatgagttcacctactcagctgttctgtctgccttccaggaagctcaaggtgcaagggatcatgagcaaatccacgcaactattctgaaacaaggttttgcctcctgtcagttcgtgtccacttcactgatcaaggcaaatgtagcagcgtttgggtcagttcagatttcactaaaaatcatcgaggacgctggcaagatggagctggtgtcatggggagtcgttatctcagcattcctgaagcatggcctgaacgatgaggtcattttccttttcaacttgtttagaggtgactccaccaacaagcctgatgagttcatcctggcaaccgtcctaaatgcctgtgcaaatgctgcattgatcaggcactgcagatgcatccattcgcttgttctcaagacaggtcattccaagcacttctgcgtagctagcgctgttgttgatgcctacgcgaaatgtggtgagattacctctgcagagagcgctttcaccgttgtttcatcaggaaccgacgatgccatcctgtacaacaccatgctgacagcttatgccaaccatggtttgatccacgaagctctcaacctctacgaagagatgacaaaggctaaattgagtccaacaccagccacattcgttgccattctgtcagcctgcagccatttggggctagtcgagcaggggaagcttgtgttcagcaccatgctgtctgcgtatggcatgcatccagcaagagccaactacgcctgcctggttgatctcctggcaagaaaggggctactcgacgaggcgaagggtgtgatcgatgcaatgccgttccaaccatggcctgcagtttggaggtcgctggtgatcggttgccggatacatgggaacaagcaacttggcgtgcttgcggcagagcagatcctgagaatggcgccgagcagcgatggcgcttatatttcgctgtcaaacgtgtatgctgacgatggagagtggcagtctgcagaggagaccaggaggaggatggttcagaatcacgttcagaagttgcaagggtacagcaggattgagatgtagtaggaatgttctatatatattttagattggctaacagtaactactgattgctgaacggaattgctaaaaaaaatgtgaatacttccatgtgtccatgttagatgttggaggaagcatagactgaacgtgaatacttctttcttgtaacaatgtttggaagaaagcaagtaaatcctggaaacatgttggatatactgtagtttgggtatttggtgggcaatgctagtatatccagacaggaagttaatgtattcttagcatccttaacaagaaaatgttgatttccaaataagaaccatccaacaatcagattaccagttcgagaggaaacagggatcagaaacctcgaattcattttttccccttcttttcaaagtagtgctcactaaagcagcaggtaatacatttcattcatatcatcaggcatacacatgcctagctaacaatgacaaatatgaactaactattctcagcccacatacatcttcctattccagctgcctctttttaaactggaaaagccagccattcatgtttcacacctctgcaggtgaacacactaaggctattgcattttgattcaacaaccgcagcttattcttcgccctctgcaggtgaacacactaaagctattgcattttgattcaacaaccacagcttattcttcgctcatattagttgcgggaggatctgaacccattgctgtaatatctccaaattcctttgtctctggagaattacacactgcagagttctttggtgtctccttcatgttcgtagcttccccattaggttccgttcttggtgactcctcctttacgaccctagcgtccacgtcaggttgtggcactgcagtgtcaccagctggctcctgctttacacccctatcttgctcattaagttgagaaattacagtatctctggctggcccaagttctacacttccagcttccttacaagcttgcagcattgcagtatcgatgaatggctcctgctttacacttgaagcttcctctttaggttgcagaattgcagcatcgatggatggttcctgcttaacacttatagcttcctcattaggtggcaccactgaaatatctctggatggctcctgttctactctagcttcatcatcaggttgcaccaatgcagcgtcactgtgttggttctccttatcaggttgtaccatttcaatatctctaggtggctcagcttctactcttttagcttcctcacaaggttgaaggaacagagtgccacaagatgcctcctgtgttattactgttggctgcattaggacgtcagaatcgtgagcatctccagccactctagcttcat

SEQ ID NO: 8870 - DNA, 21859 bp, Oryza sativa
gtgaaacggatgaagtataacttttcgtgcttctgtggatcgtttggttcctccaaacggtcaccctttgccgataggaataagttcactttgtgactctcaaaagtgatcgaaatctaatccgtaaccctaaaccacaaaaccggatatctcgacccctcaactcttaaaaccggtacaatttgactccctcggtggttttgaagggcggtttcgctgatgtggcgtctacgtggcatcccaatcatcaaataaattaaaaataaagcggggcccacctgtcagtgagtcctctcctacattctctctttcttcattgccggcagcggcgggaggacagggtgagcagcggcggctggcggcatcggggcgcagcgcggtcggcggctaggacggcggcggctctgctgcggaggctcacgatagtgggaggacgaggggaacagcggcggcggtggctcgcggcagtgggaggacgaggggaacggcggcggcggcccaagatgctgctcgtcgtcctcgccctcgcggttaccggcgcggtctccgacggctcgcgagtcgctggaccacatctccatcaactgcatcggcgtcgggggacatgtccggctgccgctccgtccactcgcgccgttcagcaccgacgagggcggcgaggctcctcgtccccgctcagccgcggctcttcttggatagtcccgactggaggcagtcggcggctgggagggagtgggaatgggagcgggacgatgacgacgacataagaggaagctggctcgcgtcgggatcttggtggttcgtcggcgatgatgccgcgtgcgctgatggatattttgtaatcttgagctttttaatttctgttttgcatgcacgtagtggctggctcaagtgtaacgaactgctgatggaaatgaataaatagagaagaaaacagaaaagctgcggtgactggtgagacttaagcagcacaaaaaccactctgttcagaactctgttcttcggtttttcagtttactgttcacaatcttacaatcttcagagtttcagagattcagtgaggttgagcgtgtgagctgtgagcgaattgcaagtttcctgacatgcgctgactccctctccgccggcaaccacgtggaggaagtcgaccggcggggtggtttcggggaggagtggttcttggtcgccgtagaacttcgtctctgctacgttgcagagctcggagaaggcgtccgccgtgtggtccgcctccgcgtcgtggcctttgctcggggagcggccgtgggtgaaggcgacggcgacgacgtagacgacgtagagggaggtgaaggcgagggcgccccagattgtcacctcgccggcggcgaggacgacggccacagcgacgagggagacgaggaggaaagacgcgtcgcggtagaagttcaccctgtcaatggcgaccccgcgcgcgccgaggtggacgccgatgatgccgagcacggcggaggacacgagcatcgcgctccccagcacgccgttgagccacacggcggtggcctccccctctcccccgccggaggcgaacgacgcgatggtggagagcgcgtccggcgcgcctttcccgagcgacaggagcgtcacgccggcgatcgccggggagaggcggagcagccacgagaggccctcgaggctggagcagaagtacactgccgccgtgtcgccgagcaggtagaacagcacgacgagccacgccgccatcacgccgtagcaaagaacccgccgctcctcaccgaacacgcagtcgaacaggtacaggtagtcgacgtagccacgcgggaatcgccggcgatcaaggccatcctcctcggcgacgtgctcgcacctctcctcatagctctcaacctggaatacgccgccgccatcgcgacgcccccggatcccgccctccttggacgacgataccacctccggcagcgtgccgccgcgcggcgagatgatgaagaagaaggcgagcaggagcaagaaggccacgttgacgctggcaccgatcagcaccctcgtcgccggctagtacggagaacagacgccgaccccatctctccgagcgctggcctcgccatcatcgactcctccactccgggaccgcttcagctcccgccgggtggcgccacaccgcggcccatgccccgccgccggcccaaggggaagaaggggagagaaagagagaagggagagaaggaggactgacatgtgggtcccacattttttctttgtgtgagtgacaaacgggtcccacgtaaatttttaattttaatgccacgtaagtgccacgtcaacgccacgtggatcaaaggctcggtcaatatcgctacgtggcgtcacgtcagcgaaactgccctccaaaaccgccaagagagtcaaattgcaccggttttaagagtttggggggttgagatattcggttttgtggtttagggtcacggattagatttcgatcactcttgagggtcgtgaagtgaacttattccttgccgatatgggctgttttgtcagcccagcccagcccagcggagggcccaaaatcatagattgtaggaataggtctagttcaggaccctcatattttcgtcaagttcaatttgcatccttaaattcagaaatcttaaccccctacttacaaaaccgggttaaatcagatgagatgtaccgtgggcgacgacgaacttggggccgtgcccgtgcaaggggagcttactatctgcgcatgctccctccgcgtcggcgtcggcggcggcgggctcgacaatgtcacctcactgttcttcgcgtcgtgcttctcacctcgtcacctcctcactgcagccccgcccgtccacgtcgtcgtctccaaccagctcattttgcacaacggcaaaatgaaaaccccgtgttccctgctaaaactagctgccccagttaatgcataagcccttgttttcaggtatttaaattttgatgagtttcaagtgccaaatttgtactgtcattcatatataccttcgatctttcgctcgctcatactagtaggaatcttttcaacgatgatattaattaattaatacaatatgaacttaaaaaattaagttcttagatttagtaaagatactacacatacacgttttacacattttctgtgatccaaccaactaacccttagggtgtgtttggatagtgggaaatgggaggtagaattggaattgagaaatgaatgaagggttaggattaaatggaagagggataacaaatggttagaatttaaagatgggtgaaaaatcatttccctttcccatttaccgaacaatgccttacatgatgtgtaattatcactactagatagtataagtacatagcccttacgaggacgagggctagggcgaaaaatactttgtttttttgctgtcctatgcagtagtaatatgtttgtatattgcaacggatccatacgattagaaatagaaatggtttgggagtatgatcgagtatacatatactaatataaaatggagaagttgttttttttcctacatccccctagtaaaatgtacacacgatttcctatttttttctatagccatcagatccgatccttttgtccaatggctgaaaaagtccattattggttgggtctagcagtgctatatggtgaactcaccgcagaaacgcccacagccagacgcacttctcccacatgctaataccaccaccgtgccatatgctccatggaaacattgccatcacaccctcgcttctccaacaccgctgctcccttgatggcgcaacctcgctcctccaacgccgatgcacgcttccttccaccacggtgcgtcttctctcactacaaatcacttctctcactgcaaaatgcatcgcatctttctcttgtgttggagccgtggtccaatgctgttgcacacatccttccgtggcggagcgcctcctctctttttaaatagtaaaaatagaactatttaatcagtataatttcgtatgtataaatgataaggtattttcaaatataggtacatgtacttgcgaatatctagctagctatgcaattaatcaggtgactaagatgatgtcacttagagcagatacaatagcaggctattagccagctataaacatattttaatgagataaacgatgagagagaatagcagcgggctacagatctgtagccagctgcagcacagactacaagacacactgtgtgtatgacaggtaggatcatatattaatagtatagtaaacaactattgtatgaattggctattagattggctatagatgaattggagctagtaatgggctatactattagacttgctcttagatggttaattaattaatttgttgatgtatatctggtactccctctgtcccaaaacattagcatttttagcatagtgtcaagtcaaacatttttaactttgactattaatagcaaaaaacttaaaaagatcaatcatgtaaaattgatgttactagatttatcattaaacaaactatcaaaatatataacttttttttatttaaaacatctcacttttgtagatattgttaatcaaaatagtatctcgaagactgtgtcgaagtctaaaaatacttatatttcgagggagggaatagcttttctttagcgtttgagttgcaaatgaaaatggggagcatccatccagagtagtccatgtgtgtcacgcatgcaagtattccatcggattcccctgcctgcagacttgcagatacagttgagcgtacaaataaaacatcaataaattggtccttattgcgcatgctgctgcctgcatcaattaatcgatcgatcaatcatgtgcagtgcagaccaacacgaatgatccacggtacagatcgagacagccgcccccatgcacctggttttttcaattcgtcattatttgttcaatgttcacatattcgtgtacatgtacatgacaaattgacaaccagtacttcattttacaggtagtacgtactgcactagtagacgctattataatcttaaaaatgtacatatactatactatacatcgatcagtacgtgttgcctagctcgaaacccaaaattcaattagtcaatctactactgctacaatgtaaaaggctcagttgatgatggtgttgcttaagtgtttgcctgtaagatgttactccctcccaggggcggatatacattaataccatgacaacttttgacaaaaagctacgcttaaactgtctatccgtatattataacactatattctaaatataattagtatgctatgacaccgataaacacgttatgacaccaacgaactaagatccgccactgctccctccaagctagtttgatcatcgcttaagactaaaatgtcttctcaaaatttctgtcggtgtaactctacacaatatgcaatccgcagaatatgaattgataaagcacattgctcgatgagaattaatttcagaaccatggaggttttgttacgattgatcataacatcatttgcctaggtaatgatcaaacatggatgaaggaataaaagattgagattgtatgtattaattatcaaattaagatgataacacatcaatactaagtgacaaataaataaagaacaccatgtcggtgttttaaattctttttatataatgaaaatggattatgtcggtgtcttcaattaataacaaattaataaaaaagagaaaagaatggaggtagtaactaatgattcatatacataaggcgtccatgctgttgatgagcaatggatgcatggacgaaatcgatcggatcggttggaattggtagcaaatctctaaaaaaacaattatcggttggtcgagaataaaccatatttaccaatttaactattcaatgtcaatataacagtacgatattgaaagaaactagctgggtggcccgtgcaattgcgcggctagcacaaaaaaaaatcatattttttagtataattttacgtaaaatttattatatagctatctcattgtgtctcattgtcttaagactttgaatgtccaaaccttatcatcctcgtgtttctaattatatagtttttaatagtcacaccagttgttaccccttatgtcatctcattctttatttgcttgctcgatctaccactatttctattcattcttcttgtaacctttaaaaattggattttatagtttttagagtattgtcacgttgggtttcatttttattatttctagatgttccgtcaaacgttgccattatactcctctacgacacatccactgtcttttctcttcattgtcattgagattttaaaaattgaatataattatcgtttgggtttatttttactttttagaagtcccgctaaaccgttagcggctttgctattgtaatcctctacggctcgcccgctgcctcccttcattatttcattgagattttaaaattgaacatgattatcattgtttttttaaatttttagaagttccgaacctttaaaaattggacttatagtttcgttttttataatttttagaagtcccatcaaacgatgttagctctgcaactatactcttatacaccccgcacgctacttctcctttttattgccattgagattttaaaaatcgaatatgattatcaatgcagtttttttttactttctagatgtcccggcaaccgccttactcgtttgtttcacgacctgcctgacgtccctccttttaatcgtcattaggattctatttggtgttttattaataatttttatatgccgtatcaaccgccaccactctactcctttataggcctgttacttaatttatctcgtcatgtgttttagatggtcttttattttaataatctttatttttatcaaaaattttagttatttataaattgtattcctaagtgaaatcttatttttctttttttctaattttagaattttttttaaaaatttatttaataccgtattgtgttcttttaatgtttttattttttattttcaatttcagttgttttaaaattgtattcctactttaactctcttttaatttttctaactttggatattattttattttttattctaaattttaattaatatcgtattgggttcttatatggattcttctttcaatatgcttatttttaattccgaatttcagctaattttaaattgtattcctacctgaactcttcttttattttcttttgctaatttcggatttatttatttttattccgaattttacttaatctcgtattgagttcttatatggactcttcttttaatattccttatttttaattccgaatttcagctatttttaaattatattcctacttgtactctcatttccttttctaattttagattttattttatttttgtttcgaattttgattaatcttgtattgggttcttatatggattcttctttcaatatgcttatttttaattccgaatttcagctaattttaaattgtattcctacctgaactcttcttttattttcttttgctaatttcggatttatttatttttattccgaattttacttaatctcgtattgagttcttatatggactcttcttttaatattccttatttttaattccgaatttcagctatttttaaattatattcctacttatactctcatttccttttctaattttagattttattttatttttgtttcgaattttgattaatctcgtattgggttcttatatggaaacttatttcaatatagcttatttttaattccgaatttcagctatttttagattgtatttctacttggactctccttttattttttttatttttctccgattaatgtgggaatttctagccccacagcgaacgtagcgcctcctttcaaagctgttttaataatataatagatagatagatagatagattagaaaaaaaatcaaattatatatacgactagaattagaaatgatatcacttatatatatatatagtaacgatgcccggccaatcagaaaattccgtggcaataatatatataccagcaatatacatgtgcgcatatatagagcatacattaggaaattaatttcggaaaaggagaatgaagtttgagagtgacatacatagtcttaatctggctgcgcgtatatagttagctagccaggtggtaaatggattaaggagatgagggagacatgcatgtttgtgtcgtttatattgagaaagagagaaataaatataggggggctacgacagcggggcggcgctggatggatgctgtatatatatatgtggccgggcaagagcgagcacagccggccggaggaggaattaagcaacaagctaagctaagctagccagaggaaacaacaaggaaaaggagagatcgatcgagcgatggagcggtcgacgacgacgacgacggagcagcagcagcagcagcagcaggggcggaggagaggcgcaggatggcggcgttgggcggtgctggtggcgacggtgtggatacaggcggtgacggggacaaacttcgacttctcggcctactcgtcggcgctcaaggcgtccctgggtgtctcgcaggaggcgctcaactacctggccaccgcctccgacctgggcaaggcgctgggctggtcgtcgggcctcgccctcatccacctccccctccccgccgtcctcctcctctccgccgcctccggcctcgccgcatacgccctccagtacgccctcatcctcgactacctccacctcccctacccgctcgtacgtacacacttcgtcttctctctctctcttttttttttcttttctttattatcgatcgcctattcgctttgttttaattaagcttgattattcaattagctttctagttacgagtacctataaggtgtccttccatcatgattatatacaagaaatataatggagatcttagccaactatgctgattgatcgtagtagtacgtggatgtatagaggccaaggccggccagcagggtttggagattcgagatcgatagtactagtagtagtagtaatgaagctactgatctgagtggccacaaataagttgcaatcatatatcacatttacggacgcaattctaacgtcccattcaactgctactgaattatatgtatattaaatcgatatctgagagactcaatgcatccatatctctccgtcgccgcgcccacctctcgtttttccttggcttacaattttttggaatcgtctgctgcaatcgattaccatttaccaatatactcctactgtgtattataatattgcccatgttatacatagtcaatcttatatactgtgtatctgcagcaataagttagtttctgccttaaacatgtatctggattaattgattacttcaatcaactcaacgtatattttgggatggagggaataacaaacaactcctaaccaacaacacccgcatatgccatcatcaaccacgatcaaaagtgtttatttaattgattctttctcatctcccttttaattttcataaatgttagctgcttgcgcctatttcaaaagatgaagagccaaaaataaaaatcccacacacgatcgaagaagaaacaaacaaatggttctcaagtctcagcttaaaatggtccagaaaagtataaatagctaaaactccatcggtaagttcacgcttcactcatgaaaaactcacgaacaaactaacgctacggcactatgtaaaactaaaatccattctgttactctaaacatccaggtagctctgtgtcctgaattacagttaataaaactcgctatcaaaatacccatgccagtgagtcctgcattattggcatcatcttgaattaatgccttcctgcccaactatcagtttcagcttcaattcagctttgactagcagatgaacaagctaccattcttcccccacataattcttcttacaaaaggaccatcgctacactgtatccccttcttttggtttctttctgactggtagagtggtaggtgttgatgccaactgccaagtatagcctccttccttcaacttctccatcataaacagtagcaagaaagaagcagcacatcctttttatcagttacagtaatcaaatagtctgaacgtattcctgattttagagcctataaccaatcctctgccaccataatatattttgaattacagtaataaatcttgttagactgcatagctcaaagacataattagccgtcctggtttgtcctctgaaactaaaacagcatacctagacaaggtcagcaagttaattacctattctcacttctcagaccggctgcagttttccttttctgaaaccaacggcatgaggcctttaacaaaggaacgtcctcgcaaccgccaaatcgaaggcactccctctaaaacagaagccacatcatcagcctagaacaaaattcctgacaaagaaaagcattgctagagcgtcagccatgaatgtgatgacaacaacaacttcacacacgcctgttgcattgcatttttcagtactcagaacagcatcctcaacctgctcatgcttcacatattcttcctttccttgggcagatccttcaatatcagtaggaagtatgacatcctttttacagatgaggaagcataacatcctgataaacacaaataccaattagatcacagaattattaccgaagatcatgccattacagtttttccgcaacagtacataacactctcttccaaacactactcgaagcagcaaatctggatttatcactttgttgtacaatgcattacatattagtatacttcacatcttgcatacattaaaccaggatgtatgaactgatcgttggtgcataataacttactgttaggcatgttttcctttaactttcatcaacagtattaaaccagcgatgtacggacaaatgctttttaactgtttgcagccagtaaaactgagctaaccaactgattgactaatttggatcatgtattacaatgcaggtgttcttgatctgcctggtagcaggttgcagtatctgctggttcaacacagtatgctttgtgctctgcattcgcagtttctcctcgagcaatcgcccactggccctctccctctccataagcttcaatgggctaagtgctgcattctacaccctctttgccaatgccctctcccccttttccccatctgtctacctccttctcaatgccattgtccctctcgtcgtatctcttgttgcactgccagcaatactcctctgccacccacatgacggccacctccacgttgtgcccaagcatgacaaacgtatctttcttggtctctacctcctcgcgttcatcactggcatatatctagtgatcttcggctctttcaacacaaccaactccactgcatgggtggtccttacaggtgccatggtcctcctcgccctccctctcatcatccctgcctcctccagttgttctcatgtggacacacatgaccctgaacctactgttcaactcaaccacgaagattcaagaaaaccacttttgctcaatagtgaccacagcacagagtccaatgccatgatgcagaaaacagtggaacacccaatgcaggattgttgcttgggaacagtactggagaagggacgcatgttggttctttgtgaggagcatagtgcaaagaagcttatccagtgcgtcgacttctggctatactacatagcctacttctgtggtgccactgttgggctagtgtacagcaacaacttggggcagattgcacaatcatttcaccgggaatctcagctcaccatgcttcttgccgtctactcctcctgttccttctttggtcgccttctctctgcacttccagacttccttcgcaggtccctctgtcttgttctatatacttgaatgcatcctaattctcaccagctggcccataaactaactatatatattgaatttgcatgcaggaaggtttcgtttgctcggacagggtggcttgcagctgcgttggttcccatgccaatggcgttcttcctaatgtggaaattgcatgatgtaaacactctggtagcaggaacagcactaattggtctaagctcaggcttcatctttgctgcagcagtgtcagtgacctctgagctctttggaccaaacagcattggcatgaaccataacatcctcatcaccaacatccctcttggatcacttctctacggtcagattgctgccctagtgtatgatgcaaatggcctaaagatgtcagtaatagacaaccgcaatggcatggttgacactatggtggtttgcatggggccaaagtgctactcaaccacattctttgtgtggggttgtatcacattcctggggttggtgtcaagcataatcctattcttgagaacaagaacagcttacagtgctgctggtggtcagcaagttgtaaacaccttagcgaagtttcgacttgacagaactccttgatctgttccttacgctatgaaaccatggctactttgtacaagttttgattgagttctaggtgaactaggttagtagataacatgcatgtaaataaaatcatcagagagaatcgcagagaaagaagcagattaggatagcagttccatttacagggcattgatgttgagttgttgacatccaagatgccacggaattaattttgaacaattgtttctaacataaatagtaaaatcaagaacgtttctcaaggtattttttttttcatttagcacttcgtgtatgatgcatttggaaattggatgcctctgcctaacacgcttggttattacctcaataagaactaagaaaattagctggttcaatggcacagtggacatggaatttagttaggaacacagctgggcaacctcagctatctttaatcacaaaaacccatactccagtagcagcaaaccaatgaaaagggatagtagtaatacacacacacacaaaaaagggcctgttcaacctgtccaagcctataatttccttgttatctagtatgaatcatcagtgcatcacataaagatggcatgccatctgtatatgcgtgttgaaccaaaaaatatatatcaagacatacgggtatattcttctaaagcatttgtagaagctaccacctaccatccagcagtttgagagaggtacaattactgtttgaccaactgcaaaaatgcttagtatcgaaattacctcatgaagggctacaattgagggtggccatgagcctaggactatcatttctcttgttcatcatgcttcctccatggattcagagcttctctcatggcttgagcctctgggctgttctcccaagctcttttttctgattccaacacagttaccttctcatctgtagagcagaaccaaatagaaaaatagagattgacattagcacaaagcaatgaacacaagggaaaaaataactttttttagctggggttggagcagggacacacagaagccggtgtggatcatgaagagctccatgctggcacctatggcggcgccgcctaccgcgatcttgaggtaccaccccaggaacctcatatcctttcccgtatgtccgtgatgcaatcgaatgcacagatatttttttactctcgcaccccactcagctcttgctagctgccaaagaaaaagggcagtcaatcaaatgaacaaaccatgaagggcgtggcatttttgggatgggcattcagagttaccacaattttttttgaaggaaaactgtggaaggcatgcggccagcctgaacattttagtattgatcaaaattgtaatatttacatacagattgtgaagggtacaggggttgaggggaagcaaaaggggtcctacatattacaacatgtgagaaatttgttcccccaatctactactagacattgtgaggcaaaactatctgtgctgggaggtgatcaagacttgttcgatgacgagtgaaatgttaatagttgcatcagtaggaaaacaaatactagttcgtagcaggaaggtctatctatctttttttttttaacaaatgcgaaatagttttacagaaaactcagtttaactttgtgctcattaaaaaaaaaaactgatacccgtgctatccctttgcttatttcattctaccgagagataaccaaactcattgaataaaatattctagacattagcggttgctacgagaagagttaacaacaagtgattccaaatctagactaattcttcatataggagtattatttttcgaagctatgaaatctatagttgacataaggacacgccacattccatgattcatcagtaatgaatatagaaatgaatacgaagaagagcaagaaatgggaatttatttcacctctatggctctatgaccttccggtgtggactctgccctgtgtacaggtcgtcggctccctcctcggcccgcgctgtaactttcctccgtcaaaggtagcttggccggagagagagagagatccaccgcgcgaggcggcggcggcggcagatggagccgaggtcagacgggggagagagagagagaacgcgaagaggaggcacgcatattggcgtaatacacagataaaccgacggtccagatcatcccctggagtttttttttttgtgagagaaggcccagcgccggcccagcccgacccagacccaacacagaaaatatcactgctcgcaccacacacccgggcggcatggcggcgacctcgccgccgatgacgtctgtcgccgccgccgcgcttgtcctaaccccttctccagctctcaaccgtatatcctttcccttctcccgtcgtcactgccgtagtgctgctcctcctcctcggtggaggcccacgcggtgccgcgggaagcccggtgtcacggaagttgtagccgagaaggagacttcgccggatggcgaagaggaggaggtgcgcgggcgcggatggttcatggttgatgagattggtatggacatcctcaccatcgccttgcctgctgtgctcgccctcgccgccaaccccatcacggctctcgtcgacaccgccttcgttggccatgtcggtaaggatcttgcttcctcacttgtatcttttcttttacttctttctacatttcctttgtggagtgtaatcccaattgcttgggtaacttcttgtggaaatgaaataggcaaactgggttggcactcttgataaataggggaaattatcctttctatattaaccatttcctataagaaaaatgtttccgttactttgagaaatggaaactaatgagtgaaggacttgtgtgtactttggatgatcggtatgatgagttcgaattgcggatgttttacaagaggagtacacatgcttgtatctgttttttctctgttatatgttgtgaagaaacttatttcttacaagcttactcgctacagaaatgttggtcataatctttattcagttgacgggcttcaattcattcatcaggttcgactgaacttgctgccgttggagtatccatttctatcttcaatctggtatgcaagctgctcaatgtgccattgctcaatgtcaccacatcctttgttgccgagcagcaggcagtggatgcagctgaaagtaagcaattcgcaggtcttattttctttgttataaaacttaaagccatcttgcttgtttgcataacactgattagtttttagtcctcgcataggaaatgaaatttcaataccccaagagaaagcaagtaaacaaaggaggtttcttccagcggtctcaacatccttggctctagctgctggcataggattgatggaaatggtggcactgatacttgggtctgggacactaatggacatcgttggtatacctgtcgtacgtaagactaatttatttctattagtagatgtctgagatttatctcttctctgaaatatggtgctagtggtgggtttttctcttgttagggtgtgtcatggttgtggatatctagagtttaaatcctgtgtagagttgacagctaggtgagtcaggtgttacattttgtgttccatttgtctgtctgggtattcatcttgatgtatatacacatacttcaaaattgttttcagacctattctatgtgcttcattagtcaagttttcaacagataataaaggatcaaaacaacatagtgtttgatcaacacatgaagacgaaaccaaactagaactatattataccaatatttggacaatgttatattctaagcttgattgattcgtattatttatttattgagattggcatagtacagagcacaaaacaaattacctgatgggcccttaaaacttactaccctaaaaaaggagttatggtaggcattagccaattaacaaaatttgggggacaaaatttagtacacttaacacctgctctcattttgtttattattcatttcaaactttctgagcttaatgctatgtaaccttggaattacactaaataattctatattacaaatccaataagttcttaaatcaatggcttcaatataaattctccgaacaaccttatacaggattcagcgatgcgtgtacctgcagagcaatttcttactttaagggcatatggtgcacctccagtcatagtagcacttgcagcacaaggtgcttttcgtggattcatggatacaaagacaccgttgtttgccgtgggtaagataatttatgcaaactattagagcatgttttctgaaatcctgtctgatgcatacgatctgctatagtgattgcaagtgtagatatacatatttttgttgttaccatttgtcatctttttttaaagcaatagacatatttgacttcaaatgataagaaactaatagtatgatgaatacaggtgttggtagcctagtgaatgcattgctggatgccatatttatttttccacttggtctaggtgtaagtggtgctgcattggcaactgtgacttcagagtatgttgaactcatcataagactttacagaaaattgtcttttctttcatttggagcctcttcacttctttctttaatcagtattcataagcccctaaaggcctaaactatctgcataattttacatgtattcaggtacttgacagcatttatcctcctttggaagctgaacaacaaaattgttctgctctcatggaatatcattggtggagacgttgtccgctacctaaaatcaggttgtccaacatccctcatgttcatttgcaaatacattacaaatgatggttttgttttcttgtaagagagctttgatatacaatgaaccgataaaaaactatcaatcaattcaactcccttttttttttaaggcagatcaaatttcattgacctggctttgcaagaaagcctaagcaacaaacagagtcttatacagaaagggaaaaagcaaaaacaattcaactccatttagtactacctctattaaacaagtttcatcttgctgcaatatacctctatgttaacccctttcacatgaatcattctctaggtgcactgctaattgcaagaaccattgcggtagtcctgacattcacactgtcgacatccctggcagccagggaagggtctgttccaatggctggatatgagatatgtttgcaagtgtggttaacaatctctctgctcaatgatgcactagctcttgctggtcaggtgtgtacatttagaggatcatacctttagtttctaggctctaatattttacattggcctgtaaagtattcatgatacaatgcaggctctactcgcaagtgaatacgcaaaaggaaactacaagaaggcccgcgttgtcttatacagagttctccaggtatgaagacattatataatattatgttagcaaattcgtgactatcctcttctttttactcttgcaataagattctcacactgttttatatgtagattggaggcataactggtgtagcacttgctacaatcttgttccttgggtttggatatttgtccttgctgtttacagatgatccagcagttttagatgttgcccaaactggagtctgggtaatgactatcctgagaggtcaaacttgatttatcaagtgttatgcaatgatttttataataatggctgatgaatatttgcagtttgtcactgtttctcaaccgataaatgctgttgcttttgtggccgatgggctctactgtggtgtttctgactttgctttcgcggcgtactctacagttcagatttctattcttgtcatattccattgcattgttgtcagttctagctgcagcatcctaatcacataaatattttttctgtttcagttatttgctggagctgtctcatccgcagtactgcttgtggccgctcctaagtttggtcttggtggaatctgggctggccttgctctatttatgagtttgcgagcaattgctggtctgtggaggtagtaatggatgatttgctttgggtgtaggccaattatgttagaaaaactaatttgttgatttgagtgattttgtggttttcaggttagggagcaaaggtggaccatggaaaataatctggtctgaaactgagtaaacaaaaaagatagttatgtgtactcaattattcgactaatttcttacagtcaacatctaaaggcaagtacagaacggcaagcaagaaagcagatagctggtagtcattgtccaggacaagattttctttaggagatgacagggtagctcatgtggtgatttggttacaacttacaagtagatatacttgctgctgcctctagatagatagatatagatagatagatagatagatctctttggtgttgactggtataggaagttgattcgacttgtacagtgctgtgttatagtagaatggataccctgtcagtatacaagaaagctgaaagctcatagatacaaacacattcagagccatccgtccatgtaaataagtgaatcttttccttgggagaagcatatataagtgaattcttcctctctgtttatatttcttggaatgatgtttatgtactggggattttgccaaggatcggcagcatgaacatatatattgcgtaccttgccccaggcagaccacaaagatacacagcatgaacaggaaagctatgggcctatcgtatctggaggcccaataagctccaaggatagagccggagtgggaggcagggcagcagaggcgcagccgagcagaaagaacatcaggaaggagaggctgaggcctgagggagacgacgacgagggaatcaagggattcggaatcggaatcggagaaggaaagatgccttgcctcaacgtgtccaccaacgtgaacctcgacggagtggacacctccgccgtcctcgccgacgcatccaagaccgtcgccaccatcatcggcaagcccgaggccgtacgttcatcccttttcctcttcttctctacccatacccaccctaggtttaggcgtgcctctcctggtttcttcataaattttcgcttcttgtaggcgtgctcagttcctagcttgcgattatctctattaacctggcgtttttagtggattatcgctcgcttgtctggtgattcagtctgctcgagcatgattattagggtttaagtaataagtacccccatcggtcttcggcatgcaactgatgtaattgggattttgatccgtagtttagtatcaactatggtgatgttcatttggggatacaaccttaataggacgagggacagggagggagactggttgaggggatagacaagttccctattcttcttggatttccttcacaattcacatactttgtattactggtgcctgagtaaaccattatcgctcaaaataaatagtaaaccatttactctatgaaatctatgaacttgcagtattcctaagcttcatttggaatagtaaatcttcgcttcatttcgagtttggctgcaaaaatagtaaaccatttggaatacaaacttggtacttttgcagccaaaatttataaacttgccttttcttttcaacatcaaatcctcaccttttggatttttcagcaagtaataaatatttgcaaaaatagtatgccaagtctgttcatttggctgaaaaaaatacaaagtttaacaacatttggaatagtaaatcttcgcttcatttcgagtatgcctaggctgccaaaatttataaacttgcttttctttccacatcaaatccttcctcttttggattttttagcaaaaaattttaaaaaagactgttgcgcatactttcaatgtaatacatcagactatctgatatctttttcctggactgttgcttgttatgatcgtcatattgaaagatgaaatggacgaacaattttcataacagaaattggatgaaacagaactaatatagcattcctacaataaaagtaatgttcagttagtctaaactaaaatgcttataagccatgactttttcaaccacttactgaaaattttactttttccaagagtagatcgatttcatgtttttcattctaaataagtgttcttctgaaagctgtctattactagcgaatagttcttagagtgatacttgatgctgtatcagaaatagctatattgttactagtgaccagatagaggtaagatctgttgttagtggaccaaatgcgactgcagaaatggctagttttgctgttaatggactttcttttacttgaaatcaacattggttctctgattataatctgtgaatcatgatactcaatccgtcccgattgaaatgctattcgttgcaccatattgctatatagatttcagaattctatgattgcacaatgttagacctgtgctagcgacaaactgaaagttgacttccatcaattttctggtcttagcgtatgctgaagctattttgcatcgcctttattgtttagatactaattagattgcttaatgcttattcctcccacagtatgtgatggttgttctcaagggttcagtgcctatggcatttggaggtacccaggagcctgccgcttatggcgagctggtttccattggtgggctgaaccctgatgtcaacaagaagttgagtgctggcattgcctctatcctggagtcaaagctatccattcccaagggccgcttctacctcaagttctacgattccaaggtaagcaggccacatttcttattgactgttcatccatgggtcttcataaccatatagtcatgttctcattgcatctttgctgtttgttaggcccatcgtgcacaagaacatgctcaatgtttgcatgctttgcatcaagaatagatcagtgtaaatgggtcgtctgttgcttgtttaatgtcatcgtattggtttttgcagtttagtttctctctgcagtttggcagtaaacccttgccacagcacgtatactcttccatgctaattatgagcaactgagcactaataaaccccttttgattttctttttatgtagcgctcggactttggatggaacggcaccaccttttaggttaaactgtatgcctgtggcttcaagatgcatgaaacctaagaattcctaatatcttgttcattgcctattggaggacaatgcagtcgatgtatcagtttaatgtcaacaagagtcaccgtggaactggaaatatgcttctgaatgcggggcttttaactatttgccatgtttagatttggcaaataactatttgccacccctatctcaatgacatgtgggtccacatgtgtctatgacgtgtgggttcagcggcaaaaagttaattgccacatctaaatgtggcaaatggttaaatatcggtc

SEQ ID NO: 8871 - DNA, 27871 bp, Oryza sativa
tgctccgcgctgacgcctatcaggctcagctccgccaggtcggtgcggtagccggcgagcgccatgtagaccgggaggaagagcgcgatgaagaaggagtcgaggcgctccgtgagggtggcgccgatgggcatgccgccggggagcgcgaggcccagcatcatggggccgatcataaacttgaagccgatgacgtcggtgacgagcgcggagagcagcgcggcgatgacgacgaggacgaaggagccctcggagaggaggtccccgggcggggtgcgcttgcgggcgatgtagcggccggcggggcgggcgacgaagaagacgaagaggacgaaggcggcgaaggaggcgaggaccttggcggtgaagagcggggacttagcctgggtgatgaggaaggcggcggcgaagcaggcgcggaggaccaggaggtgacgtcggtgatgagggaggcgttgagggcgacgcggccgagctcggagttgaggaggtcgagctcggcgagggcgtcggcgacgacggggaaggaggagagggagaggcggacggcgagctcggtgatgagggaggagccgcggaggtcggcggggagggaggggctgagggcgtggaagacggggagggtgacggcgagggggacgagggagccggcgaggccgacggcgagggctcgggcggtggggcggcggaggagggtgaggtcggtcttgacggccatggagaagaggaagaggatgagggcgacgagggagacgctctcgaggatgtaggtgccgcgctcggagaagagggcggtgcggaggtgggggttgcggccgaggacggaggggccgaggaagatgccgacgagcatgtgggtcacgaagcggcactggccgaggcggcggaggacgtggtgggcggcggcggagaggatgaggatgatggagacctgcaccaggaggagcgggagggcgaagcgcagcggctcgtcgcccaggaacatcccctgcgagttcaccaggttgttgtcgtagcacgccgccaccaccggcttcaccgtcgacgcgtttgcacccgccatcgatcaaactaattaatgtccttcaattcaattattgttaatttaattgttggaatgaatgatctagccgccgcagaggaggagcattgcagcgtcagcgtgcatgagggagggaagccatgatcgatatgatggaggaggtgtgtggtgtggaaggtgcagagagaagaggatggctgtttttagttgtgcggatgagagggcaatgcaaatagagagatcgacgttgcatgcaaatatgcgatgcaactgaggaccgccattgttggttggaacttggaagaagaggaaaggacgagctaaccaagcaaaggtggaagtcaacaactgggcccagcagtcaaccatcatcgtgtgcacgccaactaggatggatagatgggccacatgtattccatcgggcaataatcgtcggccgcatgttcattccggcccaactaataagggcccgcatgtacgtgacaattccattcggcccaactatatcagtacgccacaatcccgttacatctctaaaattcagaggctcacctggaatagtatttggtttccagtcagtggtgagttggactgcaattgggcatagaacagcacacggatcacccaaatttgcaatcatcaggtgatcaccttacgcaaaagcatagcaatgggaaaacagggcaattcaagggttcgagagttttgtatttatccctacaaactataactatatatgacatacgcacaaaatttggcaagttcaatgttcaatgtcttgcatgctatgatttcagaatcttagttttaggtagagatggtgtagttctactatatggacaagactcttgccggtgcaaaaatagttgaaagattctgtaatcgtagtactaatacatgtgtaacgacagtgacagcggttgtgccactacaaatgcaaccaattcaagaatgttgcctcagctcctcgtccacatcctcaaatgtcttgacatacatgttctttcaggtggataacaattgcttctcattgttagaagtataatatggtagttagagataagagtcaaatacaaattatagagataagatatatcctagagatagaatcctagagataagatagagtcctagagatagaatcctagagataaatctactcttatttgtattgtactccaagtctctatcccctatgtactcctatatataccccatgagagggtcgatccaatatatcagaaaataccaaaatacaacgtattagattttctacatggtatcagagccgtagacaaacgtcgatcgatcctcggttccagctaggttccatccgcgctgccccagggagatgagatcaatttctccctggggcaccgcaccgcattagctagctagcctctccaatcatttacagattagtttaccgcatatcattagatgcgttttctaataattagttttagatctattagctagccacagaaaaccatatgatcgtcaggagcaatgcggcaggtgttacaggagcagacaacgtcaacaagcatcataccatccggcctcatccatggatcgatctgcatcgcctacttcacaagaagcaagggcctgatgctgttcgtcgccaacatgtgcacacgcctgtgctgcacacctgcatcaagacaccggccgatcatctgcgacgtcttcgcggagtccaagtcaagtcgccgagctctccaggacgatcgtcttcgccgattctacatcatttcatcaacttgccgctgccgactcgtctacatagatggacacctcgcatcctctgacagattaatctgcaagacgcttcatcgacgacatcgaccgtgtcctctacgacggcaacgaccgcgtcaccgacaacggcatcgatcacgtcatgtacgactacaacgactgcatcaacccggcatcactattgtgatgaccgctatacggcgcagaaggaccaaccaaagtggtggcctcatcgccaacgacgtcctctgacatatgcaagacgtccccaatggcatcctctgacatctacaaggtgcaagatgctaacaattacagtttttgtcttcacaccatggcgtaaatatttttttttcgccttcggctatatgcggctacaccgacaaccacagctacttcatgatcggctacatcgacgaacgtctacaacaaaaatcattgacggaaactccagtccaagcgtccgtgtcatcgctatcgtccatgacactcccgctatgactgcgggagggaataaaggagagtcaagggacgacacagaaggggacgcaggcaccaggtggaggaccgtccatcagagatgcagtcgatgatggtgagtcaaagaaagatgaagaaatagaagatttcaaatccagtcgcaatcgttcacttcgctcccgttacgactgagggggaatgttagaagtataatatggtagttagagataagagtcaaatacaaattatagagataagatatatcctagagatagaatcctagagataagatagagtcctagagatagaatcctagagataaatctactcttatttgtattgtactccaagtctttatcccctatgtactcctatatataccccatgagagggtcgatccaatataacagaaaataccaaaatacaacgtattagattttctacactcatcgcttgtatcactgaatgaggtgcagtcttatttgtccatggaatccttatcactgttattggaaggatcttgttcagttttcagtgtcaaggaggaggattgtttcaacagaagggccttgcgaacatggcgaaacaactttccttcaaagattcaagattttgttatagtaaagatatatcaagtgaattgtgcatatcaacaggaaaaagggaaatgtacttgcattggaggtgcaagctatagacattcaggcacagtcaaaataaataaaggttattatagaaatgcaggtacaattcaggttgcagaatttcaacttcagcaaaagcagagatgaatctagcgtatggtgctcaaatcatgttcataattcagcttgtagtaatcaaacaaagccccttaatagcattagcctattcctccatggcaatcttcagtttgtatacataatagtagtacaaaaatgagagacatgttgtcagatgtaattttcatacctttcgcaccaaaactgcaagcattatcaaaatggaaggagcattttgcacttggggtaaattagtagaacgtattgagccatggcaagagaaaccttgtgaaagaaggtcaaccatcaggttccaatttcattagcaacaataattcacagagttcgttaatgggctagcttacatgctagccataatagtctttacagaatccaagattctgtagtagtgatagaatagtgctgagtgcttgccctccaagccatcacggtggtatctgttgctaccagcgaggttgttgcacgggctgcccccgatcaccaggtcaaagccaccaaatcttctgatgaatagttcaattctttcagcagtaagattttgaacatctgcgatttcaatcagcgtgccagtttgggtctggtcccaccaactcctcagcaacgtcatgtttacctctgatatttcgactaagaccactgtcttcatacagattccaagcctgtggagagctacttctgctccaccaataccagaaaacaaggacaagacgttcatgccattagggaatatgtccctcagcacagagaggtggtaggcaactgtatcaacttggaatgaattcccaagagctctatatctcgctgtcctgctaactcccctggtataattcctatgttagaatttcaatggttactctcattgagaagaggatggcactcgagatggggcaattttctggttttcttcattcacaaaacacaaaagccatacctacccgagagaggttggatacatatatatagccatagctggctactagcctattgctgcaccctcctagtctaaaattcgaaatttgaatgggatgctgtcctagagggcatccaaactgaataaagcataaaggaggcataaaggagatgctaactgctgctgtcctactaaccgtagctgtcctagcaactgaaaaatatgctaaagggtagatgctgtcctgaaaaggtgaaactacccaaaagcaaaaagaagaatcacgaccaaggaccacaaagacttatccaacatcctagggtatcccaataggaattccatctcatcaggctctagagtagcaaccttgttctttccaacctagacaaggttccacttcctacattcttccaagacactcttctgaactgctggaggtagtgcatcgccgaatctaccaagagcacatcgtatccgttctgtatgctttgcgcttgccacacaagtttgcaagcagttgaactgccttcttggatcccaaaagggccaccacatcttagtagaaggaaaggcttcagatattgtctttgggggaatgggaagaacaggtgacctgttcttaatcggcaagttatggatgtaacccctcttcctagcagcagcacagaagtatttggaatatacgaactcaggataaatgtcatacaagaatcttgagatggtcgtccatacaccttttggagctagggccacgttttcatagtaaaagaatggtggtccaagagcctggtcaggaaggtttctgtggactgaccttaacccgtcattgggcaagctgaatcccaccattgaatttggaagaggcattggctcttcatggctgccgtcaaatggcacttgattccattgtggtctacttctataccgttctctttttttcttgcttccatctattaattttgttttctttcttcctccaaaggaactaaactctgtatcctgcacaaaaataaacattatgccagtggcattacattaaagaaatgaaaacaatttcaccattcagatgctctataatcacaaggtacccatacttcatagtcagataagtttgtaaaacaaacatttcctgcagtcgctggtgcatagattgactcaaccaacaaatctacagacgcatccagacctgccaaattttaacccagcataggcagtataaggctccttactgtcaaagcagcaacttcaatagaggtataccgcatctaataatagccctcattacttcatcttcaggaaaacccatgctgactaaggacttgattttctcatctttctcggacatctcttgtaaaaagtcctgcaacaaagcacattacaagcagactgaaaacatttgctacatctcactcatgaattgcagtctgaaatagcctcccaacaaagcaactaatgcaggcatcacatatatgcatgtacacccaaatttactgcaacaaaatatacgattatccttctgtgtcaaatttgttgttgcgtcttacaactccatgcaaacagatactaccatactatagaggaacttattttgaggattaaagttagaggaaactcatactaaagatgtaatgaaaaagtagtaaaactatttaaaaaatggtgaaacaataaagcatgttagaccacaaaaaggagggggagtacagcttatcaatcatcaacacatggataaatgcccagcacagattacctaagctctcataggcatcatttcagttccattttttgttgtctattatgttttcagatgtagccagtggttatcattgttctgtctggtggtcttaacttgcaaccattcaattataggcattcagtagactatctttcatcattgcttggtttgaatacgaccttgtagaagtatatgatcatctctttgatggttctgtagtagttctgctatctctctcactataaaggcaccatacaaaaatgccagctaaagaaacatagaagcaagagcaggatcaacaaagatcctttaacaaccctataggaacaggtattgttttatagataacccaaaaaactacagcattgcagtacaggtaagcatgtacacttgtttactaaataaaagtgaagcataacttaagtcacaaaaccttccaatttattggaccaagaccaatagataatttagacaagcactaaaagggaatgtgtgcttggcatgaaacaagtgtaacaaaggttcgatcatgtctgatataaatatataatgaccaaggagggagtcatgtgaatacctcatcaccagaaccatcagagtaagtagccctatcaaaattgtcaacagtatcatcctcgtcccaattaacatcctcctcctcatcttcttcttcaagaatctgggggtcacaggcagaatgagagctgttacccactgaagggtcactgcctatcgcctgcattacagtgttacgtaacatgacttgtacaatagagcattagataataaacaaagtgatgcaaccacgtgagcaaatacctgataagtgagaagtaactcaagaatttgctccgaatctgtgtcccctgaaagaaacggcaacagttgaaacaaaagatgcaaaatgcaacctaagcaaatgaggaaatgtattattgttatcattaccaatctccttgatagctctgaagaccatctctctcgagaaacccattcccaaaaagtaagcaaccaaagctgatggtgctgatccattggccttcccattagcatcctttagacaaacaccatattatgattataattatagtaaggtaatatcatggttaaaacaaatgaccagctcgtgtgtgttcaactagacttatatctccaacttgcagcctgggtctcgtggacggaccaggcgcatccgtgttcgaaaaggctggagcaaacgtggcctcagactcaccatcagtatcccactcgaactcgctatcctcatcgctgtcgctagcctagtcctgtaacataagttaagcacctcaccccaaatatctcgactaccagtggaaataaggcaatttcagaggaaaggaaaaaaatagcgaaagattgaatcgggtttaatgtagcatcttgtgtaaggcatactgccagtgccaccccaatatcacatagcctcatcaaatcacaagggaaaaaatattatgcttctccgcatgcggttcgcaatatatccacgcgatatcatgaatcaaattcacaagcacgacatcagccatcacagtaagagataattttaggatcagaatgcagatcatccttgtgcgattgaataaagggtaaaccagaagcccctccaacccaattccagtcggaaaccctatgcacgaacaaatcgtgcacagatggagcaatacacgaacaacagcagcagcagaagcgcatcgcctgcacgcggcagcgggaaccattgggtgtggccaaactgatgtcatggatggaggaaggagaggagaggagaggagagaagaggagggagggagctcttaccaccattgtagaaggtccgcgaagcgcctcaggcaataacctctcgctgctccaccgcgtgctggcctccctctcctccgccgatggccggcctagatgcggtggcaaggaagcgcgcggcggaagaggaggagaggtcggtgatggtcggacgtcgtcgcctccgctccccttggcttgtcttgtcgacgactaccagagaagacgggccgcacgtatctagcattcccgttacggcccaacaataatatgggcctcaagctagccattaatcccgttgcggcccaggaggaagggaatgaggcgccaacgatctactggttggtattcatgccatagaggaaaaagtacaccgaaggtccctcaacttgtcatcgaattacaaaatcatcctccaaccacaaaactagatataagacatccctcaacttacaaaatcgttcactttatgtccttcggtggttttgatcccagtttcgtccgatgtggcggctgagtcagcgtgggacccacgtgggtctcacatgtcagggtgtacagtcagcacctctcccttcccccttctcccccttcctcttctctctctatttctctctctctctctctctctctctctctttcccctctgcaggatgctcggcgggtggggagctcgtcggggcgaggtgggagaggacatccggcgggccggcgatgcggcggcggcggcggcatcgttgacgatacgggagaagggagagcgtcaccggctcaccgcgcgtgcgacctcggggtcaggccgctagagaggcccgagcggtggcggcgaggacgccaaggcgcgggactccgggtggcggcggcggcatacgacgcgctgccggcgccggtttgggaccaattagaggagcagagaagagtagggccaggccgtcatctcccgacaacggcggcgaggcaaaggaagggcggcgcggcgaggagggagcgtggtgctgcgggaggccatggcgggactcccggagcacggcgacagccgcgtgaggtacagcaacgcgtgacggcgggcaagcgagggcggcgaaggcgagcccgcagcggcggtggctagggaagcagcggagacacggttgaggagtggacagcgacgagcgggagcaggccgacggcggcaagggagttgggcgagcgcggtggcggagaggcagcggcagcagcaggcgagcgcggctgcggatggggagcggcggcgccgacgactccgcgccgctcggtctcattgtcgtcggcggcttcgggtgggggcgccgcgccgccggcttcttgtcgctcgtccgcggcgggggtgccgcgccgccggcttctcgtcgcttgccacggcgctggaacgggggaggacggccggagaggcggctcgttggggacaggctcgcggaagagcaatggccggaaggacaacagcagcggcggcggcgacaacgcgtcggccggccaactccctcctcgccgcctccatccccacttccctcccgctgtcgccatctccgtcttccgctcctccctcgccccggatgggagtttcgtcggagcggcgtcctcctcctccacctcgccaccgccattccctccagctcccccttcgctctacccctgtggtcccgccaccgacgcccctccccgctcgcgtgcgccgacctcgtcgaccagggtgacttcaacggggcacgccacgacgggacaccgtgctcgccgccgccgacctcgtcgagcggggtgacttcgacagggacaagagaggccgtggcgacgcccgaccgcggcgtgctcctctgcaccggcgaccgcgcccgcgcctgccgcaccgtcctgccacaccgccctggctgctcttcgccggccaccgcccatggagagggaaggagagaggaagtgagttgatggggagggtaagaagtggtgacatggatagtctgacatgtgggtcccacgcagactcagccgccacgtcggacaataccggagtcaaacccaccgaaggatctaaattgaagggttttgtaacttgagggatgtcatatatctggttttgtggttgggggacgattttgtaactcgatgacaagttgagggaccttcggtgcactttttcctgccatcgacggaatgaaaactcgaaatcttgtccattataaaagaagaactgactacgggtgaaacttgaattaaggggctgtttgggcagaacgatggagtactttcaataatctaccaacactaattaagaatctgtctatctgtatataattctctcccgatctgtttgcctgaattttcagtgcatgggctcctctttctctgctcccagatcagatgaactgaaattgaaatggagtttaatccattccagataatcatcaatcatatatgtccatttaatttgttgatagcgtactccattaaggaaggaagaatcacaataaataaatcaaacaaaggccaccacatccaacagctaggcaatcattttcagctactacaagagagggaggatagcagcagcagtatcggtccctattccgtcaactcaacaacctgaatgcgacatacgtttacgtcaatcaacttctaaagcgtctccctaatttttgccatttaaagcatgtaatcaaaccctctggattacgttttccggcaacgaaagcgactgttatcaatcaatcaatcaatcctcgcctcgtcgtcttcctccagcgacgtcgaccgccgccgccagctcagcacggcgcccatccgcggcagcctcaccaccgagttcacccgagccaccccctccagagctctccatacattcgtcccctcctccgcctcgccgccgccgccgcccaggacctttcggaagctgcccgtgaacgacacggcctgaggaggtttcgcgtccccgggggtgctctccgacgacgacggtgaaggcttcaagaagaggcacaccacggcgcagtcgtcgaccatcgacgtcgggaacttgcgccgccacgtgcgcaccgcccgctcgacgagctgcttggcggccttggaatggtcagtagccgacgatacgatcttgatcacctccttgttcgacagcacgtcccatatctgcacccacaacaatttgattggttgcattatctgaaaaacaacctctatccgctattctgatttataaattccctgtggatgaaattttgattggttgcattatctttaaaaaaacaatttgattgattgattgaggcaaaagcattcatgattcagttaactttcgcttttctggctgcaaccatatggctttgcactattaattttgtgctcatttcatatctagtactggaactggagtagcagtgaaacaaccaagagaaaagtgttactcttgattatgaaaagatggtgagtaaatgaaactgaatttggctgccatcatcaggcaaaagtctttctgtttgcttaccccgtcagtagcaagtaccaagaagtcatcttttgcagatagcttcctgtagtagacttctggtgtacagattagtccatgactcttcaagcagaaatctccaaatgcccttgccatggcgaggcccggcgcgtcttggtctggtagccacatcctaggcacgtccggctcatcgtccatggcgaaaacccgccccttggaattcaggattctctcagcttcgcctgtcagaagcccccatatgaatgacaagtgaatgtctgaatttagacatctctgtactttgagaaattcagaggcttacttggaagatttggtttcaggtcagtggttagttggactgaaattgggcggtccttgctgtctcgggtgcaaagaaccgcacgtgaatcgcccaaatttgcaatgatcaggtgatcaccctgtgcataagaatagtatttgggaatttaatcagaatgattacgagtttgagagttctgtatttaggcacaagtatagctgtaacatacgcataaaattcggcaagtttctttgttgcatctgatggtttcagaagcttgttttttaggcagaaacggtgtatttctagtgcataggcaagactattggcaatacaaaaaaatgttgcaagtttgcatagttgtagcactagtacctgcctaacgacagtgacagcagttgtgccactacaaatgcagtcaattccagaatgttgcctcagatcctcatcaacatcctcaaatgtcttgacaaatatgttcttccaggtggataacaattgcttctcattgcttgtatcgctcaatgaggtgcaatctgacttttccaaggtttccttatctgtgttgctggatggatcttgttcagtcttcagtgccaaagaggaggatagtttcactggaaggacgtcgcggacatggcgagcaacttcccttccgagagggccatgcccatcaaaaactccacaaaatatctggcccttgtgccccgcaaagtcctaatgaacttgacacaggtagcacatcaagacctagattatcttatatatattaagtaaaatgtgcacatcaaggggaaaagggaaatgtactatcattggaggtgcaagctagagaggatcaggtacggttgaagtaaatattacagaaatgtaggtacatttatcagtttcagcaaaagcagagatgaatctagtgcccggtgctcaaatcatgttctgaattcagcttgtagtatctaatcaaagccccttactagcactacccttttccctccatggctagctttagcttgtgtacatatatcacaaagatgagggaatttgcagagacaagaagctaagcagcactgaacaaacatgcaagagcaagcaatcaggtctagttgaagatttgaagtaaatacaggctattacagaaatgcaggtacagctcaggctacaaaaaaaatcagtttcagcagagcatggatgaatctactagtgtatggtgctcaaagtcaaatcatgtcctgaattgaagttgtagtaggcaaacaaagcccctttctagactagcattaccccattcctccatggctagagactcagcttgtgtagtactagtacatgatactagtatcaaaatgagagaagaatctgtacatacaagcaaaggaggactgggaaaaacatggaagcaatgaggcagcaatgtgatgagcaagcaatccaatgcaagagagatgtggttacctggcaggtagtcatggcgtcctggttggcgcccttccagccttgcttggtgtgcatggagacgccagcgctccaaagctggtcgtggaagaaggcgtcgtgcttccatggaaatccctcctcctcaagctcctccttccccttgctgcagcatatccccattgcttctgctgctgctgatgctcccctaggaaggaaggaaggaaggagggggtagagagagtagaatggagttgaatgcgtaggggtggttgaagtagttttgttgttttatcattgatggtgatgttgggcatcaggcaccccatccatcggccattaatggcgacggatgtgcatcgatgatggccaggccggctgtctatcgtcttggtgactcgccgcgtcggccatacaacgaaccacctcactactggagtaacatgcatgcctgtcgtacaggtaaggtaaggttggagcatttcgtccttcatgactgaaaatttcaggacaacatcttactactaccatcttttatgttgatcgactaccagtgtatatgtgtactagtctactatactgcagatgaaactacacagtaaaactgaaaggaaggaaatgacagtgcaaatgcaatgcagtgttgtaaaaggatacgaggttttctctgaagatgaagtgagctgtatctgaattctgatccatcgatggaggcgtggagaagtacgtggagatggagggatccctgtgcacaacggcgatgatggatagtagagtatacaggagtatacagtagttgcggatggacggaagttgctcattattacaactgttggttgggttgggacgttggttgcttgcaattagagtatttatttattttctcagctccagaatcaactgctgaatcgcctacctgcatgcatctgcagttttgcattgcgctgcgcaccatccatcctcctccgcttcagtcttcaatgctttacaccgtgcctacctgttgttgatgttccctcctctcacatatttcagttgtaacatcgacttgtgacttgcatttttatgacaattgccctcacctatttccccggtccttggagacaattgcccaacaccagcaaaagttaaatagtgataagcatttttatgcattggaccatgcatggaaccttactgtgtaaatgactccatctttctgctgggagagatgaactggagtagcaacaaccaacaagaacccgtgcagtccgggcatgcctgacaaaaccgcccgctaccatgtctcagctctcaactagctagcattcagaccttcgcagaaaaccaatatagtgttcagtgcctttattcaggcaaggaagctatgagacctcattccagataacactccacataaaacactaggagatggaacaaccaaattatagtgagaatgcaatgttccattccattaatcaaattgtgcatcaaaaaggcacagcaaggcatatcacatactccgcactacttacaacatgctttaccccaatgatctctctttgattgttgattcctacctgcgctatatacaacacagcaagaatataacctccctcgcctccactggcatacaagcaaaataccagtactagtatgttgttctgacaatactaccgtcagcaattcaatacactattcagccagttatggcacaaaacttttggagctcattctctaggactggagatattgctctagataaattcaacaccacaaaacacgccccagtttccacaacgtttatctttgaaacatttcactgtacaagcaaatcctgcgactgctgcttccatacatcacacggttctaccgcaacctgccaagaccacacctgttattagacactgctttctaataaactgcataccagttaatgaacatggccaaaacgcaagggtgaactattttgcacttcaattcttctacacaagtaaaccgactagcatcttactttgtataaccagaaaagaaatatagtagaatacctggtagggtttattaatccactggaaaagacaaccacgggcttcaacaactttgagcatatgtgatggcaccatggatttgaatgcttcatgaagcttcacttttctcaaaccacagaccataagagcagctatcagtccattaggcgtaacacccgctaaatgcacaatggtcatgttctgcaagccacatatgcttgaaagggatataagcccaatgtcggtgaccgaacaatatgacaagtttatctgcagtgatgaggagatgttattaagacaattggaagcacggtattgcgattatttcttttacagcagaatgggctaatacctgccggaggttgtgagagaattgggaaaggaaaatcattcccatgtcattgatctcaaagcatttcttgatatcaagcttagaaagtagcctgcatcctgtggcaatttccgagagaccagcagatgaaaccatggggcagccacgaatctccaatgtgttcagctttatgcattttgaaagtgatctcagtgaacagtctgttaattttgtgcagtaggacaaattgatagactctaacattgggcatccttgagctatatgagtaaccccttcatcactgatcgccccagacctgaaagagaggctattagttagtcttggctcctatcacggaaggaaaggaaatcaaatatgcaatgtgtagggaataacctgtacaaatcgatatctcggagatctggacaggacttgctaacgtgtctaaggccctcatcagttatcctcaagcatatgccaatttttaggcttgaaagtttgctgcatccagagagagctttcaaaccttcatcatccaaatcagtgtcagtaagatccaattcctccaagtgagtgcagcgccttccaatcagctgtagtcctttgctggaaacaaggctacaggactccattctcagagagatgagggaggggcatgaggttgtgatggcagctaatgaaacatcagtgattttgcgacaacaagtaacatccagcttcagcaaatttttcagtcttggcacgacaaaagaaagatctgtgtctgtcactccagaacatttgctcagacttaactccctcaaagaaacacaggatttcccaatggattttaatccatcatccatgaattggcaaccatccagcttcagtgtctgcaatttatgaatcatttcgaagctgcttgacatagaaggagtaacctgccacaagaaaagtgtagataaactgagctcaagttatgtccaattgttcaggtgataaaactagacagtgggctacttacaggagagcagtatgatagattgagttccaacagattcggcattgccttcacaatggacagaacaccgacatgagtgacattgtaataatttgacatatcaagaacctgaaagagtacagatataatttcagctctcagttaccagaaattgtgatactcttattgttgaaggctaacaatgatttagtccaaattgtttcagttgcaatatccatatagcctgaattgaaatgtaccaaacaatatacgaggtatatacatgttagtatccctacaacattagcattgcaaacctactttacatgagaagctaactgaatatactcagagcagaagacgataaacaaggatattaatcagatttaaatttagctagcacaatgctcacagtgaaaaagataggggttgatgattacctgtagtgatttgctgcattcttgatcaagactagtaagggcatcatcatcaattccattacatcccaccagtagtaacacttgtagactttgtagcttcatgatggctggaaagcatttttttacaatctgcacaacaattttttcttagtctgatgagtgtgatctaaactgcagggcaaataattaacctataaccaaaaaatgatgataaaacaaatcaacgggagaagtagttactactggttctgacaattgaaaaggtgaggcaaatatcattttgggtatagataagagcatctgcagatcaagaatagtccaatttccaaagcgcttctgtcatcataggctaatgttattttgtgggcaatattcatgtcaggtgcagagaaccggcagattcacaaacaagaacaagaaaaaaaaaaccactaaattaagtttcctaaaaaaaaaacctgaccttgaaatcaagaagcgaatggaaggggaaaagggagttcttttttccctttctgtcgtctaggtacaataagaaatacagtaaatgaaatggaacagagagatgaagaggcaaggcacaagtaccatggtgtaggagagatccaggatgttgagcttgttgcacttgagggcgaggaggtctagtccgagatgagtgaccccgatgcaccacttgagcgagagctcgcgcaggtcggggcatccgacggcgatgcatccgagccccatgtcagtgatgcgcttgcatcgcgacagcgagagcctctgcaggcggcgcgccttggccacctccgccgccgcggcatccccgaggtcgaggccattggagaggtcgaggtccgtgagattggggcacgcggcgacgagcgcggcgaggccggcggcgccgaacccccgggagcgggagaggtcgacggcggagacggacggcgcggcggggagcgcggcgagggcggcgtcggggaggcgcgggcagagggagagatcgaggcgggagagggcggggtagcgggcgagcgcggcggggaggaggtcggggcggaaggggcggagtacgcggcggtggcgcgactcggcggcgtggcaggcgcgggagacgagggagaaggacttgagggcgcgggggtcatgggcggcggcacggtcgaggatgaggaagaggagctcgtcggcgaggtcgttgaggtgcgggggcggggagaggtcgaggcggcggcgcttgacgcggtgggtaggcgttggcataggcgaggccatggcgaggttgactgcaacaagaagaagggaagggaaggtagtaataatggtgggcgtttggcgcggcgcatgtggagaaggagaagaagggaggaagaaacgaaacaagggggagatgagatgacgagagtgccccggcggcgcctcgatctgggtgaggagaggtcaccagctgggttaccgtatttgcccctcgtccaagtacaagcatggctggcaaaggacggtaatatacgtggtcatgtgggggtggaatggtaaatgtggggaagggacggtaatgtacggagagagtacagggtggggtagaagtggaaagcgaaggcgagtggagagagtcaagtggggagggggcgatgcgggggaggagagatagaaaaggatcaaaggacgaacggaacggatcgtacagcttgtgagtgcggactcgtacgaaatcacacaactactccttctacccatggaatcttttcaccctacccaccgacgcatgggccctcctcgtattcagctcttcgcgggtaacggaaaaagcgtgagaaaagatagtagatgttggaagtggaagaggacgcgctgcacttgggggagttgttgactggtcccgtgcaccccggggacggctcggcttgggtgaaggaagggagtcgccattgcactcaatccgtgggttctgcatctactttctgtttgcataacgttttccttctcattttctttttctgcttgcacgcacacgttatatgcaaaaagatttaaaaatataccttttttccctgaatttacattaatatatgacttctaattagcgtgcacaaatataccatgttgtcttcagcatagcggggactattgcttgagaacgcgagggtcagtttaaagacggcatcatataactcagcaaacttgtgagctactacctccgtttcaggttataagacgttttaattttggtcaaagtcaaattattttaagtttgattaagtttgtagaaaaaagaatattttcaactcaagaaaaatttattatgaaaatatatttaattattgatttaatgaagctaatttggtgttacaaatattattatatttatctataaacttagtcaaacttgaagtagtttaatagtcaaaacatcttatagcctgaaacggatggagtactttgctgcatttgagttggcaaatgccgagccaacataataaaccagtgtaataatgtaattaaatccacctacctttctgtataattgtgatcatatttgattgacgacatcatgcgccagcatccagacgagttcaagcagatgggatgcaaagtcgatgatgtcctcggactgacccgaacgagtgcatgcagacatggtgcgagctcgtgaccacacggcccagtttacatagaaaatatgccatctcgcggccctataaaattacttcgcttcatgcctgtgcgaattcttgcaattttgtggtgtccacatctgatcttattgaccatggctatagttcgcaaggtttcagcgcgaactagttgagtgttcgcatgtcgttctcgtgacgatgatttgttattgtgaaaattttcagcatttgtatacttcaaaaaatgatataattatataattattatactttcaaaaatttgtatacttccaaaaatgatgatttgatatataattatttttccacattacatacatcatcgaacacatacagatacagtcacagttagatagtggtacataagtagtcacatgtaacatattgcgtacaacggtttttactttttaacctttacaagagcatgatcggtgccatgctcatacattacaacaggaccatatgagaataggttgcatgagcccatagaccgaaacaatctgaccggtatttttgaaccgatttttttccttttaaccaatagtttgatttttctttgttttttttgaggatgggtggttatgcgagtgatgtgagggagagggaacatgtcgtctgcgattttatagtagtagagatgtactcgtgttgttcaaccgcggtatcatgccgttgccaatcatattttgtgtaatatatatgtatgtactccctctgtcaaaaaaggcaacctagtattaggatgtgacacatcctagtacaacaaatctggatatagagaggatgtgatatatcctagtacaacaaatctggacatagagaggacgtgtcacatcttagtagttgtttttttttgacagaggggttatagggatgaaagtatatcaaattatgtttgatttgtttcaaatctaatcaggttgatgatatagtaaaagaattctaaaagccaacatattagtttttcttttgaaataaaagcatattaggtatttgtctctccacttcgatagaaagcatgaatgagacacacaaggaataagctatctgtccatcatgcaggcagccactagcttgagcatatctacaaaagtgataactcgtatcttggtatgtatgctcatacctaaaaccaaccatccattttagctcatgtctctggagtagtgctccatttataggctatttaatcaaattaatattaagggccattttttagacttagatttattggcttaagattttaagttagtttttttctcatatgatttataagccagtaaatttaaaatcataagttttaaagtggagtcatacctctaactcacataagaaaaaaaaagttttctatactaatttttggcttaatagtgtaatagtaacttatgactttaaaaaacaaacgaaaaatatgtttgtttgtttaaacttagactttctgactcattaactagcttatataaccctaaataaaaagggcgtaagattaaagagaaatgttctctgcttttgataccttattgatgaaattttagattttgaattgcttggattccttctaagcgtctgattggatgaaaatatttaaatttgttagaatcagtgtatcaaaaatgtttatattgcacataaaatttatacctaaaaatgcttatgtttggaaacagagaagcaaatgaaattatgaatgcagtgatgacgtggcacgagcaattgaagccaaaaggctatcgaaaagcagtagcaattagcaaaaggtgaaagcatatatctggccagccgttcatgcatgtggagagatggaaaaaaaactgaataataaaaagcaggttaggtcggtcggtctgagtggcacgccgtacctagaaaggacagaattcagttccgttccgttccgtttggtactggaacatgaactagctagatcctctcctcctcagtacatacctgtcctgataagcactcgctccaaaccaccactccagactccactatgtacacccaaaatcttgaaagaaaaggcgcttcaagtacaggagtaggcaccagctgattgcttatctttatctgctcgcatttccagtaaaaattcctccttgtccgttctcttcttgggaaggcttcttctacaccgtactctaacctgcaattgttttgattctacaaaagttaagggcccctttgaatcgtagggtagaaaaaacagagaaataggaaaaatatagaattctgacaggaattgaagtgtaaaacagaggattgcaaaacacaagaaaaacacaggaatggtcgtttgattggagcgcaggaaaaacgcaggaatcgaatgagagagatagactcaaagaaaattttccaagaggttgaagctcttgctaaatttcctccaaaatccacatgcaatgtgccattccataggaattccataggatttggaaagcttccatcctttgaatcaaagggccaaataggaaaatttcctataggatttgaatcctatgaaattcctatatgaatcctttgattcaaagggccctaaggctgtgttagttgcttggggttaggagctaatccctcacacacgtaaaacgagatgactcatttgtgcatgattaattaaatattagtttttttgaaaaaaataaattaatatgattttttaaagtagcttccgtatagatttttttttaaaaaaatacaccgtttaatattttgaaaaacatgcacgagaaaaaacgaggaaggtaagttgagaactttatcaaaatttattaaaagacgtgggccaactataaatataggatatcaatatatttatatgaaaatataactatctgttcgtaatatctagggacacaaggttcctcaccaaaattttgagaaaatgtgcaactaggggtaactccaactgggacatgattattgcagttgctttcatatatactactcctccagttgatgctaccttagtaaatgacgattgattaaatagtggcgtaccacgcgcacacagatcgttagtagtacagtactgttccgtgcaacatgatgcctcccccagtaaactaagggcacccacaatggttatctataggctctctataagagatccatgtcagcatattttcctacttggaagagattaaatgaagagagagaacaaagttatctactaatctggagatagtctatagagaaaaacgaggcaatgtattagagagctattgatacccatgtagacatactattgagatgatttactattaatctagtctattgctgagatgtacatgttttatagatagcaccttactttaccattgcggatgctcttaggctgcgttctggcaatactgctgctgcaatgcgctattatcatgacaaaataacgtcattgttaaccaagcatgaaagctggacttaaataatataattgccggtgcatgtgttcatccggccgtacgaaccaatgtacgtatatatgtatacaaggtaattatgccataattagctgcatgttggcggaatgagtcgccagtttgaagcggcacatatatatactccagaacttaattagttggctgatttatgcaagaagacgtacataaagttagttgaaagagaaagggtaagagtacatggcatatatatgttgctttcttgttgagctagatgctgacatcatgcaagtatattgacttttcatgtgttgatccatatcatcattcatgccgtacgtacgaacgtgctacggcgttgaaccgggatcatctatcggatagataattccaattccaagttaattatagttgacattttctatgagctggagcagtttggagtactagtcaactttggctgccatccgtacattatatttgtaggtggagtagcaaaccggcggcactcgagtaaatttgcatcttaaaacgatacgcattgtatgtaaattaaaatggagtactcatttgctccctccatccacaaaggttattccctgatcggatggcaaatgctttggctgatcagctatttaagcaaaataagctaactaatttgcattgaagtttggctgaattggagacagctttggctgatcagccaaagtatttggccaaccgatgaggctgttagatatggtatatttcacatttaagttttttcaaataagttgtttatatttgttttttatacatttaaaacttataaatgaagagataaattaaatgtttgattagaacccaaggagtcatcttagagtaagtttaatagtatagccaactactagctccaaatcatctatagccaatgtaatagctaattcatacaatagttgcttactaaactattaatatctggtcccacctttcatacacacattacatcttagagtccgtgctgtatttggctgcagatctatagcccgctgctcttctctctcttctgttatctctttaaaatatgtttatagctagcttatagcctactattgtacctgctctaaatactcattggttgcatatttacattcactccttgattttgtaatatctaagatgatttaaatttctctttgatcttgatgacaaaagtaataggtataaattttgtggatagaggaagtaattaagaagaggaagtgatcagctggttaattaattggcacatgccaggatgtaaaaagaaagctagtggcttgcagcaaggagttaatagggcctcattttttcaagaataagttcaccggaggtccctcaacttaacagcgagatttctttgaggtcttttaactacgaaaccagaaatgtatatcccaaaactcacacaatccgtgcataaaaggtcccaaagcagtatatatgggtggttttgctgacgtggcatcctagtcagcaaaataaaatttaaaaaaagtacatgggcccacatgtcagctgcacatatatttcttttctcttttcttctcctctcttctctcttctcacttctcttcttcaggccagcggcgggcgagctcggcggcggcaaggaggctggcacgacgacgtcgcgcgtcaccgatatgcacacggttatggcgtcgacaagctcgtcggctggcgcggccttcccgtggcagaccgggcacgaggcgtgggacgagagccacatgtcgatgcactcctagtggaacacatgcccgcacgccaggagctgcctcacctcctcctcgtcgacgacgctgaggcagaccgcgcactcgaccgacgctgccgtgtccgagacctcgcttccccaaccaattgcttacgtacgactacttctccaaaattccccaatccccaatcccatctcaagctcatctcatctcgtttcgttagctacctaccaaattaataagctactgacagtgtagcggacgaggaatccaaatcaaatccaatcctcaatcgaaggagtccaatggaatgcgagccggaggagctgcagttcctgggcgtggtggggatctacagggaggcggcatccatcctgcgcgcccaccggccgctctttgcccgcatcgccgccaccttcgtcctcccgctctccctcctcttcctcgtccacatcgccatctcccacgccctcccacatcgactccgacgactccgccctcgacttcgccgccccaggcacccccgcccggtgccgtctcgctgctctaccgccgcgctcgcccgccgtcggctccgccggcagcccgccgccgcttcgctgctctgccgcctcgctccgccgtccgctctgcccgccgcccgcatccgcgcgtgcccatcgtctctcctgctctccgcccgccgctggcctgaagaagaggagaatagagaaaagaggagaggagaagaatagagaagaaaaaaaaatatgtgcagctgacatgtgggcccatgtacttttttatatttttttttaactaggatgccacgtcagcgaaaccacccacatatatactgtcttgggaccttttatgtacggtttgtgtgagtttaggggtatacatttctggttttgtggttaagggaccttaaaaaatctcgctcttaagttgagggatgtccggtgaacttatttcttttttgtcagatagtagtatttttcttgatgggctttgggcccaaaactccgttccatatgcacgttgggcttaggcccataaaactcactgtcccataaaaattaaaattctagctaatttaaaactcactgtcccataaaaattaaaattctagctaatttaaaacaaattaggaggatagacaaatgaccacgataatcttatttaatcaaaaccatacatgcatacatttcatataaaaaatagattaattaaaaggaattttgagacaattaacccacattgttgtcgaataacaactgcgtcacgtcgaaggaggtggtaattcagtgaataactggaatggtaaagcaatatattaatcggttaaaaattttggaatctctccattacatggcgtacctagggggctatttatactcctagtatatgctcataccctctagggttcggttattataggggaatttacatggttacccttatgctagagacattaaagtgggtatacaatgtctttgcatttatgggccctgaggtggtcttcccgggctggcccattaggtggcgaagggcctccatgggttttgcgggttttgtgggttttatacacccaagacaaagatcgaaccgagccgcaccaagctaagccgaactagcgggttttgcggttttaagccagtttttattttgagatgcatcggttttcggtttacagatcggtttttgttggcgtgaaccgagctcctgataaaaccgaagacatcgttcacagccgactggagcgagcactagtagtagtgctgcggaataagtccattttacctccctcatctcttgcgcttgcgtgaataacatccctcaaccggaaaaccgggtataatgcctccttctctgaaaaccagagcaaatcacctccctctgtggttttgctggtggtttcgtccgacgtggcgtgttgacccggttgacaagctgactcagtgtggtgggacccacatgtcagtgtgtagctctctctcccccttatctctctccccctcatctcttgcgcgtgggaacgacagtggggagcggcgcaggcggtcggaagcggtggcgatggcggcggggacggcggtcggaagcggtggcggcggcggtggggacgacggtcggaagcagcggcggcggcagcggcggtggcggttgggacgacggtcgggggcggcggcggtggcggtggcgtcggcggtcgggagcggagaagtcggcggcggcggtggtcgggagcggcggttgggacggcagtggcggtggggacggccgaagcagcagacagcgcctacggtggtcatggagtagagacggtagcggcggcggtgtggaagcagcaacagcagcaggccgccccggtgagctccctccacagcgctcagccaccttgcgagctttctcccaacacgcggccaaccgatgagctcctcccccgcgcgcagccggccgacgagctcccctacctgtgcgaggccgaccagcgagctcccttcccagcgcgcgacctcccggcgacatcctctccccatgggcggcggcggtggcgagggaggcatcggccggcgacggtggtggcagatcggaggggtaaacacggcggtggcagtaggccggcgagggctgcaggaa

SEQ ID NO: 8872 - DNA, 51188 bp, Oryza sativa
tcgccaggcgccaggagatctccgttctcaaccgccatcccaaccgccaccgccgccttctccgctctcgaccgccatcccaactgccgtcgccgccgcctccttctccgctcccgaccaccgtcgccaccgccaccgcctccgccgccgcttccgactgccgtccccaccgccgcttccgaccgccgtccccgccgccaccgtcacggcttccaactgcttgcgctgctccccaccgccattcccacgcgccagagatgagggagagagagaaaggccgagggagagagataagggggagagagagctacacactgacatgtgggtcccaccacgctgagtcagcttgtcaaccgggtcaacacgccacgttggacgaaaccgccagcaaaaccaccgagggaggtgatttgctctggttttcagagaaggaggagtcattatacccggttttccggttgagggatgttattcacgcaagggtaagagatgtgggaggcaaaatggacttattcctagtgctgcactactactaggcaacgctagcccagtcggatgatcgcaggcccaaaggcccattgtgtggagcttgagggatttgatggcccaacagcaacaatacagcatcagcacgtacgtcctcttcctttttttgtttgtagagcgcctggtcggtatcttcggtacaaaccgacactgaacccaagtatagatcggtttttttaacatttttcctgatggatcggttgattgcagaaaccgatctcttacaagaaaaaaaccgatctcctgaaaaataacggtaaaaaccaaactaaggaatccatataaatcgattggctacatatatacacactagatgaagcattattattagttgttcctgcattgctcaatagcaaggaggcgaggccgcggtgatatggccacccacgggtatccacagtatgcacacacgaatccctcctgtacgttccctgctacttgcttcaagccctagcgtgcatggatcgatcgcctgcttgtttagatatttgatttctcgccgactcgcttcgatcgatcgcctactgccacgccttcctgccttgttattttctctcgcgttgatgctagttcagttgttttaatgtgttttgttcgcgttgctgttaattcaatatactataatccatgcatccacgatcgaccgacttgccgcttgcacaactagttagttggttggtgttttattttgtgaattagcgcattatattcgtttttgttcgatcgataatgatctgattgcctggataggttcatttaatgtttcgctcgctctgatttgatttgtttgcattgcgcactgttgatcaaaactgctagttatggaatccgcccggccgtgcacgctagctcttaaatcacagtgtttttgttaattacagtgtagttaattagtaattatagttatatgctcgctgctataggctatagctgacgtctttaattaagtgcattttagtttaatttgggtgctggaaatatatatgtgcatctaatggcatgtagaaatttgatcaatcgcgctgctcctattcattcatgtgttgtatacatacatgcttcaccgatagattggcgatcaatatgttccagtctggctagttgcatatccgatccttacggtgcttgcattcttatgttaaacacattaatttgattatttttttatcatgtttcatgcctatgttagtatgccttagactagggacacagttataattaaattaatactctgtttgatggagcaagttgggaacttcccccgttggcacggaaaatgagatagcccgttagttgattaattaagcatttgttagaaataacttgaaaaatagattaatattattttctaaagtaaattttctaaaaaaaattgtgcaaaaagatatcattttttaaaaaacgagaaaatagaaatgaaaaagtgacttccgaacatactagcatgggtgcataggagttatatacctgagtactctatcttgtatataggccccgtttggtagggctccaaactccaactcctaactctaaactccaacttcagtgagagctagctccggttggagttgaaaactcgttaaaagtgtctggctatactttcagctctagatctgaaaaaaaaaacgaaaccaatcggccccagccgtgccgccggccgccggccgcgcgcgccgcccgttgtcgtcccggccgccgcgccgcccgtcctcgtcccgcagcccctggccgccgcagcgccactgtggccccccaccgccgacgctgccgcagcccgccgccgctggcctccacccgctcgtcatcgtcacgccgcgccgcctgtcgccgcctgtcgtcgtcccgccgccaccgccgccgacgctgctgctgccaccgccgcccgccgtcgccggcgcccgctcgggattgggaggggaggagagagaacgggaggaaaggaggattgtaggggtagttgagtagcattttcgtgtaaatactctaaaaaaattagagggtagtgggtcttttggggtggagtggagctgtggagcagcaaaaatccagccccacccccgtagttcattttctaggagtagctctgccaactccactcaaaaaaagtggatttggacgtttggcacaactccggctccaggtaagttggagttgagagctagagctgtgccaaatggggccataatagctttacatccatgaatattatctctctagcacaatcgagttgttccataattctgtaccaataaattgatataaatcttaattatttatgccttcacttactgctggtttaatttgctatgtacaccaatttgctagttagaaaattgtgttctcatcattttgcagcgtacatttagcttctttcgtatttgtaatgttaggtactacttcattcctagtaccaaaatataacaggttttgagattagatataggattaggaaagttggtgaaattaaatgcaacaaggttgttattaattagttgagaaaaggaggtagtagagccaaacggaggaatgctgtgattgatggagaagatatataggtagagaaattgctacattttaagataaatttttaacattttgctttgggacaaagggagtacgtagtggcggaagattgaacaaaaaaattgacaaagttacatatcatgtatacatgcatatcggtgttacacatcatatcatatactgtgtattagaagatatattattaagtatacgatacttcctactagctagctatctcacacacatgtatatatactccctccgtcctgaaataaaccaaaaatgtaacacaacctagtgcaacaaatctgaacaaccctatttttagatttattagctagtttatgtcacatcgttacttaggttggtttatttttaaatggggagattatgctggattatattccctccgtcccaaaataaattaacttaatataggatgtgacatatttggagggagagtataaattttagttgataattgagtactgcattataggcatataaaaagctagaattttgatgcttgcaccgtgtcgtaggatgcatgcaaactacactacttggttaataattccctttgtttatgagtgattataggtctcatttgtggggcttcaccgccaacgagaaagaggcatactcaggagaaaacgatgaacgccagcagatcctacagtaagtacatacgtactaaacctgatatacataagcagttaactatatatatatatattagttaactgcttatgtatatcaggtttagtacatatgtacttactatatacctatataggatacctatatgggactttatggtgcccgggttctaaggtataaaacacacaaattctctcaaatttttaaaaaattttaaattgtgagtatatacctaggtatatgaatttgattcatacaaatacctaacaacaaaacaactcaaactcaactttatttcacaatttattattacatacctaacgaattatatgtttggatgttatacacctagaactaaaattgaacaaaaaaaaattcaaactcagttcaaagttgttagtaaagaagttaatgttcatatctaaacatttaaaaaaatttcatactcattcaaattgtgtatatactcaatttgaatcttggagcccatactccatgtagcaccagttaatttacctatatatatacacacacgtactgacatatataagcactaaactaattggagtattatatagcaagttgaaaatgcatcagtatgctcttttacttaattatttgcaggttgataatagaagagaaacaacctgagatcttggaattgcctggcggagggatacaagtgcatcaggagatagacgctgcggttgcagagctgatagaacaagaagcccttgatgaattagagcaactggtgaaagcccaaccagaagccgctgcagatcagcaaaatccagttgagccacatcaagatgaggatgacaagtgagactacttgcatgcaagcagattcattcatatatttgacattctagctagtcaactaaacgttgcaccagctcacaccacaaaattatatataacctcttggtttctactacatggtgcaggctgagtttggataatttgttggaacaacatcgttgggagggagctctgcggcggctgacgcgcatggtccgtaatggtgaagccatcaatggccctgtacctgacgcgccaccccaagacatttatgttgctcatcccgagatcgttattttgcgagtacctaagaacacccacaatggttatctatagactctctacaagagatctatgtcagcatattttcttacatggaagatattaaatgaagagagagaacaaaactatctactaacttagagataatctatagagaaaaacgaggcaatgtatgagagatatagatacccatgtagatatactattgagatgactattaatctagtctattgctaagatatacatgttttatagataacaccttactttaccattgcgggtgctctaaggctgatgcgttctggcaatactgctgctgcaatgcgctattatcatgacaaaattgagtccatttattcaggagataccggaagtgcctttgtcaacggtggtgttttgaaagaaatccgggattgggttaatgcaaagagagatactccattgtaagtgtcacttggctactagcactcgatcttttcagttgttaataatcttccatatataataattaatataattgcattacgtgtgtgttgtgctgataattgatctgtgttgttgcaggggagaagatgaagctacgacccatatggagaacacctgccatgcgatccatgactatttgaagctttatttcccggcatacaggtaattaaacttaatttgttgcattgaattaactaacatgctcctctgcctattgcaatatactagtactgcacgcacacaacaattgattgtttaatactaattaattagtgtagtgttctcattgtcacttatgatcgatttataaactagtaaacactgaatttgcaggccacaaattgggggaaaggttagaggtcaccaagtaagcagggtctgggagcttggggagaggcttggaaaagatgacggccgctgcttagcgtgccacaagagagttaaggggttcaatgtgaccaaactccagaatcacctgcaaggatcggttaaaaggcaaggaatacaatgcccggcaatcaacaactacatcctgagcaggctcgaacggattttgaaagaaatgaacgaagatcaataagaacaaattaaattgaacttttatatgtgtatgctaaatttaacttctacaaattacaacaaaaagaatatattaaattgaaaatagttaacatatattcacggttatatttgttaacattgtagaatttgaatttgaccttgcttgcatgtttgtggagtgatatttttcatattaatctatctggtcaattttataaaatttttaatggctatttaagtgatatgcaagaaacgagggatgaaaatacactttctcaaatccttctcccttttcttctccatcctagcatgcatattggtatatgttagacataaatacaaggcatatatgtaaagccacatattttttattgggctctaatgcaaactagaaagaaaaaattaatactattgtccttataaattaggaatatagtattaagttttcctttattagtttgcattagagcccaataaaaacaaagtggcggagttcttggtcagatcaagcggtcacctttgctccgccgctatcattttactatcggtagttgttaataaattagtcgatcactcgaaaacacgttattaatccgtttgggctcgctccttataaatctcacagcgcgagtacgtcatctcaaaataataaaaagaaaaaaaagaaaaagaaagaaaacacacacagcgcgactgcgcgaggtccagcagggaagccggccgcgtcggcagagactccagccaacgggcgccgccgcagcctccgccagtcggcagtgggagcaggcagaagctgcagcggggggcctcgagcaggtggcggcctcaagcggaggcgagcaatctcagggaaaccaagctcgccgccgtcgtacccattcttccgtcgcagatttcgctgtgactggttccttgtgattgaatccataggaacggaacccaaatcttggaattgtttttgcagtgcaagtctaatccttgggaggaaaaaaaaaagaaagcgtaataaggttggtttcttctccatcactcccatcacctacccacctgataactcctctcctcctgccgccgctgctgccacactccaccactatcgtcgtcttcttatcacccctacctcacctgcagtcctgcaccaagcaagcaatctccaaagtgcaagctttctcttcttcctgcgtctggatctcgctcaggtatgcgtccacatttgctttcttcttcctccattcccattcccccctactctcagatgcgtggataccccttcctctgatctacaggtttctcctctgcctgccactccccatggctctggattcaggtcgctcttcagcattcactaccgtattcacttcttgaaggccaatttctggttcctcaccaaaggttggttactctttctttctttcttgtcatccactccaagttgactgcctctgtaaatattctatctttccaactgttgcaatggtagcccatatttactagtattttttcccttggtaagatctagtggccaatttaacttacatcttcaaacgcctgtaatcatctatgtcaattaattatgtcaacctgtagctgttcgattctgaacaataagtgggaacggtagttgacaggtcagacctgcttcattgataattgatactgtccaaatggcgatgtgttgtcttgaactcatggtcattatctggttgctaccatgtagctttctcatgaccactagtgttgccgactcaacgagttgtagtgttcctgaccattctgttaaacattcatgccttgtctttgtggcaacactaagaacatttgatcggctagcaagcttatatgtacgtaactctttttgattatttctttctactttactgtcatggcatgtgttatatgctgttgcagaaatgcactccttttatgtttgagggaatggtgatttgcatttgtgagtgacatgttcttatcttccccatctaggtacttgatgatccgaagatgtcatcaaactccactctgacagattctcttcatgagagaacaattgtttttggcctgaaactttgggttgtaattgggatatctgttggagcatccctacttggtgttcttctcatacttattgtatgcctcaccttacaaacttggatcaaacggtcacgtaggacattcaaggaaattccaattacccaaataccttctgcatccaaagatatcaaggaagtgagggcagtggacgaatttttgcccaatgatttcgttgtacatgatgggcttctactcgccattcagaatgaacctgttgaaccagtggataaagatgtgaatcagtttgctcaagaggacaagacgatacaaggagaagaaaacagtcctgttcctcttcattacgtggacaactatgatgtaattcaatctgtttccacatgtgaacagtcttcctcgcatgctcccgtcgactctgttctgttgccaggcttacctgagttctcttaccttggctggggtcattggttcactctcagggatctggaacttgcaaccaactgtttttcaaaggataatgtaattggtgagggtggatatggtgttgtctaccgtggcagattatcaaatggcaccccagtggctgtcaaaaaaatccttaacaatctgtgagtatttttcgttttttcttataacaattctttggtgatgcagtggcagtgcattggttagtttgttgtccttccttttacttaagctatgaccacttgccttgggcagaggacaagctgagagagaattcagagtggaagttgaagcaattggtcatgtccgacacaagaatttggttcgccttttggggtactgtgttgaaggcactcaaaggtatgggtattattaggattcattgcttagactatgacctgttgtgtctcaactgaaattgtttgttgtgcgttgataatcaggatgcttgtgtatgagtatgtcaacaatgggaatctcgaaagttggttacatggagagttatcccaatatagttctctcacttggctagcgcgcatgaaaattcttttgggtactgcaaaggcgtgagtaactccatcactgagtctaatctattgcttcttgtggattcaaatgtccattctagatcaattgtttgctgtcaacattgtatttgtgattttgcgtggtgcaaactgtgaactgattggatctatatctattccattaaatgccttagaactaaaaatgtcgccttctgattgattcacacaagcacatccagtcttgatagctgctctattaaaaactgttgtgcatgttacaatcttgacagctttgtgattaaaggcttactagtcagtactgttcacaagtagtcgttgtctatactatcatgaatataaaacaagtatagattgtatcatcttactgcttggtaaatactaattttgtacgaaccaccacatttgcagccttgcttacttacatgaggcaattgaaccaaaagttgtgcatcgtgatatcaaggccagtaatatattgattgatgatgagtttaacgccaaaatatctgactttggtttggccaagatgctaggtgctggtaaaagtcatattgctactcgagttatgggtacttttgggtaagtttttcatgcctttgtataataaattgaggcatgttctctttgtattacgttcaaatcttggccactgtaatttcagaaaaattctgttggtgctaatcactaatggtactcaacattgtgttattattttgcagctatgtcgcgcctgagtatgctaacagtggacttttgaatgaaaagagtgatgtctacagttttggggtggttctgctggaagctattacaggtagagatcccattgactatgatcgccctacagatgaggtaatacttgttgattttttttctgtattgttcagtaccaagttattacataaaagcatgcaactacaatcacttgttaagcaatcaagaagctatgaacttatgatttgacaagtactgtaacacactactgatcttttgtaggtaaacctagttgactggcttaaaatgatggttgcccacagacgatctgaagaagttgttgatccaaacctggagagaagaccatcgacaaaggagctcaaacgtgcccttttgacagctctgaggtgcatcgatttgaatgctgagaagagaccaaggatggaccaggtggtccggatgttggactctaatgaacccattcctcaagaggtttgattcgtttcaaaaataaatgtgcatacatatatatcatatagctgtgtgcatatcagatgcaaaggctgtagctctaaactcttcctttacctaaagagtacgattagtgatttacctggaaatcatgcatattcgtgctatattgtgttataagtacatccaatgttcatctcacagtaaaattagtgacagatggacaacatgagcaatcctatttgattgtatcctatatacctgtcttatcagcattatcggacataaagagcattgcataacatggtattaatgtctaccataaggaaatcatggctttattctgtcattgcctcatgaattaaacacatgtcaattgatttgcaggaaagaagacaacgacagaaccacatctctaataattcagagaccgagccattaagaggcaagagcagcagcggcaagagtgatgcccctgaaaatgagatgaggccacctcggtataagaatcgatcatttccccccaagtgaaaagtgaaaagcatactagagtggaagttatggagttacctgcgatgctctcaatacataatgaattggtcaattgttttgtttctcttttattatttctcttgacttgatcaatttttttgttccctgggaggctgggggagcggccattgcagttacacatatttgtatttcttgaaacatgtacagtgctggtgtgtgatacatgtacagtagtttgtgtgtgatagatagttgaaggatgcacatgagagcataaaagctattatttagaagctagtggctggtatggttgctggtgtgagaaagtgcatgaagaaaccaatgaaataactttttcatattttctgtatactctaagagtataaagaggcaaatgaaagaaaaattgactttcagtttgtgttgtgtgcgacaaatgaacgaactgaatctctcagtggtcgagttcagtgctgtatttatcagctcttcaggcaggagatagaccattctctgaggtgaatttggcaggtgtggatttctattgatacatgcaacctcagcaatctgtgttaatgagaatgccgtttcttgatcatgaacaaatatgaaaaatgatggtacatgcaattcaatgcctccaaataaatgattaatcagttgctaatagcataagagatgcaattcacaattcgcatgcaacagagtagtgttgtgtatgacataccgatgaagtgaatctgtcatttatcaagctcacttgtagttttgtccttagcagctcttttccaggagataattaacccattaataatctttcaggtgaatatctttctctctctccgaggtaaggacttttcttgatacatgcatgcaacaaacttcaatctgtattgttgttatacttatacatgcaattgggcgttgaagtgaatgctgttctcttcttaatgaatcaaatgtgaaaaatgatacatgtaattaattgagtaatgctgatctccaaatgattaatcagctgctaacaataacataagagattaagaggtgattaatttgatgtgttggtcgaggcactagcagagcggcaggtcgggtggaggcgcctccagcgactgcagctcgccgacgccgtcgtcgacgaggaaggccatggcgaggccccaggtgatgtgcacgtcgagatggcagtgcatcagccacacccccgggttgtccgccacgaaccgtatcaccgcccacccgttcaccggcacgcccaccgtgttcctcatcggcgggtcctccacgttgaacttgcccgtgtcggcgccggcgtcgaagttgcccaacccctcggcgaggatgtagaagtcgtagccgtggaggtggatggggtggttctcgccggcgaagatgttggtgccctggagcaccacctgcacggcggagccgtacttgagcttgtacaccttggtgcccgccaccggctgccacagcgcgcggctcacgttctgcgccgtgtagtcgaactgcaccggcgggttggccgggaagtcggcggtgaacacgccgccgggcgcgccgtggtggtgcgcctggaggatggaggtggaggaggggagcacgaaggagacgttgttgatgctcgccgcgaaccgcgtcccgttgggcccgccgcactgctgcgccgtggcgttggtgcagttgaagaggccgacgccgacggtgaagaagaggctctcgtccacgcgcgacgggagctccgccttgcggaggccgcgcaggttcgtcgtgaaggcggtggcggcggtggtgtcgttgtacgccgggagggtaggcatggcgatggcggcgctggaggcgttgttggcggcgccgtagtcgaagatggcggtggtggtggtgttgtcgaaggggacgccctgggcgctggcgtaggcgcgggcggcgaggtagtagcggccgggaggttggtcgaaggtgacgaggacgtcggtggtctggccgggggcgaggaggaggagggaggtggtgtacggtttggtgtaggaggcgtcggcggcgacgacggtcatgttgtgaccggcgagggagacgaagagctccgtgttgagcgcggcgttgatgaagcggaggaggttggtctcgccggaggtgacggggaagacggccgtgtcgtgggaggagcagctgtagaggtcgccgggctgggcgttgacggtgagggcgtcggagatgttgggagcagcgccggtgcgcgtggcggcgcgcaccacgtcgacggggttcatgtcccaccactcccctgtaaccaattttacacgtttcagggctcaactcctcagatttgataaaaaattttaaatttcaaacattaattttttttaaaaaaatgcttagattttcttaaaaaaatatacgtggatttgcattgaaaattataatatcgtaaactaattatattttataaacttattttagtataaatcagtttgactgtattttaaaacgttcagagttgcgtttagccgctgtagaagttttttccacttcagcttttgtttttctttttctctcttctcttgatataaactggtatggctaattgtgttatataacaaaaacttttttcttttaatatattgacgtgcaattattttacacgtttgcgaaaaaaataccgtatttttaaccggagagaatatgattttactgattttaatttattgagaatcaaacatgtaatgagcctgctggtatagtgacattccttctgttaattgtaccaaactgccagagtaaacatggatttgcaacatggaaatccatggccttaattagcagtacagtagcaccaaaccattttgcttatcagacttgtagtgtatcaactattaaccattcaaccttcaactaatctttgtctttttcttgtgctcaagtgacccctgtaactaccaacatgttcttttgcttaaaaatacgaattcctcttattcaaccactaaaaatacaaaagggaatagctaaccctatacattgagccatgtcggctacaagctcacaacgacattctgaataaatggctgaattgtgcaatttttgattatgtggtttccccgaaagttctacttttgaggactgaggacgaaccttttcaaacaatgggacatatgctcctaagaacattttcttcacttttgacatgttcagactagtgtatgcatctctctacaaattgataacttttaatgcaaccttcttttgttaacaaataaaaagtatgtattgcaaccttgcattgcacattcattgagaatattttcttaattattagggagcaaaactttgagacaaacctcaaatgtactttgtaggagaaagatgatatcttagttcttaaggttcaggtacatgtaggagtataaaaatgtttgtaaaagtagctggctagctctgaggaatattgagcattgagcatgctttcagcatcaattttgcataggcagcatgtgcatgtttaagttttgcgccagaattcagattgatgagtaaagaaggatctgagaaacatgcacaatgatgaagtttttgatacataaacatgattggttagctagctttttcttgagatagatcatgtatggctctttggaaagctatgatacactgatgcttacttgtttggtaaccctgccctgactcatgcatgtgttttgactttgagctaagcagcttgtagtaagctggtaccaaccaacctaagggctagaaagctgttttttttttttctgatgaaaggaagatgtggttgataacaatgataaggccagtcacaatggctagtgtcattgcacggctacccaaaatattataccatcttctctcaaatgaaatcttttatgaaacaatccccacagtggaggggtttcactttgacgtttccaagactaagcaaagcatttaattgatacaagttgctgggatcatttgtacccaaaatccggcgcggcgcgggagaatgcggaggtcgcacggcggaggcggacgcaagagatccggtgaatgaaacgaatcggcctcaacgggggtttcactctgttaccgaggacttggaaacgacgctgacgagtttcaccaggatgaaactctttccttctctctcatccccatttcatgcaaataatcattttttattcagtcttacccctattaaatgtgcatgacacaccagtgaaacccccattgtgactggcctaatagccgttaacatgcgtgaaaagcagctaaattatgacagcttgaccccacactatagcaatggtaccgaccgaccaatcgtggctctgagatcaatttaattccaataaattaatgtgctataactatcattagctcgcggcatgctattcctgatcatgaaaaaaaaatatagaggaagcataaaaatgcatcttctttttctttggctttataaatcttttgcatttcggccaggacataccttttgacctgtaagtgattggctgcgtgaaatttcagtgatgatggttgcacaattttttgtaggtttggtaatgtgtgtacactatccagctaggcaatagtggtgaaaaaaaaatgctctctccatttcataatactttgcaattttgagttggcatttttgtgtgtgaacatttatactttaaagataaaatcataggtattaacaaataaaccatattacttaagtactacattgcaaatgtataaacatatagatcgatatcatccataataaattcatgatcaaaatgtgttagaataaaccggtaggatttcagtgaggttaagaacatagaagcatgtgtgtgcgtgtagcggcgtgtatgcatctgctatgcgattgcaaaaagaaaaataccagaagtcaaattaactaaacaaattggcggccaaaatagtgagacagataataattaaaaagcatgtagcagaagaaacgtacgtaccgagcaggatgggggcgagctctctggtgggctggacgtcgaaggggtagctggtgccatcgcgggggcggatgaggagggcgccatagacggtggcgcggagccaggaggagtgggcgtgccaccagagggtgccctcctgcgccgccaccgtgaagcgataccggtagctctgcccgggcctcaccgggcactgcgtcacgtactccggcccgtccgaccaccccgtcctcatctgccgcaccccgtgccagtgcagcgtcatgttgtacctcccacggtttatcaggttgatgatcagcgagtccccttcgtttatctccagcgtcggccccgggaactgaccgttcaccgtcattatgttgtggctcttgcacagcctcttcactgttgtctccctgatctgcagcacagatgatgaaatggcaaccaaattaagctagctgctgcagatatatatgatgagattcagacgagctaagtaactgcatataaatgatcatgtatatatgtactgaccacaaactcatggtattgctccttggcagcagccagggagcagagcagtgccaggcttaagagccagcatgaacaccctctgcttggcatgctgcttgatagtctgaaactaactatatactgcaactcgatcggtcgatcaatcaagatgcttattgtcagcaaccaaacatatctggatagctatatgcaagcttacaagacctgagactgaattgattgcgtgcagcaatgcagcttatatctgttgcaatacagctcgccctttatataggagcagcctggccgatcgaccacatccatgagatcagagtatatatatgaaaagaaaggggctacaggtagtagactccggccggttgcatgctttcttgttggaaagaataggtaggtctttagcacttgattctctcgttaatctacatatatacatgccatcattaatttcacacttgcatttgcattcttcatttcaagctgcctcctcaatcaatccatggtccatgcgcattggctaattaattgttcaatgtacttgccaatgaattcatagttaatgtaactccttccattttaattcattctgcaagattagtacttagtgaattttgctacagttttgattacaaaccgatcatgcgatggaatatttgcgcttcaggtaactcgtgtgatatatgatgcgtccatcacaagttatgttttcccccaggacaacatgacacaatcataagagcactccaagactaacgaatgtgacatttcaagattttgtcctaaaactacacaaacgagatatgatcctactgtgttgcatgatggattgcagtgttaaaacgtagagtcattcctgcgaccttgatttgcactgcaagtgttattttagtcaatgtggtatcatgctaaccccatgcaagttcttgattttatcttctgtcctacaagtactaaagaatcagtgaaccaacacgcatcaacttcacctagtactatctataatgatcttaagattttttttcatcctatcaaaacccttccttcactttcagcaagagaaaaaacaaatgtaaactaagtatttaacacgtccatttcttaagttcagttcttaaaaacggtgcttaaagctatagtctttcgatcagtatttttatgacatgcataaatatcacagagatgcatgttgcatcttgcatgtgcatgaccggccatttctataattatatggtgagccctctatatcaagaaattctgacctcaaattatactgagcttttctcccgtttcagggaatcatgaggaatgaattaacgtatcatttccagtggagccaccagtcccacaagtctccactggccaaaaaagtaactttagtttttgcctcattttgtttagaacaaaagacaacatttttttcaagtccaagaaacaaaatgttgttaacaggatgagacttttccaagtctctatggcccccatgtcaacaaaggttaagtgcttgattaacaacttctttttgacaatagaatcaatccatgaatcactcccttcctttccatcattgtctagcatatgcataactaaaactgtgattactactcgtagttagcagttacactgcgtggtctttgctctggtaggagttgttgggcttgtgctctagacatttgcattttttttagataatggattaaacatggtgtttactgctgtttgatcgcaccattccatttgctagagtccaaggaacctagctaagatgtgatgtacactaacaaaggtaacttggttatggaggtagagatcaaaagtttttagaattgtgaatttttgtttgaaggactacatgtacctatatattaatttccctgttaaagaagttctcgtgatgcagatactcttgtgagtaataagtaaataatgtatatttcaggcaaatgaattttctcttcaacataaaaagggaaaaggagctactattagttgaaattcggatctacataatgggccaaatccttgccccatcaaatgattcatttccacaagctctgattggcaaaagtattggaagaagcatgcaggtgctaagctgctaactaccacatattcaattgcaaggactgttagtaggcaaacgtccaacccctttagctttatgtggtttcttctgttcaaggtaatctaaagtcaaaatgttaacactaggaacaatcttcaaaatgaaggaacatgctattggcatgagcaggatcaggatggtttccttggttggcaaaatattttaggctgaggctgatatatagcttgataccaatttggaggcatttaacaaccctggtgctccactacttgtcctttcaaaattgaaaagatgcttcacatgttggtgcatatgcactgaatgccccacaatgttctctaaattgcactctgctgtacgttacttgactgaccaggtgtattatgaatctgaacaattggctgcgctcaacatatgagagaaatctcagacaaaaaagattaatgattatgaatggttgattgaattggcacgaaggcagtggtggggagccaaaggagtgtgcagttatgcaaccaacaagcatgagtactgaccgtcactaatattctaaaccttattaaacttttagatgattatattttcataaaaagggtgcaacaaacgtttttgaaggaagatgttacagcaaaagaagcattaaaaaacattcagataacagattgtcatctttgttgcaaaaagttaggtacaatgataattaatttcagatgtcaagttttcatgacatacatcaaccaaacttgaattggaatgctaggattggttcatggagttgtatatggtagtaaatgtcatcattgtcctttaacaaatagctagacatcatggcccttaagctggaagttaacaggaatcattttcctaaaacttccatagaagtgatgcagtaccattgacactacaaaataactgcattgtcactacaaagctcttcacagttgtcattcccaagaaattactttgcatttccaaatgaatccttgtagataagttacttgagtagcgaagagtaagatggagctatgaagaataaatgctagaatagttgtagcattagtagtaggtggtgggtgttaaggagggttatggtgagaacgacggtaactaacaaggagaatatgtagagtctgtcaacatccaacattctttcttcgaaaaaattcctgtctaatgtaaaagtgatcgactccaagtcagtacaacagctatggaacaggtaaccaactgaaccgaagggtattcaggtgaggttgttttatgtaaacatatcttttctcttgagcaaacacgattccagtattgacatatgcagctacctaacacaggtgttaagctagaatgtcaaattgtttggtactagtgattaatatggtgtgcatatacccacctgccacatcacaatgtaaaagaagggataccatgttgatatgttcaagatgtagtagcatacaactgtaaagtactaggtcagtagcagattagtctctacatttttcgcggcctgtacattttatcaaaggaaacaacagagagaaaaatgcaacagattgattgatctgcatgactatatgtattgactaagttgtttaattgaactgacgaaatgtgcgtttggagtttggactaaatggtacaggctcagagttttttggcctgccgtgaataagggcagcaggcacatttcagaaagcttgattgctgtacctttagcttcttgctttgttcagaggaacatcttcactttctttttctgtttgcgtgcttctggagatattcaggctactaattaaacaaccaaacagagcatagtattttatccttttgtaggctttttatctcctttataaacagtttccccagctgtcatattctatcaataaagaacatggacttctggaagcaaaattaagggtactttcaaatttccatactgaattgctgaatgtttgcttcttatgagggagacgttgaatgctgatcgaacaatgcgttgtgtgtatctgtgatacttgttctggaaaattaattttaggagaagtgttctgaattgctgaatgttattcgcgtttcacaaagttaaattctcgtcatcagaaaaggaatactttcaggtttcaatttcccggttgagttttcagcggtggaggaagaattgataaaggtgcttataaaaattctaaccatgaattttctacatgaacgcggcgactgctctagctgtattcctttatgtaacaccgtgactgactaaaccttgtttgacatttacttctaatataatagtgaacggcagagtctgcatgttctctcgaaaaactttcacacaagagtgattttacgtgcttaaaaatgtattggaaggtattacattttctaatgtaaaatttgatacttctcagaacctccagtacagaatttgcactaaaaatattattacttatttgtatctctcaaggactgtaaaatttctcttcacatatgcggaagattctaaccataaactttatacgaaaataaaaatatatattagaaacttccaacaattgttaaaagttctaccagaatatacaactttctaccaaaaaaaattctaaattggataatttatagtgacacttttatcagggaaaaacaaactcgaagtctcgaacatgtactttgtacaagaatgaaaagaaatcttaaaatggttaaattttgttttaaatacgactaatatgttttttttaattcaatacgactaatatgttttgatggtcctagaaggctagaacaagctaaacagtcagtagaattcaataataataataaaaaaaacaattgagccaaataagtcatttggcccaagcggcattgctagcccacgaggcccaggccacgttcgagaaagaaacgcgagaatagatcgacgctgccgccgcctgagcctgctctgcagtacttctccggcagcgccggccgccggcccgggtatcaatctagggtttccgcccgccgcagccacctagctagctagttcaacgtacgatgaccatggaagatggaagctgtcctccagcagtcgcccccagtggcagccaagccgaagattacggatcatggacactgaagcagaagcttgaggatctcatcaactgtgatcctatccatggtatcatgccaaaaaatcctaaatataaagcatatttcgaggaaaagttcgaggtacgtattttcttcgatccatcatccatggatgcaaactaattaattaattaattttgacctcaccagcatatatatatttattttattgtatgcaatcgatcgatggatcaatctatcataaatattattgccattgtaggagaagttaagtacgtacgttcgtgttgtattgccgaaacttcgtccagcaattcagaaggatagcgtgaagcaattctatcaagtctataattgttggtcaggtttcatgggactgggagagtttctttaccctgatatcctcaccaacatggcctcccagaacgctctgcgttgtgccagggtcgcactccagggcacctctcctctcttgcgttgccgccgccgcgctgaccccaacacccgccaccgctacggcttcgcccccctgcacatggccgccgagaacttcagcgtcgacatggtcaagctcctcttccgctgcggcgcgtccgccaacatccgcaccaagggcgacaacgtcattgagggcctcctccctctccatgttgctgtggagaatgccagcatgcacaagtacattgaggatcattgggctcatggggaccatatcatcaacctcatcttcctcctttgtcttcctgagatggtttttcttctttattcaattcctatatatatccctctattatattactgccactgccagagcatttagcccatttcaaatacgtactactgacatgcagaaaatgttcttggacacgactagattaattgccaaacagacggacaacattgtcgacgaggtatggaattacattcagcatgaagagaagcatgtccaggcagcaattttgctgctcgctgctgaaaagcagctccgtggtcgccttaacaagagcagtggcaaagcctctctgaacgggtttgatattgttaaaagccgcattggtgatgctcttagcaccatacatcttgagggcttaaatatggttcaagagggaaagaatggcagggcactaaagagattgaaagacaaaaaggaagcccttcttacagcacttgtactagtgtgcattgttcacaaagctggtgaagctcttgacggatacattcaaactcattcacaggtaattgctgaaatttcctcattgttaccattgctttctgctacccctgtgtgttttgattttccagtttcattctctttaaatttgtgtgatgcttacttcccatgattttgatctaatagtgactcgttttcttcaaatttgtatgatgcttacttccatgattttgatctaatagtgaaacctcgaattaccctcgttttagaaagctgtggtgggctagctggcttagcttcgaagcctcacccattctaattattttatattaggtcattccctaatattcgcttttttttagaaagctgtggtgggtgttgatcgtttttctttttctttttggtgatatgtaaacagttggaggagctcctgctgcattgtatcaactagtcacatccatattataaaaaggagttaaaaagaactggacccatgcggtaaatggcatcttttagcccccatttttatgtaaatccaagaagttgaatagcaggcccagcatagcggtagtatgctgctagtttcaagtctaatgcatgagtcgaaaatatatgaaaacacaggggagtagatgcagtgttcttaaagcgaagcatggtggcccaccacctttcagatgcctatgagttcaacgcataagtcaaggtgacaccttagggcagtagtagtccaaggcacggcatgcgtgcctccatcccattccagcgaggattttggcccaaattttatctctaggtcacgcacctcacagtgctcggtaccccacaatactagtgcgccgtgtcttatcctcacgccccaaaaaatcagccttcatccagactcatccccgcccgccgcttttctcctcctccctcgtcacgcccgacgccgtctctcctcctcctcggctctcccctccttcctccgccggcgtcctctcctcctccctccaccggcgtcctcccctactccctcgaccggcctcctcccctcctccctccaccggattcacgagataaactctcgctggattcgataggtgctcagagagagagagagagagagagagagagagagagagagagattcgaatcccccacggtggtcgccaaagatgaagccgccgccgccgccgcggaggtggttctccctcgccggcgaattgagcctccccaacgatggagcggcaagctcagcaacacgggggctcgtgagcggcggcgctgagcaaggttgtagctagaggccagccgtcgagcttggagcggccccatccgtctccacccaagcccctgccgcctccgcctccgtcgtacgagcaggcggtggggttgtcgaggatcgcgaggagcgaggtggggtcgtcgaggagggcgaggagcaggcgaatcaagcaacgactccaacagcgcagatttccttcgccgcgtgccctcgttgcggcgagaaaacgtgcatcccagataggggccaagcggctgagctagggtgcgggcctcgtcgccacgtcgacctgaatccgagctggagcaacgagatcacgcgccaggtcggtgcactgtgaagggccttacatctaaatctatacaaatgctgccaacttttgtattacacacgtgcttaccaattattgagcccatgtaccattcattcatcctttctaaagaagatttaagaggagggaagagggtcctctttgttggaaatatagtcattattcggcatattttaatccaagaaattgaaacaatgatcatggcataagcagtgtagggtgatcttaacataaccagtagcatactatgcgcatcatgaatgtcagaaacaggaacataccagtaacgcgataacatgctagaggcatcatgtagaacaggaacaagaacatagcgcacacagtatagcgctaacaatgggaacaggaatagcgctaacagcagtagcaggaggagaagattataccccgagaatggccctccgctggatggtgaggcagaattgcctccgttgttgtagtcgttcacggcacctcctcctggcgcaccagctccggatccagctcctgtcggcggcggcgcaccagctcctgtcggcggcggcgcaccacctccgccggtagcggcggcagcaactccagacatggcgatgagcagtcgtgcaggaggcactccccaaaaacctgatcacccgcctacccggtgcagatctcaagcaaaggtgtggtttcggaggcactgcttcttccaatctctcgtgcgcgcaagagatcagaagcggggaagcgagagcaactcaggcgcggagagggagaaactaacaccgggaaagaagctaagaaatcggatcggactcgcggcctccttatctatcaggagaaagaacgtggacgcgctgttgcggagggaatcgtgggaacgtgggttagtggctgcaaaaggatagcgacgtgacgtgacgcacgccgccagccagccagccacgcctcgccctcgcccacgccccggcccggcgcgcgcgcgcgcgcgtgtggcattccgacccccacctcaactggtcaacagggagcctctaataactccctatttaggttgagatatttctcgcttaaatcctgaggtggtattattatcctcaacatttattatgggcctttgagatttaatattataaattgggcctagcccaattattctaacaatccccaccaaatttcaaggctcataagaaatgttctcaatgttgtgcctgtttgatataccagggttttggtggagactgttaagttgaacttccacctagaaaatgagctacatcagaccacaactgaacaatggactatgccttgaattgtaagttttgtgtgatcaggtttcactcagaaccttgactggtactgggctgccgttcgcatcccctctgtttggagcatataagtcaaactccaggcctttcatgagtatctagagattgcccaaacctcatagactgtgactagcagtcgaactcatataggtgtgttccttctgagatgttctgcaggtcaacatctctgcttggaaaagccactcggatcacattaagacataagccatcctaccatgcaggaaagaagagaagcacatcatgaaaatgagcccttttcaagggtctcttctctcagtcacacaatagtttgtttcaccattcaaattcacgggatctccgatcacaatggacaggtttccactattatgcaaccttaggtgggtatcaagcccatttccctcgatgcactgtctatcacattacgtggtagccccttggtaaactgatctgccagatttctagccgtttggacatagtccaatgctatcactccggagtttttttgctttctgacagatttcagtcttctcttgatgtgtctagatgacttcatgttgtcctttgaactgttcactttaataatcactgtttgattatcgcagttcattaggatagctggcactggtttttcaaccaccggcaaatccatcaggagttcacgaagccactcggcctcaactgtcgcagtatctagtgctgtaagttctgcttccattgttgacctcgttaagatggtctgcttgcaagacttccaggaaacagcgccacctccaagtgtgaacacatatccacttgtggcttttatctcatcagcatcagatatctagtttgagtcactatacccttctagtacttttggatacccggtatagtgaattccatagctcatagtgccctttagatagcgcattactctttccagagcctgccaatgatcatctcccggatttgagacaaaccggctcagcttgcttacagcaaatgagatgtcaggcctcgttgcgctagccaagtacatcaatgaaccaatgatttgagagtatcttagttgatcccttgctattcttcggtttttccttaatagcatactgggatcataaggagtaggagctggcttgcagtcactatatccaaagcgactcaaaaccttgtccacatagtgggattgcacaagtgtaatcccaccctcatctcctctttgtagtttgatgttaagaataacatcagcctctcccaaatccttcatttcaaaactcttggacagatagtctttgacctcctcaatcacattaaggctggtcccaaagatcagtatgtcatcgacatacaagcacaagatcaccccttctcccccaccatagcgatagtatacacatttgtcagcttcgttcacaacaaagcctgcagatgtaagcgtggtgtcaaacttctcatgccattgcttaggtgcttgcttgaggccatacaaggatttcaatagtttacacaccattccctcctgaccttctagtacatacccgtctggttaatccatatagatctcctcctccagctctccgtttaggaaagctgtcttaacgtccatctgatggacgagaagaccatgagaggctgccagagcaagtagtactcgaatcgtagtcaagcgagcaactggtgaatatgtgtcgaagaaatcctcgctttccttttgggtataacccttggccacaagccttgccttgtacttttcgattgtaccatcaggcctaagctttttcttgaaaacccatttgcatcctacgggcttgcacccatatggacgctcaacgacttcccaagtaccattagacataatcgagtccatttcactgcgtactgcttccttccagtagtcagcgtcaggagatgaatatgcctcttctatggttcttggggtgtcatccacgaggtatacaatgtagtcatctccaaaggattttgcaaccctttgtctcttactcttgcgagtatctacaatgttgtcctcctcaggattttcctcaggcgtttgatcattgtgttctatcggtgcaaagtgctcatggggcatgacagtttctttactagaagtgctaggtgtatatttcataggaaattcattctcaaagaatgtagcatctctggactcaaaaattgtaccagcatgcatgtcgggtactccagagtttactatttaaaatctataacccacactgtggatagcataaccaagaaacacacaatcaacagtttttggtccaagtttccgctttttgactataggtacatttaccttggccatacagcaccatgttcgtaggtatgagagatttaatttcttcctttcccattcctcgaatggtgttacttccttatgcttcattggaattttattcaagacatgacatgcagtcaaaactgcctcaccccaccattccttggaaagccccgcagtgtctaacatggcattcaccatctcagttagagtacggttctttctttcggccaccccatttgattggggtgaatagggaggcgtcatctcatgaataattccaaactcttcgcaaaaggatgcaaactcattagaaaaatactccccacctctatcagacctcaaccgtttgattttcctttcaagttggttttctacctcagctttatagattttaaagtaatgcaatgcctcatcctttgttttcaatagatacacatagcaaaatctagtgcaatcatctatcagtgtcatgaaatatttctttccccctttagtcaacacgccgttcatttcgcacaaatcggaatgaacaagttctagaggtgccaaattcctcgcctcagatgccttgtgaggcttgcgaggttgtttcgattgaacacaagtatggcacttggaacctttgaccaaagtgaattttggaattaaactcatgttagctaagcgcgtcatacaaccgaaattcacatgacagagtcgcgaatgccacacattagactcatcattcttgctaatatggttcacagcattatgattattacacatgtcattcaaagaaaaacggaacaagcctccgctgtcataacctttaccaacaaaagtcccatatttagatacgacacatttattggactcaaacacaagtctaaaaccttctctacacaatagagagccgctaactagattcttctttattgaagggacatgctgcacgttcttcagctgcacggtctttcccgaagtaaacttcagatcgaccgtaccaacaccatgaacagccgcaagtgacccgtttcccatcaacaaggaggaacctctcccgacctgataagaagaaaacagagaaatgtcagcacatacatgaatattagcaccagtatccacccaccaatcaggtgaatgaaaaatagagagaactgtaggtaatattttaccgtaccccgatgttcctccgccctcgctaatgatcatgttggcagacttcctgtctttgcgctcaggacagtccttggcccaatgcccagacttgccacacacaaagcagtctccctttgcctttcccttgcctttcttcttaaaattggttgcaaccttgggtttgacatcaggcttgactttcttgttgttgtgggatgcatgagggttcttcttctgtaccatattggcactagaacctccctcaacctttttgccccggacgtcctttgccctcgccttctcctcaacacccaaagagccaatgagatcaggaacactgaactcttgtctcttgtgctttagagaagtggcaaagtccgaccaagaaggtggtagtttggcaataatgccacccgccacaaacttgtccggcaactcacagttgttgttctcaagttccttagccagcatctgaatctcatgagcttgttctactacagaacggtcatcgaccatcttgtagtcatagaactgctccatgacatacagctcactgccggcgtcagaaactccgaacttggcctcaagtgcatcccacatgtccttcccagaaggcatgtgcatgtacacgtccactatgttgtcagcgagtacactgatcaatgctccacggaacaggcaatccgaagcctcgaacttagcctcttcctcaggagaaagaggtggttcacttcgtttgccccgtgaaacatagaagcactgcatcgctgtcaaccacaatagtgcacgtgctttccatctcttatagtttgaaccatcaaaagcatgtggtttcagtgcagcagcaaagccaactaccgaaaatgacctatcaggtttttggattgttggaaatatagtcattattcggcatattttaatccaagaaattgaaacaatgatcatggcataagcagtgtagggtgatcttaacataaccagtagcatactatgcgcatcatgaatgtcagaaacaggaacataccagtaacgcgataacatgctagaggcatcatgtagaacaggaacaagaacatagcgcacacagtatagcgctaacaatgggaacaggaatagcgctaacagcagtagcaggaggagaagattataccccgagaatggccctccgctggatggtgaggcagaattgcctccgttgttgtagtcgttcacggcacctcctcctggcgcaccagctccggatccagctcctgtcggcggcggcgcaccagctcctgtcggcggcggcgcaccacctccgccggtagcggcggcagcaactccagacatggcgatgagcagtcgtgcaggaggcactccccaaaaacctgatcacccgcctacccggtgcagatctcaagcaaaggtgtggtttcggaggcactgcttcttccaatctctcgtgcgcgcaagagatcagaagcggggaagcgagagcaactcaggcgcggagagggagaaactaacaccgggaaagttgcggagggaatcgtgggaacgtgggttagtggctgcaaaaggatagcgacgcgacgcgacgtgatgcacgcccgccgccgccagcctcgcccacgcccacggcccggcccggcccggcgcgcgcgcgcgtgtggcattccgacccccacctcaactggtcaacagggagcctctaataactccctatttaggttgagatatttctcgcttaaatcctgaggtggtattattatcctcaacatttattatggacctttgagatttaatattataaattgggcctagcccaattattctaacactcttcagtctcagtagcagaatgcaagaagggatctggtttgtagcaggtgcattgataccgaaaacaactctcacctgccaatattcttctgctttacacgtgtgccggcatagtgctgccataccactgttctactgtgtaagatctgttctaattttcttctggtgttatactatagtgtcgtcaagtaatgtgccatttgttccagacaaaaagtataagttgggcaatttggttgttttttcatctagccaagagatgttattgacaaggccctagtgggctctttggtgttgtcttgtttgcggtgagcaaggatggcaaataaatccaagcttgtaatagtagagttgtttgactatggcaggtcggcagcatgccaaatcaatgacttactgattcaactattgaccacttagtatttgtttaaatgtagtgcttaaaacaccattgttgactttcagttgtgctgtactatttgtcttgagagatgatgttattgaaggctgttatgtgtcttgcaaccaccaccacctgcaagtgtagatatctgaattctctttttggaataatgcccttgaacattttgtaatgatatgttttaacaattttcttggtgaaatgtaggtgcgccatgacgacattgttgaacatgtttcatcaattctaaaaagcaatggcattgctcattctgggaaaagcattgacactggaaaatttgaatggtttgacatctattggctttatatatatatatatatatatatatatatatatatatatatatatatatatatatatatatatatatatatatatatattcagttcatgtttttgtgcatataatatatgtcttgatttatttgtgttttgaagctaccaacatgatggggggatgccgattggcaagtcagattcacaaagaggtgtgtttcattttggttgatcctattaaaataaactagaaaggaaaatagctgtgaaactttattatgtgtccacccattacaaagtcatttgctgtggtgaatgcacaactttggaacattgcagaaagcttatggcttgcatccagtgcaaaagggggggcaatcagactctgtacaccaacctcggaactatgctttccatttcataagctgtctcatgaccaatttcattgctgattacagtgggctatggggaaactattgaagcggacaagtcatcttctgatacaggcgaagttagtaaaatggtaatgagatacgtaattaaatttatttgttgagtctaattcatgcgatgaatttagtatgaaaacaagattgttcctccaaatttgctcctactgacccaatcaattaacaagatatggaaatatttgataacataatgcataaccatcaactgttgccttgttaacaacagaatgaatactcactacttaaatctgagtgtttttataattttgtttatacgttcagatgctaattttctcatgtaaacagatcctgggaaagcaaccacctaaaggattagccataaaggaagtgagaaatatgttcttcccatactggaaatcggtgttgtctcgtcggttgcagctgaagatagttccatcctgtcaaccaagcaggaaggacttgctaagtgctgaagcgagcaggaaggggaccaagagtattgaccacccgtgtaacacaatcaaatcaatgggagatcgtggtttgatgtcaagtgaatccagaaggatgctttatactgttgcttcaatgtcccggaaggtgtttaagcgcacttgagtacagaaaatctttggtggtatgcttgttgaaacacatactccctccgtttctttttatttgacgctacagtgcaaatcagaatcgtttttttgtttgacgctaccagttcatccgtcctagtcacgtttgttaatttccatcgttgccctccatctcaacatcgccacggcgctgcctcgtcctcatcgcgaccggactcgctcgccactgtctcctcccacgcgccgctgccgttcatgcctcccgtgcgccgccgccgcaccccaatttggcggcaaccggccaccccgagctgtggcctgtggggcaagcaagagtcgggcagcatggcgcacagggagccggacgtcgggcttgctgctgccgccactgttgttcttgccactcggctgaaaccaagcagaacgtactgcatctgcagatgacatcgtcgttattgccgttcggctggagatcaaccagaaccagggcttctcctctccttctgcttaaattgtaaattgggcaaaaccaggcaattaggcaatgaaaattggaggaaatgagaaaaaagaaattaaacaagctggaagttggagaaggcgagatcgaggagctcacttacagagagggtgacgagtgaggagccgaggtccggggaggacatgctgcttggagacgagaaaggaggaggactgaatcgagaaggaccgcttgatctcaggctccaacgccgctttcaccgggaaggtcggagaagaaagggcgacgcggcgtccgggaagagcgttgtgcagcgggttcctcctcctgtggtcgcgagcagcggcgtttgggagacgacgagcgaaccggcgtcgaggcagcgcgggggagatggcaagggagccggcgtggagggagacggccgcgccgcgcgcactgtgctcctccctgtcgtccaaaagggatgaagggcaaaatagtaaaatcgctctatccttaattttgtccatgccgtcggaaacgtcatatatatcgaaacggagggagtatattttttctataataagcttctagaatgtcttttggtcatagtgccccctacattctcattgttgctttaatctttgtgcaggtctcagaaaaagcaatgaaactttgagcttacatcagacgtttctatcctgttgggctagaaactgtgtttcatggttatggtccatactttttaatttgaaaaccttgattgcagtgtaatattaagatttaacatatattccttctgtcccaaaaaaacgaatctagtactggatgtgacatatattagtactacgaatctggatatagagatatgtcactatgtcacatccagtactagattcgtttttttatgggacagagggagtacgatggaacgtcatttatttcttgtagtgtgccaggcaaaagctgacccggtaagtgatcaacgggctaaatattgtgctgcctctaaagtagaatatcgtggtatggaaaacatgtctagtggttgatttgttctccgaacatgcgtttatatttctcagagaaaacaacttctatatttcagtacatcaattttttttgctgaatttttattctaatcattagggcctgtttagtagagctctaactcctaatttaacttcaggtgttagatctggagtagagttgtggagctgtctatctagtatctgctagaccattcccatatttgtatttggtatgactggtgagtttgctagttgctaccatgttgatgctggcacattaccgtggattctgaatccccgtgtggccgtgtgtacagaaagacacccaagtttagctaacccaagtttggtactagtgattaatatggtgtgcatagatacctgccacatcacagtgtaaagaagggttatcatgttgatatgtgcaacatggactagcatatatacaaatgtaaagtaggtcaatctagcagattaatctgaacattttatcaaaggaaaactaccggcagagggtaaattcaacagattttttgatctgcatgtattgactaggctgtttgagttgattggaagagtatgtgaagcagtggtgcgttttgacgaaatggtacaggcgcagcagcaggcacattcggaaagattgatttcttcaccttttgcttcttgctttgtttcagaggaacatcttcactttcttttttctgtttgcgtgcttctggagatatgcaggctactaattaaacaaccaaacagggtttatcatcttattgttttatacattaaagatttttctctctataaacttttgagaactttttccgagatgtcatattctatcaataaagaactaggacttgtggaagcagaattaagggtaccttcaaatgtccatgaaatgctgaatgtttaattgcttcttgtgagggaaatgtttccttccatcaatgagaaatgggcccatttgtttcagctcgcaaacaactctggaccctagtcttcgtaggccggaacgggagttagcccatagcagagcattgtggcccaatcatgattatttgcatttggaaaaagtacaccgaaggtccctcaacttgtaatcttacaaaaccgttcattttaggtccctcggtggtttttaccccggttttgtccgacgtggcggctgagtcaacgtaggacccacgtgggccccacatgtcaaacagtccatgtcagccacttcttaccctccctctcaactcacttcctctctcctctcctctccacgtcgatggccggcggagagcagccagggtgcggcaggatggtgcgacggtcacggtcgccggtgcaacagaggagcacgccgcggtcgagcgccgcaatggcctcccttgtctctgacgtgccttcatcactgctatggcctcccttgtcttcactgcatagagcgaggagcacgcgggcaaagtgatgcgcgaggcggtcactaacctcgccccgagggccagcggcagagagcacggcatccacgacgcggcgtgccccatcgaagtctccctggtcgacgaggttagcgcacgcgagctctgcggaggctggccggctggtggggaggaggcctgcgaggcgaggtggaaccgtcggcgaaatcctcgaagctatcgcagcccaccaccgccacaccctcgcccccgcacgcgacaggatgcttgtccgcatggcctgccgggtcccgaccagcgcgaggatgtcgtgcagttgctcccctgctggacgctgcccgctgcagatctggcgcctgcgcctcggcggcggcggcgtgagggaagccctcctgctccggcggcgtgggagggcaagcacaggaggacgaggcggaggtggatggcgccgacagggagaggaaggatgccgccgttgtcatccatagccgcacgtggagagacgatggaggctggcagcgtgggagggcaagcgcgggttgacgaggcggaggcagatggcgccaacagagagagagaggtcgccgccgtcgtcatccatgcccgcaagtggagagacgatggaggccagcggcgtgggagggcaagcgcgggtggacgaggcggaggcggatggcgccgacggggagagggaagtcgccgtcgtcgtcatccatggtcgtcatccatggtggcacgtggaaaggcgacggaggccggcggcatgggagggcgggcgcgggaggacgaggtggacgtggatggcgctgacggggagcgcgaggacgtcaccgcagatctggcgcctgcgccgtcggcggtggcggtggtggcggcgtggggggagaccctcctgcttccacatcgtcgcggccgccgccgttcgccggcctcccgacatcttcctctcctgcctggcaccctcgccccgccggctggcttgctcggactgagaagaaaaagtgagagaaaggaggaagggagagaagaggggaaagacaaagtgatgacgtggacaatctgacatgtggggcctacgtgggtctcatgctgactcaactgccacatcggacaaaaccggggtcaaaaccaccgagggacttaaaatgaacggttttgtaagatgagggatgtcatatatctagttttgtggttgggggacgattttgtaactcgattacaagttgagggaccttcggtgtactttttcctttgcattttactctcttctgtttcggatcacacaaaaagttgtcccgcactcggcaccaattcattttatgttgtttcaaaaaaaaaatcattttatgtatgtccagtaaaaaatggtttccacgatctgtataattgccacttttgaagctccagaaacagttgctgagttacctagtcatgattttgttctaaagtgtgttaactttacactttgcaatccatgcactttggtgatatgaccttcagttaagcattggtcggcactttctgctaatctgaaaagctaatgccagcacgcggctatgcattgtccaggatatacataacatattcagaaacacacacacacagagtagatcagcaaggaaggcattgtggtatttgtaattgatattctgatagagtgattcagttctgttgcaaataataatatttgcctatataataagcttcaaaaacaacatagacgaataatgtctaccacttactaatactactaccactaagctttcaaataaatcaaacaattcataaatgaaatataagagtatctctgtttctactctctggctgctctgtttctgaaatgtctagataggccgcttctcagtctccgcacaagttaaaattttacattactgcagacttccaactagcaacaacatatgtgcctgcctgacatagacaaaaaaaaaagattaattggatccatgccactgcaactttgcaaaatttttaaaaaatgctactactatttgtcatattggctatgtgccactggaaatttctaaaattgaaaccataccactgaaaatttctaaaattgaaaccatgccactcccatccctttttccgtctcctctctcacgccgtctccgttcccgtcctcatcccccttccgcgaggaggcggaggccgccctgcactcttgtccatcagtgccggtgataacgatggcgacgacggcgatgcaacggagcgccacccagtagcccgagtagtagcggcgagctcggagaagaagatggtgggcagaggagggagaggagggagcgggtcgacggcgccgagtgaggctaacgtaccttacccgcgactaccaccggagggctcgggagccaccgccaccgtcctcaacgccagctgcagtgagaggtctatggagctgtcgctaccgccgtcctcgacaccatccacacgggagggctcgggagtcatccacattggagggctcgggagccgccgccgccgtactcgacgccatctacgacgggagggctcgagagccgccgtcgccgcctctgtcctcgatccatgatgggaggtctcaggagctaccgccaccgccatcctggacgccatctgcggcggcaggtctctggagctgtcaccgtcgccatcctcgatgccatccgtgcggtagggctcgggagccgccgccgctgtcctcgatccgcgacgggaggtctccggagctgccgcctctgccgtcctcgatgccatccacggcaggagtgctcgggagccgccgccactgtcctctttgcagtcgcgccggatggaggaaaagatggggagatgaaactgacatatgggatgggaacggagacggcgtgagagaggagacggaaaaagggaggggagtggcatagttccaattttagaaatttccagtggcatatagccaatatgacgaataatattggcatttttttaatttcacaaagttgcagtggcatggatccaattaaaaaaaaagtctttctactacacttacaagtggtagtagtgggcaattttaacatgatagataacacattgatttcacaatctctcttgatgaacacgttggcagcattttcataatacaaatttatgtttttgaaaaacaaaaacaaaaaaaaaagataaaaagcacaaacgggcgtgttttcaatgagaatcaatgtttgaataaaaccgaaaccgtatttgattaggctagataagcgaaaaaaagaaataaaaggcaaccgaaccgatcccctttggagcggcaaacaaaccctagctgagtcgagtcgttcgaatcgaggagggatcgatggagggcggaagcggcggcgattcccagcagttcgggaagatggttgtcgaatccaaatccaggaggaagagacggcggggagggacgactatccttgcaggcacaatggacacggaaggaatgatggatcaagaagaagagaaggaggacgacgaacaacctgctgatgttcttgaggataggaagcatcgagatggatccatctacaggggtaccgattactggagtatctattatcgtatcgccgataccaacgaaagtaagagacctcctccattcccaccgaatccaatctcctttcttagttctattatcattcgaatccccttgattcctccctatgtttttttgtatgtatataagtatattgattgattgtgtgtatttggctggctcagctcactgagccgatatactaatttggatgctgtaacaccctaaaaattcgaccgacaaaatcaaaactctaaaaatacggatcttcaaaaaaaaaaactttttaaataaattgcatcatgccaattttattggattttgatttcggaattcatcgatcacaaataggggaaaattaattagaaattaaccctgcaattagatttggttaaagaaataaataaattataatttaaaataaagattaggtgggatagaaataaataaaatattatcgcgaccatatttggatcaattaaatttaaatacgatggaataagaattaaccctaaataaaactcaaataaattacataaaaataaaatatgagtaatattaatctagggtgaattcattagttgagataatacacatattgagtaaacttcatttatgcaagatttagaaattatagaatcaaattcatataggaaataaactaaaattggaaaaataggaaaaagacactattcattagcctctaggtgttcgacgaggctccctagccccttcccctcccctgccatgcgcgcctcgcgccccgagccgtcgccgtcgccgcctgccgccgtgccgccgtcgcctgccgcgccgcgcgccgctcggccgtcgccgtcgccatcgccgcgccgcgtagccgtcgcgtcgccgctgttgccgtcgcgtcatctcgagccccgcgccgccgctgccgcgctgacgccgcctcgcgccgcgcaccactgccgcgcccgcgcccgcacctcgcgccgcgtgccgccggtgcccgcccgtcgcgtcgcccgtcgcgtcgcccgtcccgtcgccgctcgtccgtcgccgtcgcgccttgcgccccgcgccgctgccgtctgccgcaccacgcgccgcgcgccgtcgcccgtcgcgtcgcccgtcccgtcgccgctcgtccgtcgccgttgcgtcgctcgtccgtcgccgtcgtcgctcgtccgcgcgccgcacgccgccgcccgtcgcgtcccgccccgagccccgtgccgcgcgcccccaccccgagccccgcgccgccgtcgcgtcttcccctccccttatctctttctcttcccctatataagccccgctattcccctcttctcctccgtctccaccccctatctctacccactcctccacgccaccgcgccgccgtctccacgccaccgcgccgccgtctccacgccaccacgccatcgcttaaagccgccgcgccgccgccacgaagccgccgcgccgcgccttgcgccaacaccgccaccgtcgctgtcgccgccgttgccgtcgccgtcgtcggtaagccgccgcccaacctttcccccccccctcgcgtccatcgtcgccgccgcccgggagagcaagagccgagagagagagatagagccgggagagggagaggaaaagagtgccgagagggagaggaagaaaagaaaaagagaggaagagaaaaaaaaagaaaggaaagaaaagaaaaggaaaagagagaaaaagagaaaaagaaaagaaagagaaaagagaaaaaggaaaaatttaagagatttagaatatttaacatattagaaattaattataggattaatgagaatatcgttagatgaactcctactatttaaaatacctaaagtactaagatttgattatagaactaattatttacgaattaaaacaattagatgaatcttaatagattgttatagattatttttagtaatgtctataggagatcaattcgcggtaataatttagatcaattcgcggtaattattatagattattttgggtaatccctataagtaagcaattaacgatagaaaattcggattttattactagggattatagccgtgtaatatatttaatcgtttagtcatagactaaattaaatcatataatgtttctaggattttgtcagatagttagctcgcgctagaaatctctaacctattatatggatataatgctcaggtagattaaattaaaaatttgtgacaataaaacatttatacccgcaaaatagtttaaatcgaaattgggtttgtcatagttcgcagatagtaaaattaataaaaaaaggaatcgactttcgcatgtgacttttatttggatttatttggatttttatttgaattctaaccgaattcaaatcaattcttgcacgtaactatagagcccgagggagttgcggatccaagcgaaggccaagacccgcaagactttgagcaaggcaagtcatcactattctttgaacatgttgatcccaattgcgaaattgttttgtttacaaataaaattgcatgcaattatgaacgtcctacttgtgattataccatgccttgattattgttcacctttaaatctttgtagccatagatacgtacgagtccctagtcaactatgacacttgcttagaaatgctattttagattcatgcatactcatatttatcaaacgctatatgcttgggtaattacctttgggaaggtaattgagatgcggcatgtggagacatgagcgccacattgccatgatattgatgacatgatttgtgaaaggaaaataaagttaaacaactgttttcgactggggcggctggaggacttgggtggtgtccggaaaaggctagtgccgtccctggtcaattaaggaccgagccatgaagttaagcatgaaacgacccccgtacaaccgcacttctcgtatgggtatagacctagcggagtagatagctgagcggaggcagtatccatgcatagtggtttcttgatgtgtgaggcaggggctctacggtggggcagccattggtaggaccgcgaggcgggtgtctacagtggtgtcgccatcggtaggactgccatgtgagaatctaaaacataattataacttaatgcatgtgtgagtcttcccttcccgggtgcgccagaactcctctcactgctagaaaccgtgtacgcctagagtgcatgaggatgagaagttcatggagcgggtactgccaatgcgaggttatcaaaaagctttgccgtgacgcgtctcatgtgttgggacgaggctcatgtgttgggcagtcgcggagtgcgggtaaagtgtacatccactgcagtgtgagtaaaccaaatctattcgaatagtcgtgctcgcggttattgagcaccgggacatgtattacacttggctagactctaaattcttaacttgtgtgggaggggatattgcatgatgaattttatgctgttggagccacttcctgagaggcgggaaggtggacgtcctcagaaaaccatgacgaatcaatggcgggaagctatccttgggatcacaatggatggtggacagaaccgtcgttgtttaaatacaaactctggtactaaaatttgatcagtcaatgctaggtcttaggcttgtgaaaagaattacaaaacttgctttgcgcaaaagaactatggccatcctttgaactccccctttcatatgcattgttgctgtggtggcttgctgattacggttggtactcatccttgcaaatataaaatttatcagaagcgggagatgaagcctcggaggatccctatgcctactatcaggagggagatgaagacgatggcgtccagtaggtcttagtacggtcgttgcctgtggcaatggcatgccgctgcctgaattctgctgccttatctatttctgcttttggatgtattccggacctctcggtccgatgatttaagactatgcctgcgggcctatgatgtaataattcgtattagatactcgtgtatgtgcacttgatattccagctatgaatttgtgtgtaccaaactacttgatccagggaaatggtactgtttacacgattgattcctgttataaaaacgggggtccacagatgccctattatattgcacaaaatttccccttcttcctcttgccccctctggctatggcgcactcccgctacgctgctccagattaggagccagcctagggcgtcatagacagccggagcggaagagaattggcaaaattatctaaaccgttatattagcctgatgtacatcatcccggtgcttcttcttcttcttcttcttcttcttcttcttcttcttcttcttcttcttctttaaatccatgcgtagacaaccaaatttacagaaactcaataatggctagtgctatccatcacccaatctacttactgcttctacaaatttaactcgctgattataataataatttttatatagttattcagtgttcttacatgtcgctgtctgattgttgtatcagctccattgaagccgatgatgctgtctgatccgaccacggattgccggcccaactggtctggttgcatcgtccactcaggttcttccatgttgcagatcttctcactcaagctggtctccatcactgcccctgctattggtgatgaccccattcaggtgtatggcttcatggctgttcgagatcatatggattgcttgcgcaactatgtcttcaaccgcgggcgcgacaaaccttttgtcgtcagcctctccgatccctttatactcctgtctggccctaagagaggcattgggatggaaactcctgcactgcttgagtacgatataaggatcaagagaggagatggagaagatgatgatctccagctcatagatagagctgccactatcagtgagaccgagctacccctgccatatgcccaagcttacacccgatggattgccggcgactacggtgccatgaacattagcttagcacttctccacaacgccatagaggccacgatgcacatccaaataaccgaagtgcgtggcagcggtggcttcgacatgtctatggcttgtcgtgtcggtcaaatacccaatgaaatcaagctctttgaaagtgttgccattgccaagctgtgtcagctaaacaagaggtttgtgcttgccattgtcaagcgcggcatcttggtgttagacttgaaggttaagcggagtggcgccttagaggaggaggagccagtccgtatgctccgtggcttgaagggaaaagcacatggccaagtcatcctacctatgatatttgattgcgccaccattttggttagtgtgcattggtcaaatctgccggcccccatgttagactagccacaaggttcttttttttactttgttagcttctttatatatatagcttatgcaaattcttttttatttacttgtgtatgtttgctagtcatctatctgtaacttgcaagttagtatgcaaatgatttggtttaaaaatgccttatccaggagtgtattactgaatctggtaattttgatcagtaaccttaaaaaaaagaagtgattaagtgttggaatgttagtaatatgaatggttgtttcaggtacctattcatgccggtgtcagcaaataacaatatactaaaacactgtgcaaaattgaatggtggtgcgggaaaaaaaaatactacctccatttttttaatagatgatgctgttgacgttttgtcacacgtttaaacattcatcttattcaaaaaatttacgtaattataatttattttgttgtgaattgttttatcactcaaagtactttaaacatgatttatatcttatacatttacataaaattttcacattagtgaaatctttcttctgcaggtgttacagactgctgttcgccacagattagcaaaagtccaggggtatctaaaagcaaaggaacgcagcagtagaggaaatttgatggggaagcgtgttgatttctcagctcgtactgtcatcacaccggattcaaatattataatgaattggtagtgccatggagtattgctttgaaccttacatacccagaaactgttactccatataacttccaaggtaaaatgctttactgttattgaagcatgatcactgttttttaatgatcacttatcccccccccccccccccccctgggaagacaggtgcaaagtacattatctggggagacgctcaaaggcttgatctttgttatgtgaagaaaagaactgatcagtatctggaactgggttacaatgtgagtaccaactttgtttcagaatctgatttttactgatggtcacatgacaataatgtcttctatattagtctcctcatatggtgttttattttgtcaggtggaaaggcaccttgatgatggtgattttgttcttttcaatcggcaacccagtcttcacaaaatgtatatcatggggcatcgcattaaaatcatgccctattcaaccttccacttaaacttgtccgccacttcgccgtacaatgcagattttgatggggatgaaatgaatatgcatgttcctcagtcatttgatggggatgaaatgaatatgcatgaataagtatttatccatgtcctgtcaaaaacagttagttttccacgatatatataattgtccaatgtttggaagttccagaaacagtttacacgatctgtatgattagttgaaaaagcgtgttaactttacacttttacaatccatgcacttcggtgatatgaccttcagttaagcattggtcggcactttctgctaatctgaaaagctcatgcaagcacgcggctatgcattgtccaggatatacatgacatattcagcaacaagctatgattatcacttgtttcccatcatcgacatggatctacaaacacacacacagtactacaataggagtactacagtagatcagtaaggaaggcattgtggtatttgtaattgatattctgatagagcgattcagttgtgttgcaaataataatatttgcctatacaagaagcttcaaaaacaacatagacgaataatgtctaccacttactaatactactactactaagctttcaaataaatcaaagaattcataaatgaaatataggagtatctctgcttctactctctagcttgctctgtttctagtctctagctgactgacaagttcatttccttcgatttcatcttcaaattctgctcaagagcccagctgctgcatactactcattgcctgcagaagcagcagccacatgccctgcgccaccttcttcgctcggcccggcgccgccctccggccccggcctgatctgctcgagctgccggagcacctcccgggcatcaggtctcaccgacggcgactggtccacgcagtgcagcgccagcttcagcgtgtccacgagctcgtcgcccgcgggcccattgtcgccgtcgcgcatgagctcgaggtcgaacacctcgctggtccactcctccttgacaatggacgccacccactgcggcaggtccatgccattggtggtctcggcgggggatttgccggtgaggagctcgaggatgatgacgccgaggctgtagacgtcggtcttggcactggccttctttagcttggacagctcgggggcgcggtagccgagggcgccggcggcggcgaggacgttggagttggcggcagtggtcatgaggcgggagaggccgaagtcggcgatcttggggttggagtggtcgtcgaggaggacattgctggcggtgaggttgccgtggacgatggtcatgtcgtcgtggaggaaagccaggccacgggctgtgcccttggcgatcgtcatccgcgtctcccagctgatcggagtgttgggcgcgcgagctgcacattcacgttatgccatcaggacgaaatgttagtgtcaccgtgtcagagttatgcagattttcagttcatcaggatgaaatttcagagccagaaagctgaataatgttgataaaacagtgctactaaaacaaaagcatgtcatttagatcaacaattgttcacatattagcctcaaaactacataatatgtcaacttttttaattgaacatgacactctattactaaactttttgcactgaccatgaagacatatagccactgtccaaaattttcagaagacatgtaatgctcaatctctaaattggcatgggatgttcattcttatgctaaataaaaaaggtactcagcactgtaaaaaaaattcagatgtatcaaatctacttgattacagagctgaatcaatgttagcagttagcactgccagaatttgcaaatgttcagactacaacattttctcaaatgttcagagtagtttcagttgaaagcagaagtaaaagctgaagaatgcatacagtttatcaattgcattgtcttcctaattaataggatgaagatcaaatgcataagataagaagagtagcattgacagagtattgaccgtggaggaactgggagaggctgccgttgggcatgaagtcgaggacgaggagcttctcgcccttgggtccgaggtagtaggccctgagcggcagcaggttggggtggcggatcttgcccagcaccgccgcctcggactcgaaatccttgtgtcccttggtgatcttctccctcagccgcttcaccgccacaaggctgccgtcctccagcgtcgccttgtacaccgtcccgtacgtgctcttccccattatctccgccgtcgcacacagcaggtcgtccgccgtgaacgccatcggcccgtcgaagtgcaccagcttccctcccacctctcccccggactccacctccgccgcccccgaccccggcttctcccctcgcccgccccccgccgcggctccggcgccaccaccggctgccttgctgctcgtcgtctgcttcccgccgcttccggacctcttcttcgtcaagaaacagagcagcatgcagcagagcgccaggaagagcaggatgccgaccacgattccggcgatgattagcgcgagctccttggtcgtgaacttccggtggcgccccgtcgcctcccgtgactgcgcgggtgatgccggcgcagatggtgatggagacggcgacgtagggcagggcacggaagcagagtagccgcagagctggatgttgccggcgaaggcggaaggcccgaatttctgcgcgagcgaggctggcactgcgccggagaggttgttgttggagacgttgaatgcttggaggctagtagtgaggttggacaggctggccgggatctcgccggtgagggcgttgccggagaggtcgagcgtcttgaggtcggcgagcgagccgagcttgttggggatggtgccgttgagcctgttgccagcgaggtccaccacctgcagcttctggagcccggagagcgactccggtatcgggccatcgagcgagttgtgcgagagctcgaggacggcgaggttgtaggtcccggtaatggattccttgagcgaggaggaggagggcgccttggagccggcgaaggtgtctgggatgtggccggacagcttgttgtgcgagagggagaggaagacgagcgagggcgaggcggcgagctcgggtgggatgtcgccggagatggtgttgtggctgaggttgaggcgcatgagcttggtggagttggcgagtgaggacggaatggcgccggtgaggaggttgttgctggcgtcgaacgcctggagcgcgacgcagttgccaatggaggccgggacggcgccggagaagcggttgttgaagaggtagacgccgcggaggtcggggaggaagccgagggaggttgggatggggccggagatggcgttgtcgtggaggctgaggcggcggagctgggtgagctggccgatgcgctcggagagggtgccggcgaggccgcgccatgggagggtgatggcgacgaccttgccctggacgcacttgatgccgacccatgcgccggagcaggcgccgaggccggtgtcgttccaggagcggaggaaggcgtaggggtcggagaggtcgtgcttgatggcctgtaggccctggtagtcggcctggctgatgacgacgccgtcgcccgcggcgtggacgtggtggtggtgcgccgcggcggcggcggcgagcgaggggaggagtgtgacagtgaggaggagaaaaagtgtgcagcgatggtgggcggggaatggtccgagcatgagcatggctggttgtttggcggcaggagcaggtggtgttcgcctccgtggtccttgcatttggttgatggaggagtagagtagagtagatgagtagcggaaggaatttgtgagttggtgatcgaggaggaagaagatgaagctggagcgcgcgcgcgcgtctgtgggctgtggccagagcagagagaggaggagattagcagaggagaggcgcaacggctagtaggagtgcacgggagagtactgaccactacgaatgctgtcatgtggcgacggcgatggcccccactaccaactaacggctacttcttttttttttcttttgtcgtcgttttttaaggaggagattttgttgtgtttaataatgttggggagagaagccaaagcaacgggtgggatggactgtggacccgtcctttagttggaccaggtatttcttttgctttgggcctggcctactattccgatcttgtccagcttgttggatttacagaacataaatagtccaggggcttctgccccaccaaattactactacctccatccgtgcctaacgtttgaccgtccttcttatttgaaaaatttgtgaaaaatttgaaaatatttagttacacataaagtactattcatgttttatcatctaatagcaataaaaatactaagcataaaaaattttcaaataagacgaacggtcaaacgttgaacgtgaatagtgcaaaactacacttattttgggacggagggagtaactttcagatgttcacgacataaacccacctggacgatttgccatgtaacattaaggtattatggacataaaccaacctcgagtaataaacagcattggacactattcattatgtgttcgtgtcactataaactttttgagtgtcaccctattttttttaattagagtacaagaacacacgcaaacctacctctttgaattacacagtacaatgcagatacacacacgcaaaccctatctctatgagcatcttccaacctctatgagcatcttccaagactgggccaaatccttaagattgacgaagtccattaaatcctagaaaattcgcttacatggggagtcgaactcaggacctaaggtgctactgaggtcttgcaaccaataggttacaggtcctttcgcggtaattccaaaaatagcaatgccaaatttcgataaagttcatttaggcagtaataatgtaaacaggcctgaatataagctgaatagatttcgtctagtatgcaacgaggtagagggaggcagagctaagcgtggcatgaagcgagggaagacgtgggttcgcaatctgagccatccgaaaaatgaccaatggattacaagatttcaggcaatccccttgtgtaatgcatttgccaacagacttgggctaaagatgtatccaaaccaaggtctcattagttcccttgagcgctctctctcccccatcgtcaacaccaattcctgatcccaccaagttgaacatgacaaattcctaatcctaaataaacgtttactgccagcaagagccctcggccgtttaggttgacataacaaacactgacaagaagcagacaaacgaaatctctcatccttgtataatgttcaaatgaagatgtacaatatcagatccaacattatttgattaacctagattcatgtatatcatctttacagaatgagatggcttatgaatcatccatcaaaccaaaacaaatttgtgaattttataacagaaccggcacgattgatgagacggatcacatcaatatcaggatcaataacagaattcttctttttgctctcaagtttctcatacatcaaatgcaaaaggaaacaaaactagatcatcgacaaaatcatatatgcatcttatagcagtatcattctcccctaatttttttttgttctacatcgatcaccatacgaataaatgatagtgtttgtctcataggtataatataaaaagaatttatgacctttgcttggaatgcatgcgcgaggaggaggatcagacgcggcctccggtggcgctggtgatgaaggagagcaggttgacggaggcggcgccgttggcctggtctggctcgtcgaggaagaggtcctcggggatgcggaatgc

SEQ ID NO: 8873 - DNA, 6342 bp, Oryza sativa
  unsure (1)..(6342): unsure at all n locations
ttttttaagacattagataagtgttataagttataatcaattgtatgtaaaatgatagaactagatatattgtttgctttgagatattacggccttacgaccagtagtggaaccaccacccgacgaaccatccagtagaaatttaatgctaatgtatgataaaaaaatatttttttctagcaaatactcaatgcaattattaggttattccgggctttganatattgtgaagcagtctctcatgttttgggatggagggagtagtatttttgttgggtgagtaattaaattgcagtgcagtacttggaaggagggggaagaataaatgggagatttagtgggccgcctatggatgtgtcgcacaaactaaaacgagttattgctaataaaattgtgggcagcacttgtggcgtggttgaatattcaggcattttctttcttcgcaggcgaatggcgtggtcggccggtcggcctcgtgggatgacctaccctacttaacatgacaattacccatacacatgggacatactccatcttgacacgacatgtgtgtgtatctcatcaacccatacatacacatctccgtatatctgatagaagtatgacacgtgtacagctgcttgcgaagagatactagtgcatccactcagctggatcactgactctaaattttggtagtggaaatgcacagcaaattaaggtgaggtctggccctttcatttcatttcttttgacctgcttcaatcagtccatagtgccaccactatggaaaagaggagctatctatagctagttacgcactgcgtttcgccgatattttactacagaaatttgtgtgctttcatcttcttcttaaaactgtatcttctaatagcactagtatttggtaaattgcttgtcttcctctatcagtttaagctttttagttgaaccaatccttacgtgtgcaactcaataagtacaaacctaaaattttgcacttaccaattggagaggaggtcaagctgcttctgcatttctgaacatctgcgtgcctgatcttcagtcgtgtggagggagactgaaaacaacacaacagtatgctcgaaatctgacagtttccaatgcatgtataatagtgcgtcaaagcttcagaggcatgcagtggaatttcccagccacgagtttgaataactgaatagctaaggcaccagccaaatgttgttattatgttaattgcaggtttgaccggtgaattagtaggactgtgaaatggacgagaccataatcaggcatgctttgaacatgcatggatttctagttcacgtgttgccctacttgcgacatcccgcaagaccaaccacaagtcaaaccaagtctgaatttttcttgtttttgtactacaaggagcaacgaaattaacaaccacgagtttgaaaaatatcataatatatacttctgtctctgcatctcggcatgtttttttccatacattttttttttggagtaccaagagaagaagagaggaggagatgccatgtcaccatcacaaggcctggttttttccaaggagaaaatgaaaggaaacaaagaaatgcaacagactacgaaacttggagccactctctgtctgtgtcccatgtgcattgtctgcacttgtcgataactaacgcccagatataatagatccacatgtaaaacaaggcatgaaaataatgttgtttttcttgtaaaaaaaatacaaggtacgcaagaaagcaagcagcgcgagcatcttgtttttcttggccattactccctccctccctaaatataagttattttggttaaacgtgacatatcctagaataacgaataacgaatctagacagaaaaagaatatgtcacattcgactaaaatcctttatatctagagacagacatagtataatcccttatatttagagacagacagagtataatctcagtagagtcagtattcacacccacagtgaatgaatacacaacatttgttcctcttctttttctcataggtaatcgtcactagtctgtattttgtacacgagagacgcatgcatcgcgtggcaaacaaaaaaaaaagaaatggagtaattaagcagcagcttcccgctcttgctcggcctcgccattgcccgcattggccatggcggcgccaccggcgacgtcacctgactgtggctgctctgtcgccgcggcggattccgacggtctcgatgccgctgcaacttgctgcctcggctgccgtatggcggccacggcctccggcatgacgacgcccggtggctgtgggggaacccagcgacgctggaacgggctttcagctggtggagctggagctggaactggagctggagctggagcttcatcgatggcgttggtggatccatggtgatactgctgatacggaggagcaccgtggtagttcgtcaatggcgagccagggttccacctgtcattgctcatctgaggctgaaatccgtacccaggcctctgcatccgctgctgctgaaataagtactcacacaccatcaagttttggaatactatcatgtctactgcacctagaatccatgatcatacgatggcctacctcaacataggatctcgccggaaatgctccaggtgaaggttctcccggtactggcatgaacggatgcctccctgataaagataacacgaaagagggcacacaaaataagtgcaaggcagaaaaaaatattctcaggtgatgatacaagaaagttgtgctgcttctggtggaggctacttaccggagtcaaaatcactgcgtggtgatgtgttgtatgcgtttgtttgctgtaaatagagaaaccgaatgagaactacaacggaatgatgcaaagattaaaaaaaaaggtattgacagaaagggtaaataagaataatgagttcacaatggggtaaataacaataagctatacctgagaagctctccatgaatttgtagttggccctattcagacagataacgtcaatattagcaacagatttaaagaaaccaatgcaacaaaaaagaattgattctaaccattccatggggcagattgaaaatgatcctccattagattgtactggtaaaacctattctcactcatacgattcaaggaatcactcaaggatctaaacgcctctgcttgcgaatcaaatgcttgtgccaactttgtaagtatcttcttatctataaacaagtgagattcattaagacgatcaaacccgaaacagtgatagctattgtacatttcttctgctaaaacatgctaatgtatcaacggaaaattatgaaaccttcatcctttgaagcaagcaactcttggtttgttttagcaatatcagaaaacgctgatgcagaatcttgtatggctgctttgatttcttcataaaacttggatttaagttcattcccagaaatttcatccccttcaacatgggctccttggatccaagattttagcctaggaacaaacaatttctgtacaaaacatgcacgcatatagagttaatttctcaagaacttgctaaaattaagatagtctgcaaaattcacgagatataccttgaggatgacagcagcactagccccaactccgaggaaaacacctacaccaatgagagtacgggaccagctaagttgcggctgcgcatgtggaacgataggaccagtgttaatggcttgtggtgcttgaactgtctcgtaaggttgtactccagcagattgatttgcgatgccggctggaagcaaagaaaataacacggcctttaagtgatcaagctaacaaaaagagtttatttttcagtgtattgtaagatttttgggtacagacttgcaatcacagatatgaactactatcaaagcacaataatttatagaaccaatctaaagatctaaaatcttgatgtaatttgaattaatttagtgaaaaagagctgaaaataagacattccaatcaagtaaacaaaagaaaagaagctgccaatagatcatcacttgagcaaactcagtgaaaccaataaaacttctgcatgttgtgtgcgtccaagttaaccaacaacaatatagcaaagcctggtggctattatgtcataatactatattaggacaatccactcaaccaaaagtaagacaaacgcagtgatataatatcactgcaacccattgctgtgctagtgctaaatgtttatcatgtagagcaatagggtaccttgttgtgaagcaacagctgcaacatctgtactgtttggctgtggatcctacaaaaganccaatttttaaaggcccttggttttntccaagggnnaaancggtntntncatncttaattattttcatttggaggtatacaaacagccatgtaggggcggtagaaagtaaatcatacaggaacccgacggaaggcctcgtcgatttcttcctttgtaaggcctttcttttccagaaaagagcgcctgtaaaatactggagaacccttcacttttggatgtccaagaaagttaacagcattctgtatgtaatcctcccgcattggctgtggggtttgaagtaccaaattgtctgagaattcacctctaccagaaccatctgcagcatgagcaaatgggaatgcagttcgattttcaggacaggggaatctgagtgactataactaacaaaataacaagataataactcaaggtttcagaatagccaatttctccccggtggttccaaattcatttggtgctatggacctctaaattgtcgatatttgcagcaaaaactgcagccagccactggacttgtgcccacaaccacaagagggcatgaacttgtcttggctgaatcgcctcaaaagctagttgcccttgctaacgaggctagaattagtgatgatatgagcagccaggactcttacgcttattccagtaggcaatcgcggtacaagattcggcggttctcatgttctaaccctcaaaattaccaaaccctcgtctctcaacagaaagagaagagttgctcataaactcagtcccaaattatatggctaacaatcggcgggatagaaacatcgagcaagaagcgccaagattccaagtctgaagaaaagcgtcatcttgatccaaaggattggacggggagcgccacgattttcggaggatatgagacagtaagagaggggaagaaaaacctgaccttgcggcgagggagtggaagattgggcggccatcggggtagctcaggagcgcacgaatcaagaaagagatttcaggcggcggcgagtcgtcggaggaaagaagcagcgatgagcatgtgcgatattcacatgtactttatctgcacgcggagggtgtttattttgtttcctccaagaaaacgaaacgaaacgtgtcgcttcgctcacacacaatttcatcaaagcaatccccttctcttcttctctctgtgttgccatggataactgtggtgaggactgatggtcacttgcagttcggcatttattctttttctttcttttttctatctactaacagaaggctatgggtaaaaaaaatgtccgtgttttattttgcaaatgcttttatatatatatatatatatatatatatatatatatatatatatattcacttgatttaaataaatatttaaaaattttcatggactgatttataaaacgtgtaaaagtagttgtgacgtgccgatggtagatccaccaccacttaggctgtgcttggaaaggtggtttattaatgcataattagttaagtattaggtaaaaattaaaatgaattaatatgtttttttacacaactttcgtatattttttttttttgcaaacactataacttagccttattcttgtattgtgatatatagaatatcaaagaaagattattccgatcgcataggtggatgtccacccaactgttgtgccgtcgatgcatcccccgagatatgtgcacaggcagattcgtattcggtgatgggcgtgggatatgggtggcacagatcttaaagaacattggatggagattggcgtaggtggacatccacctaggtgtataaaattgattctcgaatatcaaatagtagtaacaagatcctaagcgtggttattttccaaaacaaaaaaatgttaggatttttagtaaataaaatactaggaggtagtacatgataccataataattttttaaagaaactctatattcctcctacctcacaaggaatttttgaaaagataaataaagatgtgctcacaagcattttttttcctacagtattatcctaggtgtgttcggctccaagaaaaaaaagaaagggagtacttatgcatttttcgaaag

SEQ ID NO: 8874 - DNA, 1782 bp, Oryza sativa
agcatataaacttcaaatggctataacttggccatttgaactcggaattggaccgttcaagtctctaatttttccttaagaagtcaagaacccatttttgtgctttgttaatgctttttatatggagtttgttagagtaaaagccttttcttttccgttggtcgtgtagacgctgcagcttcggaggatccgctcttcgtggaagttgaagccggcatttgggaaagcgagcaaggcaagacacatcatccttgaacatattgaatcccaatttatgaaattattttgatttaaattattgcatcatcgctttatttaaattcccgcgttatcactgttttatttagccatgcctatttacctttgttatgaccttattattattgttattgttattattaccttgttcaccctaggataaacaaaacccccaactagtggacactctactcgtggtatcactagtatgattttaggtagatgcttcgctgattaattaggtaacattaggtggttttaaaactctagattgtggtaatattcatatcacttggacacattggatttgttggattgttgtggaattggattcataccgccccctctattcaaaatccccaaaatggttttaggctgggctcggggtgcatggttttgatagtagcacctcggccatataaggaccggtcttcgggcctctgttgcaaagcactaccgtacttccacatgtctagtgggtaaggcttagtttgtggctcagtctggttataaacaaaagtacacggatggagatggacgaagtcgggggttcgatggacatctccagggcaaatgaaggctacacgagctgcggcccggtagtcgagatgtcatgacacagggccggtgtcctgctgctagggggctcagtcctgcctgcctgtcccgggggttccggccgtaggtgggattgggtcggtactcttgtctatggctaggatgggttgggaactatgtcacgtcttccgcctgtataccgtggtggtatgtggcacgtggttacacgtgaggaagatgtgtcttgtgggtaaagatgtacacctctgatcagagtataatctattcgaatagccgcgccctcggttatgggcaagccgagcaatgtacccaagttagtgttttaattcttaaaatttgctcaacaactaaaatgtggaatggttggcctgggttggcttgggacgagctgggactcagggtcgggttgccagttcggtctgaatcatcgtaggccttgggttaaggcaggttcgtgtgggttcacggccttgattaataatattgtatagctctaggatcgtgtttacaaaatagcttgagcaactaaatgtctttaaatgctgtttacttcaaccctaacccctctatgttataattcccttgtactcccttgcatttattctgcacttgtgggtgtgtcttgttgagtacggtggttgtactcagtcttgctcaatttttcccaagcccagaagaggagctccttgaagatgaaggctttggtgtctagctcgtgcctgccgtcaagtgcctgtggtcgtcgccctagtcttccgctgtttctcgtttgtctttgtgtgtgctgggccttcgctgcccatgtaataaattaactatttacgcttccgcttgttaaactctgatttgtatcaacttttgctgtaccttgcctcctgggacaaggattaatgcacgcacgtaaggaatgcccgttgggttatttccggtcgtgacacaccatca

SEQ ID NO: 8875 - DNA, 8052 bp, Oryza sativa
ttttttttctggaattaactcatcagtgacggttcggaagaaacatccgtcacaggtaacttcacctgtgacggactcgcaaacgtcggaccgtcacaggtgacccacctgtgacgggctgttactttcgggcccgtcacaggtgggtcaccctgtgacggctactatataccggggatcatcacctctgacgggcctttatttaggggctcgtcagagatgagacacctgtgacgggtcctaacaagccctagtctagcttagaccaacacctctgacggccttctattaacttgcccgtcagaggtggatgtcaccactgacggccggccacccgtcaaaggtgactggacttaccagtgaccactgatcactgaccaagcccaaaaccgtcaaaggtgagggtttgggcccgtcacaggtgaccttgaccagtgtagtgtggagattaaatttattaattagcagctggctggtagatatatattgtttaattagtgctagtagtagctagcttgagtgaagttgaggtgctccctccgtaaaaaaaaaagacaaaccctggtttccgtgtccaacgtttgaccattcgtcttatttgaaaaaaatacgaaaaaaattaaaaagacaagtcacgcataaaatattaaccatgttttatcatctaacaacaatgaaaatacgaattataaaaaaaatttatataagacggatagtcaaagttggacacgtaaacttatggtttgcctttttttggatagagggagtagcatatacaagtacaaggatgaacaataatgcgaagtggtggctggggtggccattgagccattggtaaagttagcagaaaagaaaaaggctagctgagaggatagtgttaggagagatcgactttaatttctttgtgaaaagaaaggcaggcatggaggccatgatctttataccagctagcagatcgaggagattgccacccctatatagacctcatgtggtccgtcctatataattaaggtaggtagatagaggagagggtgggcgcgcaacagcaataagcattatatagagagggagtgagagagagagaggtggattgatttgaagcagagcgcagcaagcatatagtaggtagatatatatggagatcgtgggcgagtgcgagtaccggggcgaggcggtgttggtgacgccgagctcggccacgccgcggcgctccctctacctctccaacctggacgaccagcgattcctccgattctccatcaagtacctctacgtcttcccgccctccgccgccgtggccgccgacgccctcagggccgcgctcgccagggccctcgtccactactacccactggccggaaggctcaggcaccacgccgacgataagcttgtgctcgactgcaatgccgagggcgcgctcttcgccgaggccttcctgcccaccctcaccgccgccgacttcctccgtgccggtgccaccgccaagccgcacaagtcctggaggaagctgctctacagagtccacgccgccaccttcgtcgccgtcccgccgctcgtcgtccaggtacttatttcattcatttcgtatttattatctcgatctggacgacgtcgctagctctacttattaattatatatcattcattcattcattaacgacgaactcactgatgcactatctagatactacatgattgatgctatatactattaattagttgagtttttgctttaagattatctatatggctgctgcagacagtacagtacatcgatcgaactagtgcgtgctggttgaactagctagcattgatattcatcatcgccggcccgccctattgtacgtagtacgatcaatactctactatgtggagataagggagtaattaaggataactattgatggtatgatcatatatagcagtattaattaagcacccccacccaattggtccataataaaaaaaagaaaagaaaggaagaagcactacttcttcccccctgatcgacctgtacgtgtttgatgatgatgatgagcttgtctgcttttttctgctgctcctatcctactacactactccctccgtcccgaaaaaagacaaaccctggttttcgtgtccaacgtttgaccgttcgtcttatttaaaaaaattatgaaaaaaattaaaaagacaagtcacgcataaaatattaatcatgttttatcatctaacaacaatgaaaatacgaattataaaaaaattttatataagacggacagtcaaaattggatacgcaaacccatggtttgccttttttttaggacggagggagtagttggtgattaaagtggagcttcctcttgactcctgagaggactaatggagatggaactgcaggcttgctgctgatcttaatctattaattagtatatgttagtattgtcatttcctttagtttgcttgtgaccaccaccaaaattaagcagcagcagcagcagcagctggagattaaatttattaattagcagctggctggtagatattgtttaattagtgctagtagtagctagctggagtgaagttgaggtgtactagtatatacaagtacaaggatgaacaataatgcgaagtggtggctggggtggccattgagccattggtaaagttagcagaaaagaaaaaggctagctgagaggatagtgttaggagagatcgactttaatttctttgtgaaaagaaaggcaggcatggaggccatgatctttataccagctagcagatcgaggagccttttagccatatgggatgcatccatattccatcatgggtagcctccatctcttgtccatccaaatttctgtcaccaatccactaagctttactaggagtagatcactaggactagctaatagatttagattgaggtcaagcctgtctatctatcaatctagctaggagtatcatcatatatagtacatgcatgcatgagcaccaacgatttgtcaatttgttcgataccccaacatgaccctcttaatgtacatactcctatccaggagtatatgctcctttgctccttgcttcttagtgagtgagagtaatgcttgacaatatatatctagctagatgagatgagaatgggatattgatttctgcaaaaactaaggctctgttcgttccagggtgtttggggagattgagtctcgttttccgcgcgcacgcttttcaaactactaaacggtgcgttttttgcaaaaaaattctataggaaagttgctttaaaaaatcatattaatccatttttgaaatttaaaataattaatacttaattaatcatgagctaatggctcacctcgttttgcgtatcttcccaatctcctcaatccccttcccctcaaacacaccctaagagtaggttaaaccggccggctacctcaaaagtaaagctcaaaattatatactcactacgcccctacaaagaacttgagaaacgactaggggtcttccagttagctccacaagatagtgggctagacgacctgggttcgaagcctcatctcttcatcccctaatattctttgggttcgaagccttatcccatccttccctaatatttgtgtcttttcccacaaagaacacatttttgaattcctgtatctaacgtttaacaatctgtcttatttttttaaaaaatgatttttttaaaaaattacccacatataaagtcttgtttatgttttattatctaataaaaataaagtactaattatattttttttaaaaataagacgaagagtcaaacattatataaaaaactaaaagatgttcttcttgtgtaacaaaaggagtagtagctatataggtaagtagtcttcatcagtttaaaattaacctcattttgaggatactctcacttttcctcccttccaaagatcactgtagctactagatctctgtggatgtgtgcattcattttgagaattgattgattcattcagactagctttgccaaagcctccaacaattaatatcagccccatcgtttggcctaaacagccaaaaaataagccaaaatttgaatttttgaacttgattttgaagttgattttgagatgcttttaacgtaatttttttaatattggcttttaaatcgctacgaacaaatttataaaatttttacttataaattaatttttattttctaataagccaggcaaaatgggcaaccgatgggagcctacattaataataaatgtaatattgtgcaacgtacgatttgagagacaggatatggacaatacagtatgcatcaatgaattgattgatactccctatgtctcatagaaaaccaatctagtatcggatgtgacacattctaatctgattctatatttattttttatgagacgaagggagtatacggtaggagatgcggaacatgttaacattcaaatttgagtcggtcgatcgcttactaccctccactgccaataatcttgattatcactagtaggagtacactcagtcgtcagtcagtgtcctgcgagctctgcttttaactcatcctgtccagcactcgagtaggaaggagtacactacagtctacagtgcagtgcagtactccctcagattgatcgatcgatcagatggtgtcgtatgttcatcacttgtctgcaccaattcaattcaattttcattcattcaaggagatacagatactatactcctagatagaagatggagtaattaattataattaaatatgtttgcgttgcaggtgacacaactggggtgcggaggcatggtagtgtgtacagccatcagccactgcgtctgcgacggcatcgcaaccgccaacttcctccacgcctgggccgccttcgccgcagccgacctggacctcgccgccgatcgtgacgacgacctctccgtcgtcctccatgaccgccgcgccttgcgcccgcgctgccctccgcgcgtcgccttcacgcacccggagtaccacaccagcagcagcagcagcagcctcctcctcatccagccccagctgatgccgctggcccccgtctccctgaccttcacagcggcccacctccggcgcctcaaggcccggtcgctccgcagctgcacctccttcgaggcgctggcggcgcacgtgtggcgcgcctgggtcctctccctcgccccgccgcccccgcccgacatgcgcgtcaagctcctcttctccgtcaacgtgcgccgccgcctcaagccggagctcccctggacctactgcggcaacgccttcgtgctggcctgcgccgaggccacgccgaccgagctggcggcgggtgccggggtgcggctggtgcaggaggccaaggactgcatcgacgacgactacgtgcgatccaccgtggacctcctcgaccagcggcgcggcgccaagccggacctggcggcgacgctggtcatctcggcgtggacgcggctggggctggaggacgtcgacttcggcaaggggagggcggcgcacatgggccccctcaccagcgagatttactgcgtcttcctccccgtcctcgccgaccccaacgccgtcaccgtcctgctctcgttgccgcaacccgccgccgacaccttcgagcaccattgctgcagctgcttcctcctcgacctcgacgacgaccagcccgccgtacccgtactagtggacaagcaggaccacgacaaccagctcgtgcgtgcccatcatcaacatgacatcctcgcctagtagcttcttaattaatgcactactaattaactactatttccatcccaaaatataataatttttactacctccgttccaaaatacaattatctctgctttacaactcaaattttgtccaaaatacttattatcactatggaatgccaattatcatataatcactttctatttctattgagaaaatgtttttaacagttcgagtggacgtccatccgtttattgcatgtcatctaaatgattatgaaaaaaattgaaaaaatatgaacatgatagatcaatatataatatatcaatccacaaacatgcaagttaaaattcaacttctataaattgtaacaaatatttttgttacaatttatagaagttgaattttaatttgcatgtttgtggagcgatataggtacatattgatagatgtcgtgtttgagtatactttgaacatatttgatcgccatcccgttgacttgcagtaaatgggtggacgtacactcgagttattagaatccatctccgtaagtagattaattaatacatctccataagaccgatattataattaatcgatctatcagaaaaagtatgcctcttttcgatcatttccttttctttccttaattataatttatagtgcccatccggctagcttgtccatcgctagcagccatctttgatacgcaaaatgatatgatatgatgcaacatttatcaaattaattaattatctaaagcttaactattttcaactcaaaatttaattaagtcactaacagttaaactagtctgtctgatagctagctccaacatcaccttaataattaattagtaccttttgtgtcatgtcaccggcggaattgaaattagcaccgacacttttacaaagtgtagtcgtggtatctcaggcaaatctgaaacagattatcatcatgcatataatattctactgtatattaactatattgatgcaaaggtgacggacctagctgggctaataattaatttacacaagcttcaattccatctgccactagctttctagtaccttctaaatatattaaaaataattaaggtcatatatacttagcttattccacaggaaaaaaaagaggataaataaataaaaggccatatgtaaaagcgcgcgtccttaattactacctttatctctaaaagagtgtccttttataattatagtcaaaaaaaattatgaacagaggtagtgatggttgggtgttatatttgagatgaagagagtatagagcaaccacaaatttatgaattaatgcgtagatgatgcatgcgcgccacgacgcgttgatgcagatccaatcgagcatatatactagtatgagaggcaagagatctcgaattcacgatcgatatatattcaaaccgcggccagtcaaacatatcaagaaaggaatacccatcaattacaaatagtgagagagatatataatttttaaaacataaataagagctaactacgaatcgcgtgttcgatttttcgtcacaaaatagggtgcccatcctcctcgcggccatgcttctctccgactttatcctggtcagatgcatgctgtcctttgctacctcttcacatgcatggatgcacatcagccatgctcccgtaggggtgtagacacataggcctgtgcccatatacaatggtatataatcaaattataaatcagataagtagtttgagagaatattcgtcttgaaggttaatactctctctgtttctaaatatttgatgtcgttgactttttaaaatatgtttaatcgttcgccttattcaaaaaatttaagtaattattaattattttcctatcatttgattcattattaaatatacttatttgtatatatatagttttacatacttcacaaaaggcatttcattatctggacagtcattctgagaaatcctcaaccacgattccatcaagcatgttgtcccgcatgaatgacaagcataaggatgcacggacgacaaccaggtgcatccatcgtgatcgtggtgagcactgagcactcccataatcccactggccaatgcagacagcgccatgaccatgaaagtatccaaatggtccatctcattctctgcaaccgaatcctccgatccgattccctgcacgacgtgctccaggcgcctctacatgcttccggcaactcaccctgggactgggagggctctacactctagttggtacaaaatcgaaagacaatccatgcatgctctctctctctctctaggcaaaactgttactggcaaattacaaccatgaaacttcctaccatcaaacaaaaatt

SEQ ID NO: 8876 - DNA, 5089 bp, Oryza sativa
tcattcaccaaggtgtcgacgatagtatcaatgatggcacccaaaatgacaaccctagcaattgtgactctgagaaagactccaatggtgatagcaactatggtaccactgatgccaatgttagcaaggatttccaaccaccaattccaactccaagtcagaatgatcgtccccagacggatagctcagcaaagaagacgttgatttgctacaattgcaaaggaccagggcattactcgagggactgcctgcatccaaggcaaagtcgatctccacattaccgccaatttacacgaagcagacatcccaatcgtattgtggtcactggagcaaacgccgtacccgtgaggcctcgtgttaatcagaacccatagcagaaacaatgtgccgatgctaagcacctttccttttaggcagtgcttagtattcatgtaatgagggagaaatgtgtaatacagacaagttctatgagggttcttttggaagatgtggatatgtgattatgtgtataattgcttactgataaaggagacctagggtctcatttcagacgaactatgttctaacctcgagttaataaccaacctgttgatggaaaagaaaaccaattaaactgtgttgggttaaaaagccaatgagacagtagttggggataggagtttggatacgccttttacagatcaagataaggattgttggatgaaacccataagggtacccgccatgcctctacattgataagttcggatatacctgcaagcagttaagaagatccaggagacatcaatatttgagaacatagtagtcgatggttggtaattaatctatcaggtatcagaaaagggtcaaaggtgatatggcagaagaacaatttggatgctccccatctcgaggaagcactaaagatgatcatcggcaattaaaccctagtggcatagatacagatagcaagcaatgtatttccctgaaggtagtcagtgcagctttttgacgaaccacatcaaggtttcactgaaaggcagcaagccaaaggatctcatcgtccccagaagcgtccgcaatccacattaaagaataccacctgttagaggtaagccgaaagatgattgataaaagagattggcaaagatgttctctagcatgaaagaagtaggccgaaaggtgattgataaacagaaacatgctctgcatcgctcacggaagacccctgattgtaattgccccgcaacagtcaccttgtcattaagtaagcaagatgacctaggtaaaagtgtttctaggaaggcaaagagtgaaatcttccactcggtatcagatgctacacggagtgaaaaatgcaagcaccggttaccaggcaacgccacgtcctggagatgatccaatgggaaagaactcatcaaggttaaaggtgtaaaggaatacgttgaatgctaactgatgacaacatgaagagaatagcggaaagtaaactgaacataaagaaagtgaatctgagttgcttgttcgtgagagctattcccagttatgaatcaagtgatatgttcgaagatagtctacagaggtcagtttaaaatcacatgtaacagcgaagcctcagatttggcaggataatgattagacaataacaaatccagcagtaaagccatttgggaagacgtcaaagtatatcaagtaggataagttggctctcttgggaagcataattcaaaggcaaagttatcgacccttgcatcaaatagcagaagtagctatcacccggagaccaggaaagctaatatgacgcagttggtggcgagttagaagtaaatgacaagcatggtattctcatgatgacaagcatggtatcttagtaatgacgagctgatctcgacgcatgacatgaagcgggtaacttgtatgaggttgacgccaaagatatgaatgataagaagttctagaaccgaagccccatcctcaaccaccgcagcctagtctgggtcagttagaagttcaaccagggacaagtcgggtgaagagaagattccatctgcaacaggagatcgagccaagcgttccagagtggagaagttttgttaggcaagttggttatagaagacggagcggaagaagtcagacaagaagagaagactgcccaacctatcttcatgctagcctcctcgaatctcggggacgagattcttgtaaggggggtggatttgtcacgtcctgataaattcatcccgaaataaaaatcattctctaaaaggaataatagaattaattaaaatttgaaaagaaattggcaaacattaaaatacgtacaagaaaaattcaaatgtgacccggagaatttttgttaaattctccttggtctaaaaggagccctcaaattttagtggaattttcagagcacaaataataattattaagaaataaacaaagttaaaatagttttataaaaagaaaaaccctaaaaagtcttctttcccccccttcccttcttgggccggctcggcccaattctctccctccctctctctcctctcccccgcggcccatcggctcctccccgcgcgcgcgccgctgacaggcgggcccgcccgccaccctcgctgacgggtggggcccacctgtcatcgccttcctcccgccgctcccgccgctcgcccgtgccctagcgccgccgccgccgcggattccgccgcatcccgccgtccccgcgcaccataatgaggggggaatcattccccgcgattccctctcccgattcccccactttcccctctctctctccctcggattcgtccgattttgtgcccgcgatcctcgccggcgcaatcaatggcggccgagatctccgcgccggtttccatctcctccggccgctttccctctctcccgacgctttttaattgttccccgtgcctctctcctccgtttgcgccgttcgccgctcgctctcaccgtcggaatcgcgctcgcgccgctttcctcttctccgcgcgccgacgagttccggttcgccgccgccgtcgctccggacttcctcccctctcggcgtcgcctccttcggcttcgccgcgtcgtcgtcgaccccgtccgctcctccgtttcgctcgccgaccgtcggagcgccgtcgtcctcgtcgtcccgaaccgcgccgccgccttcctccgtttcggccgccgttcccgtcgtcgccgtcgaccggggtgagccgaagaccgctccattcgcttcccccttccctcctctctctcgggtgccgctccgccgcgccggtggtcgccggcggtgaccatcggggcgcgggcgcgtccgcctcccgtcggccgtgccggcgaggctgccttcgggcgcgccctcgcggctgccaagtgggcccggccgtcagccgcccgcgcccgcgggtgcggctgacgcgtgggacccacggcgccgaccgccgccagccgcgtgcacccggtccaccgtggaccgagaggctgacgcgtgggccccactcccgtggacccggtccgcgcgcccctcccgtcgcctgatgcaataaatccgattttaaattaaaatttaaatgaagaaattcgtaaatatccatttaaagagcatataaacttcaaatggccataacttggccatttgaactcggaattggaccgttcaagtctctaatttttccttaagaagtcaagaacccatttttgtgctttgtttctgcttgttatatggagtttagtagagtaaaagccgtttcttttccgttggtcgtgtagacgctgcagctcggaagatccgctcttcgtggaagttgaagccggcgtttgggaaagcgagcaaggcaagtcacatcatccttgaacatattgaatcccagtttataaaattattttgatttaaattattgcatagtcgctttatttaaattcccgcgttatcactgttttatttagccatgcctatttacctttgttatgaccttattattattgttattgttattattaccttgttcaccctagattaaacaaaaccccaactagtggacactctactcatagtaccactagtataattttaggtagatgcttcgctgattaattaggtaacattaggcggttttacaactctagactttgggatattcatatcacctggacactttggaattgttggtttattgtggaattggattcacaccgccccctctattcaaaatccccaaaatggttttaggctgggctcggggtgcatggttttgatagtagcacctcggccatataaggaccggtcttcgggcctctgttgcaaagcactaccgtacttccacatgtctagtgggtaagggcttagtttgtggctcagtctggttataaacaaaagtacacggatggagatggatgaagtcgggggtcgatggacatctccaggacaaatgaaggctacacgagctgcggcccggtagtcgagatgtcatatggcagagggttggtgccctgctgctaggggctcagtcctgcctgcctgtcccggagattccggctgtaggcgggattgggtcggtactcttgtctatggctaggatgggttggaaactatgtcacgtcttccgtctgtataccgtggtggtatgtggcacgtggttgcacgtgaggaagatgtgtcttgtgggtaaagatgtacacctctgatcagagtataatctattcgaatagccgcgccctcggttatgggcaagccgagcaatgtacccaagtcagtgttttaattcttaaaatttgctcaacaactaaaatgtggaatggttggcctgggttggcttgggacgagctgggacccagggtcgggttgccagttcggtctgaatcatcataggccttgggttaaggcaggttcgtgagggttcacggccttgtttaataatactgtgtagctctaggatcgtctttataaaatggctttgggcaactaagtgacttttaaatgctgtttactgcaaaacttaatccctatattattattcccttgtacctcccttgcattaatcatgcatctgccggtgtggcttgctgagtactgtggttgtactcattgttgctcaatctttcccct

SEQ ID NO: 8877 - DNA, 21771 bp, Oryza sativa
tgcctcgccggcgtcccctatgcctccctcccgcaactccccaccacttcaccacgcttgtcgcctccgtcgcgcgcacggcgagctccgctcctctctcctcgccctctccgtcacgcccacggcgagccgatggatgttggcgtggtggtggtgacgaggacgaggagccggcggccaccgactcgcagctacgccccgtcgccgccgctacgctccaccgccggcgactggatggggatcgatcccctttcttctttcccctgcaaagtcaacaaaatgactaggggcaaatatgccagagaatgatggaaaacatttggaaatcagttaaaatggttgaaatggcattatagtaagttggcttcatttgacaatggcattataacgaagccatattcgggagtggcattccagagaaaccccatcctgaagatggctaaatgtcaattttctcactcccaaccccaccccacccctactcctctctttttcccaaacacaatcatacactactaatacacacatctataaacgtatgctaggtgaaacccgcttattgctacgggagttttgtttgacaataaatataaataacacttaataaaacttgtaaaaatacacatcaaacacaatgttgctctcaactcctataatatgggatttatgtataattttttggggaaactcctaaaatatttggctcaagatttctcttcacttattctccctattttactcaatttgcagtcatacaacttgcttatgcactttatacatgagataatcatggctgagatcagtattgtcgaagggtgaactcctcgagcgggggaccgtgaggcccctccttcgttagttcgggcgggggcagcgagtgtagatcgaggaactgagaagattggaagggatcgagggggttgggccctcaatgaagaggatgagaccaaagggatttatacaggttcggaccgctaagaaacgtaataccctactctgtgtatgatgatttttctgagttttgaaagtctctgaatctctggtgtacaagctaggacaaagcgttctcactctagctccctctcccccctccctggactcgaacctccttttatacttcaaggggttctcacatgcaccaggtgtgccgctcggtgaaaagggggggtaacaattccctatattaaatgtgtgtcttgcgctacagcttggaagccacctaggcatcggctgtcgtgcggggcccatcaaatcatgccggctgacgcaggccgacacggggaggatccccgtcattcaccatttaatagatgtggatttggggtgtggaagtgccaggaacgctatcccgggtatgttaagggcggtcaagccagccctgaacggttgagaggcactgtacctctcatcatcttgacgagacaaggcatacccaccgcatgccgcctgacacccgggcagagtgcgcgtggcttgccgttgtctcgtctgtcacttcaaccgatcacgcaccggtcacgattaggtcatgcgagcggcacgtcgcattaaatgcggcgtggcacacccgctctgccctcactaaatgcggttaggtgagtgtcaagtggcgtccacctagccacccccgcatgacggccacatggtgactgtcccaaggggtcggggtggcccaacccctcaggctagagaggggcggctacggcccgacccctcggggaaaagccacgtggatgtcgagagcgacctttcccctttaagcatggtacccccggggccatatcatcgacaagtatttaaccccgcatcatatgttaaacctatctactgggaggagggagcagagggttggattctaatcccttgaggaaatgtctccttagtacatatggtatttatagagttgtatgtttaattgcacgaatggtgtcgtattcttttttaacttttcattgctatttagatagtatttgagcaaacgaggaaacattccctcaactcaaggaattaaaaagtttaccattccattggtcaatcatgctggacatttggtcctttttatctagaaaaaggtccgaggtatgtttttttttttacaattcttatttgaatgagtttattaaatagaacaacctcgctagtggagcgaggttgcatccaatgttcccctttcattcaaatggtcaaggctgctcttctctctctctcacgaatggagcattgtttggcgtctgaatgatggcacgatgcatgcctaaaaattgctagttcgatagtcatgtgttttgtttactgaattcagcggcagtggtggattgaaattattgctgtttttctttagattagtggcagataatgagtctgacgaaagaaagaaagggctttttgtctgcagccgaactgaggacatttttgctaggaaagtgcaaagaaagcaggcggcggaaatggcaagaaaagccggatctttatataaaagatactaggcactagtgaactttgtgcatgatgatgattatctgctgaaaattcagtgcaagtagcaacattgtccattctacagtgagtgacagtgaaactgcagagcagaagaggacatgtgatctgttggttggccattggccatatggcctgcatcaggcatactttgaccatccgcaactatagattagaggaccatctgcaactagtatgggatgtgaatttctgggtaccttcggtttaagttactagtagttcgattataggtgaccagccacatcggtagttgcttccttgagctgttcttttactgatgttggctaggatatactccggccgagtttagttgcaaactttttatttaaactttcaacttttccatcgcatcgtttcaatttcaatcaaactttcaattttagtatgaactagacacaccctccgtatgacaattacatggatggaaagaacctccatagagtaaggtttgcatggccttacttagggatggtcgtacatataaatgtgttgcattgacaagcaaaatcaatactgataatgtttctgtacagtgtcaatgcccaaagaaagaaagaaagaaagcatgaagagatagtaacgagtgcagagaaagacagaggaggaggaacagtgagaaagaggaagaaagaatctaaggaggatccaagcgggccaatccaacaacacatccagttccaatcggtgtgcgacaccaccacatacgtacgaaaccatacatgatcggacaaccacatggctgattcagtttgcagataattgacaacctaccggcctagcctagcctttttatttatttattttttaatttatccggcctctatatccaaccggatatataccgccattataatttaggaacttagcctatcaaatagggaacttagtcctaacctatcaaatagggaacttaaccctcaagtaacccaatctgaaattcgctcctatagagatttgaattcaggaccttggggagctactcatgtcactgcaaccactaggcctagcctagcctagcctagctaactactcccttcgtactcataaatgaagtcgtttttgacagcgacacggtctccaaaacacaattttgacttattatttctataaaaatatttattaaaaagtgatatatttatacttttatgaaagtatttttcaagacaaatctattcatataatttttatattttcaaactcaacaacttgagagttattcatgatttatattcccaaggtttgacttaaatattatcttaaacgatttcgtttatgagtattaagggagtactatgtaattatgtctaggtccatttctatacggaacgtctcatttaatactataatggtttttggtggtacggatggagtagctacatgaaacaagcatataagcgtgtgtgtgtgtaattgtcaaaaagtgtatatataaatgtgtactctgtataaattgagtgagctctcatatccagatatagctagtagtacattttaatcctctagagaggtagagagaaataacagagacaaccttttgcgtgttgttaaaaattaaaatatatgacagatgcatcaaagacagatgttggtatatgctcgattatattgattctgacatgcaagcattgtaatgtagtactccctccgttccacaatataagggattttcagtttttgctgataacgtttgaccactcgtcttattcaattttttttgcaaatataaaaaacgaaaagttgtgcttaaagtaccgtagataataaagcaagtcacaaataaaataattaataattttaaaaaattttgaataagacgagtagtcaaacgtagcaagcaaaaactcaaaatcccttatattatgggacggagggagtactccattcgtaatctagatgagaatttaatatcatgtagaataataaatctgaacaacgtcatgtcaaaatttgttatcttagaattcaaaactagaagacacaagagaaaaacactgccattacagaaaaaaacaaaagaagaaagggagtgagagagtacaggtattaacacgtgtgcagtagagtatagtgtattaatggatggattcagatttttacctaaaaataattggatggattcggacgcagcctgcagaaacaacaaagagccaagacaagcaagagggctcaggggagtggcagcgcatcgctcagcatccaatcatggagaccgcccgccgcccgcctgcctgcaatctgctgctacgtgtcctgtgctgtatgtcgactgctccctccgtcctaaatgataattttataatcttttgaataaaataaataatcaaatattataacaaaatctcaaaagtcaaaacgatgatggagatagtatcattatctatttcatatttcatactgtaatactaacacttctaaccctatactactctaaaaaaacaaatctaaaatagtagtagataagttttctttttatggaagaagcgctccactgctacttcatttaaacaatgtagtgctccttttagcatcaataaatttgtaaacacgtattctaaatcaacctttcaaaaaagggcgggttttgctaattttttttataaattttctccccaaaatgtatcgaatataaatacgatacagtaatagtaatagtataattatattgtaacttatatataattacgatataacatataattacgatataacttgtacgtaacatttatataatattcaatcgttagatatacttcaatattcatgcaagcgggaagaaaaaggtcacagtgcatgcatgcacaggtgagtagatttggttccccaacctccgcttcacaaaaatagcgtgttacgtcaggatttttgaaagctacatacaaggtataggtataggtatagtgtaattatactacaattttattatatttacatttgatttttttttaaagaaatttatcgacaaacgtattgatagtaaaaaaaaaagagaagtattatgaatctcactattagggtgagttccatgtatactaccctagctctatctcttctgtagcaccgtttcaactctaccaaaagatgagtgttctcaagaaaatgaattatagacgcgaagctgggtgtagacaactccatttctgatccaacccttaacagttagagaaaaagggatatgtgtaactgcaacggcccatgcatgataaatatgaggcagcccaaaccaacctctctctctataatgtatagaagcccaaaagaagagcgaggcccaataataagtccagcagtagtaggcttcgctagtagtgttgtccaaagacacaagtagtaggaggagattagagagagagggaagggaacaccgacccgcatcgcatctgatcggcatcggcatcgtcctcgtcctcggcatcagcagcagcaagggaagggaaggattcgccgcccgcgaggtcgtcgcctccccttccggcttccgtccaggattttccatggacggcgcggccgactccggcacggcgggcgccgcggcggcggcggccaagtggcggaccgatgcctcgcgggcgttccagtactacctggaccgctccaccccgcacgccacggggcgctggatcggcaccctcgccgtcgccgccatctacgccctccgcgtctacctcgtccagggcttctacatcgtcacctacggcctcgggatctacctcctcaacctcctcatcggcttcctctcccccatggtcgaccccgaggcccacgccgctgcctcctccgacggccccgccctccccacccgcggctccgacgagttcaagcccttcatcaggcgcctccccgagttcaagttctggttcgttacccccatccccagatccagattcagatcactcctgaccttttttttttcgtctccttctaattcgcaaatctacctcttcattctattattactattgttattatgttttattcatcgcggttgacataggccaaaccaaaccatgtggcctcaaatttcacatgcttccactattcttctttatattattattattattattacatcatcaatcaatgcttgggtctgctactactacccctatcatcaaccccatttaattccatctcatgctgccatgatgtgttagctatactgtccatgtcacctctaatccaactaccctcagccctcctcaccctttgatcctgtctgctcaattcgtcctccctatcttatggagtatcttgttatattattgtgtgtgctatgtgccataacacttatctgtgcacaaacttcaattgtagtgccacactaccggaccgcgtgaattgtaattggtgtcctatggtaatacacatctttaagtttgttagtgcagcaaatgtgcgcacactgaaaatattgatgctatatagaagaaggaaattgtggtcatatatatcatcctttgcttacctcctaatgcattctatgcctttagtcagtggcatgttaaccagctaaggataagtcctaacagtacctaacagatttatatgaatttgtattccactggacatgtgcccactgccaaccatacaaattggtcttggggtcccgtaatgacctcctcaacaaagtcttgggatctcttctcaatttgcccatatctctccctttggaatttaataaatggtactggttaatgacacaataatatttatacatgcctgtatgcaattatataacctatggttcagacatgtgctatgtttcatcatgagtgaatttagatgcagaactgcgtactgcatactctcgtgaaaataaatgtttcagcctgacatgtccatggcattcattgatctgtcttaaattcagtgcagcatacaactcatgtttaactatagccttagcattccatactgtgactttgtatgcaggaaagcatacctcttatctttgcatgcagtcgctaatacgtatttcactattttctgagctaattcctttgtttcatcaaatctgaacattggttttgtgttttcaacctcagtatccacaccatattattaacattcatttgcttggctttcaggtatgcaatcacaaaagcttttcttatagcttttgtgatgactttcttctctgtatttgatgttcctgtcttctggccgatacttctctgctactgggttgttctttttgtcctcacgatgaagcgccagattgtgcacatgataaaatacaaatatgttcccttcagcgttgggaagcaggttagtttactgctcaatacatggtttatgttatctgatgagtgttggtacttggtaccatgagaattacatgttttaccacatactgaaacttgaaagaagtgccattatatatccatgcttggggccattattaaataccatcaattgtgcctttttatttgtgatcttgaacaaatgcttttacagtatgcgtcatcatgtactggtgtaaaataaatacctgtggtttcagcaattgttttgttcctcaccatttatcccaaattgttctgctagaaatatggcgggaagaagagcgcaggcagcagttcttcgaaagactgattggcagcctacccactctggtaggaaaaatggaaggggcaagaagatacagtcgatgatatttgatgtgctacataccaattgtaatatttcattcatatctagagctagaaggatattcacttgtatttcagactctggttcacggtttaaattgatattgtggtagaatgctttcttggatgggtatatagtgtgactcgttaaaaatatgacaaaacggttcagctactctttacaagtggtacggcaaattgtagacccaattgcacttggcggtgagctgctttgttggagcaacagggcactgtctgcttgcgtggatgaaaagctgagtcatctgaagctagtgaacattttttcgctggctcgctgcgtgtgttttttctctgattgtggcccggttgattatgaaaatgaccagtaagtaaagtcatccgaccctgctgatttgtttgttttgcctaacctagctcatgctcggggtcgtgaatcgtgctacacttgttgcagctttcgttttcttgaagagttggaaggtgtcagcttagcttcctgtgcgtactagtattgcagaagaaaacgtaaaactgtaccagagcaagaagactttgacataaatttgtaacaaggcagataggtggtacaaatcaaggcactcagctgaacagctcaactgaaatgcagaactgaattgaagagtaaaaatgatccatgcatgacagacaaaccagtggacactgactgaagatggagcaatgaacaaaataaaatcaagacttgtttttattggcgcatgcatatttagggtgatatgatgcatgacgaaatgaattagaggagggtgttgagatattcgtcaacggttgtatattggatttccgggtagagctgagtggcctccacgtcctgcggatcatccagcggcgagctcatctcccctctacagtaggccgcgtgcgcgatcgacaccaaaacgttcttcgggtactctaactctgcaattgcaattaattagcaatatatatataattgcgtatggtttattgcagtggagtactccatacatgttacgtacctttgattttggtgagcacggcgtcctcgggcacgtacactctctccagcttcttccccgtcttcttctcccacatgctcaccagctcgtcgtgcgacatggtgttcgccggcggccgtatgtgcagcgtcttgttctccgcccggggatccaccgccgccagcaccgtgtacgtgccgatgtccccctcctccacgaacaccaccttggtgtgcccctccccgaggatcaccacgctatccacgggtgccgcctttggcatgaactgcccgatcgacggcagcgcgaatccggcgaagtagttgcacgccacgtacgtgtgcgggatgcccgccgcctccacggcgcgccggatgcccaccttgctgccgtacatggacctgaccggctccaccgccgcgctggcgccgcgccccgggtccatgccgaactcggaggggatgaacctccggacgcggccgccgccggcctccttgatggcgtcgatgagcctggtctggtcggggacctgggtcgcgcgcaccgcggagatgacgacgtcggcgtcgcggacggcgcgcagcaggctggcgtggtcgtggaggtcgccgtggaggagggtgacgccggcgtcgcggaaggtgtggagcagctgcgccttggcggggtcggagggggcgaggtccctgacgagggcggtggtgggatgacccagccgcgcgctcgcggcaacgacatgccggccgatgtaccccgtgccgccgaccaccaggatcctgctcttcgtcgtcgtctggtcgccaccggatgccattgatgaattcgatcgatcggtagcaagacaactagagctaatgcaaatatgcaatcgagcgtgtgtgagagaccattgcgcgcgttgatggccttttaatttggttagtaacgtaacgctatcaccaccaattaagcctcgcctccctcgtttcagttcgcacgtcactagctagctatatagtatcatgcacactactgtttcagtgcttcctagctactcttggtgattctctttcacgtacaataaatcattaattgctgtaactttgtacgggattcgatttacctggagacgactaattgcctcctgtatgttcttgtagacaagaattaaagaaccagctgccaccaattttccgcttggtgctttcccccaaatctaccttggactgcctcttactacggggaagttaaagctggtccatttgcagctggtaatggacaaaatcagagtaaggatggggggctggaaaaacaagctagtttatcaaagcaggtggaaggttcttgtgcaatcagttctcagtgccattccaacctacttgctgaccgttcttaaaccaccaaaaggattcctagatgatgttgacaaagcgcgacgaaaatttctttgggccggagactaagaaagcttgggcaggaaatgtaaagtgaattggcagcaagtatgttctctgacaatacatggtggattgggcataccttgtttggagaagttctcacgatcgctgaggctacgttggctctggtatgagtggacaagcccgaaaaaaccatggataggaaccccgccgccctgtgatgacactgatcgtgctctgtttgctgctgccaccaaagtatcggtcggagatggacgaaaggcgaaattttgggaatccaactggataggagaccagccgctgaaatacttagccccaaacctcttcaagcactccaaaaggaaaaacaggtcggttcttgaggcaataaccaatgatgcttggatcgaagacatccgcggaggggtgacaatacaactccttcaggaatatatatgcgtatgggaagtgctccacaacgcaggagaggtgatccatgaaggggctaaggacacaatcctctagcgatggtcggccagtggctagcaagatcatagatgagcttcatttgtgggaaatggtaggtgccaagggagtgaagtgtattatggagattaggcttttgtttttttagggagtgtaggcaggaagaattcctccgagaacgtctcccctgccttctgttctgtacagtttctctcacttcttctataatataaaaccagcttgctgggttctttcaaaaaaccaattttccgcttaccagataccacccaaggatcatacatcttcatcactagctgcttccgtagaagtgaaccattccactgcatctcattctcagctaagacaccgcatttctagaaatttgatgccccgtaccaaatataaaatgaagccctattttttttaaaaaaaaagaaaaaaatataaccaaagcataatacttcttaattatacaacatccaatacatcattgtacatgctatttctcacaagaaaaaatttgattacatggatgacacatatgaacacgcaacccactcatgagcgcacacctaacagacagagaccaactaacctcatgcattctttcgtaatttcacttcaagttgatgtacattaggccagagcttctttactgaaagtataaaacaatctgagcctacattaatacttcctaaatcgacgatgaggaggcaattttgttttcttagtctttgtatatcgctcgattagtcgtagtcttgactctcgactcttgccacttccttccatcgaccatcgtcacatagcagtgacctactttttggtggaggtttgcacggtcgccgccccgatctaatggttttcttgcaaaccactgaagtatctttagtttactgcataattttcagttttttttggaagtcccgatctaatgtttctttaattttgtgcatcattttcgctgattaggaaggactgatataacaattgccatcgttttacctacagcttattataaatgatcacgcttatcaaccaaaaacataaattcataggtacaacatttatgcaagtattctgaacgacttaaaagtcaatactgaaaaataaactacaataaatggtatcaaaataaactctaaaattagattttaaattttggtacgtaccatagcaatagggtttagcataagcaggtctggtagatataacgcatgatttagtattggttgagacatggtaaataggtagtacaatgttaggttttgatctctggctaacaggccagagaaaacgtagtgggttcggtctaccccgagccacacgcgttcctatgatggcaccaagataataagactcgcgcgcacgtcccctctgaattacacggcgatcggattgtgcaactaatcccattgactcgcattggctcccgtagcgctataagagggagaaaactccctctacatggttcttttcctcaaaacccttaaaagtcaacaaattataatcgtgagttttaaagagagaccgaaggttgaactctacaccaattatcccattcactggcatgtcaaggttgctggtgacaaccatcactaacatttgctgcctcactgttaacgttaaaatttggtaagctccgaaatcgtcatcggcctcagagttctagaaatggcttacggaaattgttagttgccagtcgtcgacatcgactagtatcgctacgatggcatattagctggtcggatctttgaccattaaattatctatcttgcagtatcaaactgactggcacgtccgcacttcattaaaatttaggacctgcacttaaacagatatcctagaccttcgtgtttcaggacgaaatttcacgtcaacactcactgacccaggggcacacacccaggggcacacgtagatcgacgcctacatgtgtacaacaaacaaagcggcgtggtagatcaacgcttacatgtacaacaaacaacgtgattgaccagcggcacatggcttcttcactatctcaattcgtcgtaaaattatttaggtgatcatgtataaccaagatcataccatactaataaaaaaacacggatattagggaatgacttaatatcaaataattagaatgggtgaggctttgaacttagatcatctagcccaccaccttgtgaagctacccggaagatccctggttgtttctccatatcatactaataatgtttaagcaaataaattcattaacatgcaaatcaagccctgaagaagagctgaactgagcacagtgatccatgacagattaaaccaagacactcactctcaccgacggtgtgaaatttgcaggaacatgtacattactaaggaagagacttaattattttattggcacataaaagatgatggatgtatcgatgtatttcagaggagcctgttgaggtagtcatcgacggtggtgtactggacgtccgggaagagctgggtggcctcaacggcggtggctggatccaacggcgtcgtcgtctccccccttatgtaccctgcgtgcgcgatcgacagcacgatgttcaacgggatctccgactctgcaaccaaaccatgcaattagccatggacggataaaaaactaacttaatattggatacgattcgttgtattagaatttaggatggagagagtacatatggaacatagtacgttaccctggatttgcttgagcacggcgtcctcgggcacgtacaccctctccagcttcttccccgtcttcttctcccacagcgccaccagctcctcgtgcgacaccgcgttcttcgccggccgtatgttcaccgtcttgttctccgcccgcggatccaccgccgccagcaccgtgtacgtcccgatgtccccctcctccacgaacaccaccttggtggctccgtccccgaggatcaccacgctatccaccggccgcgccggcggcaggttctgcccgatcgtcggcagcgcgtagccggcgaagtagttggacaccacgtacgtgtacggcactcccgccgcctccacggcgcgccgcacggcggccttcccggtgaagatggacctggccggctccaccgcgcccgtgtggtccgggtccagcccgaactccgacggcaggaacctccgcacgttgccaccgccgccctccttgatggcggcgatgagcttggtctggtcggcgatctgcagcgcgcccagcgtggagatgacgacgtcggcgtcgcggacggcgctgagcaggctggcgtggtcgtagaggtcgccgtggaggagggtgacgccggcgtcgcggaagctctggagaagctgcgacttggcggggtcggagggggagaggtccctgacgagggcggtggtgggatgacccagccgcgcgctggccaagacgacgtgccggccgatgtaccccgtgccgcccaccaccaggatcctgctcttcttctcctcgccaccggacgccattgttctagcgatctacctagtacaagtagagtgttagtgtgtcacagcttgcatcgccttcatcgattccggccccttttatacttttttccaagacggggaaattaagtatttcttattcaaatttctcttcatttttgtcccaatcagaatgttgtttctagaacgtctgggccaaccaccacgcccgtgtactagtaattcgtaccgttaatttatttattaatcgacgtcctcccaatcatgatcttgacggcattacacttggttcagtgcacctggacgcgattgtatgcctcctgcggtgcgagcacttggttcagtgcacctggacgcgagcggacaacgaacttcgcctaggtttccagcccagttttggatccaccaaccaaatagtatccaccagtcaggattcagagcaccattttccgctcacacatcttcatcactggcctggattccaactttacccaatgaactctttcatcatttcatttttaaggtgacataaatttattttaactgattaggtaccgtcttttctaagctgtttccggtatggtggaccaaccaaattagggtgcatgacgcacccatcagcgagcggccattatattcagcttaccaacaccgaaatatcacaaatctccatcactgcactctacaggtggactgtcacaccgcacctaagagccttgctatttcattctttgttttaaaatgtagcaaactttctcaaaaacctctatgtatagatgatggctatgccattacaccgcccatatctaccaacagattggccaaatttggcaaccaagtgttgacgaccattaaatttggtcctaattagaaagatgatcaaagcattcacgcaaaggccagtcatatgtaccgatgtttactgagctatgctgaccgatccaaacagaggtacgcctgtctaaccgatggtctaactggcaagcctcgaatcgaagtttaacttgattattgtttcgcctttgcttgcatgagaccaatatttctcgacttctaattgatctctgagtcagtgagtgtgtgtgccaataaaaaaaaatccacaagatagtcccttggcattcattcagacaaggtagataggcagtacagatcaaggtctgaacagctgaacggaactgaaccgagcacaaggatccatgacatattacctgcagacgactcaatgaagatggaagaacacattaataaagatttgagattttattagcacacacacatagtaactcgtttcaatagaaagcacactactgctatctctagaatgttgtttctataacatcaggtgaaacaaccagtactagtggtaatttgtattcgatactgctacttcgtcagtgaaaaaaatatgtgccccaatttcgtatgacacattggatcaagcttgggcaatagtcagctaacagatagtgaatttcctaattagcgcaacatacctatcttacataaccatgcaaccaagcaacccatgtagttttctcagttgcagataagccacaaaagaagggggctggggctctctcccagattcagataaagaggaggaagaagagggtctccagtctttattttataagatgacatagatagagccaccttcgatccattcaatcgataaatcctttggaatgaaggagggggttgtgcagttttaccttttgaagggctgatctactccatttcatcctatctttatatgggtgcatgaatcaagcaacttggcagctgtcgtggttgtacctgatggtggtcagggtaggaccgagcttaggtatggacacaggagtataggatctttgtgcctaaccattttcatatctgatcatctgttcagcaaaatacaagtcagtaacaccaaaagaattaattcataagtgactttctcctcgacttccgtggctgcaaattgtaacatctgaaaacaacagcctggcgtaaaacagacctagtctgtagtaagtgactttctcctcgacttccgtggctgcaaattgtaacatctgaaaacaaaagcctggcgtaaaacagacctagtccgtagtaagagccatgtatttgaaggactccctgctgcaatttctgtccattgatattccacgatttatgtccattgttattgttattccctcttaaaccaatcacagtgtacctgtgctgaataagaaaatcatcaaaagtgtcatttttactcaatcaagcaattcatacaaataccaccacaatagactccacaaaagaggtgaatgagagccaagagaaagccaaaaatcttctagtatggcatagtgatatggaatggcaagatgaagttattgcatatagtatcaaattatcatgaatgaatacatgcagattttactaaagccaaaagtacattagcagaaaacagaagccatgacatacattgtttctaacagaataagcaagctctattgcgagggatagacagagattaaaggttcattaagtcactagtgtaaatggcatataaataaatacatggacaatgagcacatattagttaatcctagaggagaagaacacatgagctgcacccatgatcatcaacacgtatagactgcaattgttcagagttagctcatgctccaaactagaatctacagaaattctcaacacctgtgatacatggtacacaatttctcatactacaagagggcagatagacatggttgactcgagatcaagtttatgttttacaagatacaggcaagtaagtacaagacgataaagctgaaataaccacatcaattcatacgtgcaagttttaagcattacatctcttaacaatacattgcagaagtgttgttgtttcaaatggattcagtcgttagaaatgaaaggccaaccaaacattatagaattgaatggtattgaatattctaaaattgaatgcactgttttgtaagaaattctctgaagcactgatataaacagcaaattagcaaccgacggcaccagagtaacagggagtcaagggacaacaacaatgtaaatttcactgttacaaaagcagggcatatggattgatattacaagataaaaccatgaagtccacaacccaaccccagtgacaaaatgaagatagaatacagcagctagaacaacctcaccacaccaccttcaaaaattctggaacagcttcaatcagaatgggctgcactaaacctaaaatcaggaccgattccgcggcttcttccttgtatgctctacttgctctttgtcgttgtcggtatcatcagctctctccctcttcttttttctctttttctcagtggctacagaatcaccagcactaactattatccctttcacaactgtcttcacctcttcctcttccggatgattctttttgttccttttcttctccgggctggcaaatctttgctcgggagcaccaccgttttgtttcacatcccttgcattctcttgctgactctcatgcttcttcttcttcctgttcttcttgctcgtctccttgtccgtttcttcttccgcgacgagatcagcagcgaaggccacttgttgtgcctcctgctcctgcttcacatgagtggctgcttggtgatggtcctctgaacgcttcctcttcttcttgtcggaggcggaggcagtatccccacggtggtagtagttgagtaggtcgaggcggaagcggtggtggtttttggtggcgtcggcggcggtgtggaggtaggtggcggcgtcggaggaggggaggttggaggcggcggagtcggcgaagaggtcgaggatgcgggcggccttggcgagcgagcagggcttggaggagaggacggcgccggtgatcgccctcatcgcctcgccaccggccaaccaccgtctctctctctctctctcttgtttgggtttgggttggaggcgagggggattgctctgctctcgattattagggttttaggagcaggggggcgccttctgatgggcctagtgggccacggcccatcatcattctctccgcacggtaaggcccatctcgtgtgaaggaagcaggccgggagattgggtgggaaatacaggttgcaggattcatcggattcaggggatgaatctgattaaagtttcagttcttcgcagttatactacaagtgattccaaacttaccttgtaagttacgttgtcgcaattgcctaagcttgtcatttcacatttggatcatctcaggtttggggactaaaatacatgtatatacaccgcaaatttaattcgattatcattatgatgaggcgaaggcaatcagatcagtacaaagcacatacatacattagtatgtctgcagaatcacttgttagctgcaccggcgggcttgttgcctttggcagcggcggatggcttgttgggtttggcggcgctggtaccagcctccttcttctcctggctgctatcgggcttcttctccttgttgctggtatcggcgacgacattatgctgctgcttctccttgctcttggtcttggacttggacttggagtttgaggagagcttgagcttgaggtgcaccccgaggtcgccgccgctgcaggagctgtggagaagcagcgagttgttgatggactgcacgttgctgttgatcatcgccttcacgccccccttgccatccgcactgcttctcttgtcgtcgccggcgcccttgctgcctggggcgggggaggatatcttcatggatgcgcccttgttgtcgccggccagcgtgatgatgcttgtcccttgctggccgtgggaggcggcgctgagcatgccggcgagccccgccttgaggtccttgcgcaggtcgcccttcttctcctcctgatctttcaccttgtgctgctgatgctgatgatgatgcgtgggtggtggttgtttgtgatgcagtacggtgtcggtggggatgacgacgacgtccttgggcttgggaggaggctcgtgacgaccatctctgcttgctggtggcggcggctgctgatgcaagcggcggttggttggcccgagcggtggtgcggcgcgggcagctgggatggttgggtggggatggcgcgatgagggaggtgacggcggcctgtacctggagctggagggcggtggcggtggcggcggcggaggcggtggagggctggtccagtacgggaaccagtagcgctggggaggctgctcttgctcctcctcatccatggcgttcatcgatgatctagcctaccactagcagtagctgacggacggaatatggattgcttgaaatggcgggaataacccacagaaatctatatatacaagacggaaagaagagaggaggatcctattcgtatctttcgattgctttcagcttgcggaaaatgaagcgaaacgaaacgattctctgccgcatttgcaatccaagtacagtgcaggagcaggagcaggaaaatgggtgggttgtttaggcatctgattcttcttcctcattgccgtggcgtacgtgcaccatggcttgccaatcaaaacatgatacgtacacccacacttccatactggaatatgatctttcatctatttttttcagagctctactgtatatagtctatatatacactactgcagtgatagtattttctatactattgtaacgggcggagttgccatccttccatctcctcccattgcgcgtccactccacttgcataaccaccggtatataaattcaaaatttagtgacaatgtttaacatagcttatggtgtcatcgacagctgtataaaaaaagttaagaataaatttcacaaaactatatatattttgttcaaactatcataaaactatatatttaataatgtgtatcataatatatagatttaacataattttttttacaaaagcatagatttaaagtatcatatcagaaaactacagatataatattggttttattacaaaactacaatgtttctgacctcaatatattatggatataaactctataatgtatagttctttcataacttcatcgtaaaatctgtagttttgtgttatgatactttaaatatgtagttttataataaatttggcattaaatctatcattttttggatacacatttttgaatatatagttttgtgatagtttagttaaagtatactgtacgtagctttttttttgaaaattactcaacagttaatttaaaatacaaacgtatgcaaataggaaacgtaagatgtaatcaaagagtaaaacaagtcttcttatctgtggtgttgtaaaataaagtaatataaaacatacatgccactgctcattatataatgagtgatgttaattgtattatataattttgtattgttgtaacccctctatcccaaaatactggttatatattatcgttatatttttaataacttatgtgccgctgagaaaaaaaatggttatattgattatcgttaatcatacatagaagtttagtaataggtgttatctctttctttagtttgttattctaagtagttttattgcttttataatcaagctatgaatttgtaatcgtgaccgttcgatttgcaatatcggtagtaattggatgtaatttatttaagcaaaaacaacaataaattctattataaaagggtcattgtatgtttagtaaaaaaattggaagttgtacaagaaaagagaatagagaggatagaggcaattgtatatatccctactatagaggtagtagcggtattttatactgatcgaggggtagggctcacgagtcggtcaaatacctatggtgcagaaaagcgatcagcctcgatctcagtctcggttagagatggcagcggggaattcactgtcggggtcacacatctacgtccttgtccacgcggtgttaaaatttcaccatctccacccctgccatccacgatagggctacatttcatccatcaccgtcctctgcgcgcattgatattgtgtcgttggagcttaagcagtcggcatgggacgatgacgccagggagggctggaggccacacttgtggattgatctttgctggtggctcgggatggcgacgctagcgagggctagaggccgcacttgtggattgatctttgatcccatttgcaatatactctgggttcaccatttttgatggtcctactacggccccgtttgatagggctccaaactccaatttctagctctaaactcctactccagtgggagctg

SEQ ID NO: 8878 - DNA, 35035 bp, Oryza sativa
tttactcattaacaggccaacgagttcaaaaaagaggacttcaaaggctccaaggtggtccttttcctcttacgccacattctgtgcacacaaattccagcatatgttaccatcacacaaaaaatcttactatgtcataataaatatgtttattttttgacatggaatgtttttgtcatcatgatgtaatgcagtggttggttgtacgatatgcaagacagaacatggaacagatccttgaagctattaggattgctaaacaagaaggtctctcagtatcattggatttggctagttttgaggtctgaccgcagctcattggtaccgtaaggtctttttttggtacaggcaccagtctgattttgtttatttattacacagatggttcgtgactataggacacaactcattgaccttttggaaactggcaacattgacctttgctttgccaatgaggatgaagctagagagcttctagggtgataccctcatcgccttattgtttcagatgttcttcagtgagtgatacctattatagtatatctgatgtgtgcgtgttttttcaggggagagctgacatttgatccagaggaggcacttgctttcttggccaagtactgtaaatgggccgtggtgaccctagcttctaagggatgcatagcgaagcatgggaagcaggtgagatcaaggttattgtgatgtactacaatagcaatgttatttgggatgttattgtgatgcatactagtatttgatacacatgcatgatgcatggttcagagttgagaatggtttcctttgcagtttgtttgagcaacaagaaggcggctttgttaacatgtaaagtgaaaaataaaatgcaggtggttcaagtggcggcaaccggggagagtaatgcggtggacgcgacgggggcgggggatctgtttgcgagcgggttcctgtacgggttggtgaaagggctggcattggaggagtgctgcaaggtaggggcgtgcagcggtgggtcagtggtgagggctctgggcggggaggtgaggccggagaactggcagtggatgtacaagcagatgaacgccagtggcctgctgctccctgacctcaagaactgaagaaaaagaaaaaagggcttgccttttacttgtcaagcttccaagaaagaaacaaagattcagaccatggtcattgatggcttgattgtttgttagttagacctcctatgctcggtttctttctttgtttcttaatttgtgagatgagatgaatggaatggatggtggtaacctgcactgcactacaagtctcgctgattattcaatttgctcgagaaaactcatatatatatatatagtataataaagtaacataaaagtttggatgtatgaaaatctgaacgtgtttgttgtcagctgtcacctcacctgtgtgcagagtcttaaaagtaaactagagactactagtaccaaattacgatcaatcatttgctgagctcgtgaattctgtctggttcaatgttttgcaaaaggaggttctttcacttctccgcagcaggcagcaagatgatgtttggtttttatgattggtggatacgtagagtggattgtgaggttagaaaaggtgtcaattcctttatcatgctatgctaggagctggagccttgtcgcttgcttgctagggaggaggtggggtctggccggggctaaggacatcttcttctttcttcttgccccttgtgccagaccagacggagaacagtgatcaactgtttagtttagttagcgcttacttatctttttctttttattgtcttgttctcgtgcgtgttgaaaaaaaaaaagattgtctatgggtaatccggctgaaaatttcagccgaatttgtagccttacaatcagccaagtcagcacccgcgcgtgcgactccgtccaggccttattgggctggattttgtgctatgatgggatttgaggcggcttgggcccagtacagttgataggccggaagtaataggcttgtgggcctcggcccatacatacatcgagaatcttcttcctttttgtgccgttctccacgagtcctcctcttcttcttcttcttccttcctcctccttcccaaggccaaggccaagaagaagaagaagggtgtgtttaactttaacaccgggggtggaacggccgccggcagcggaagaagatccagccaattcaatccaatccaatccaatcctcaggtgaccctcaccctcgctcgccatttgtcttgtgagttgtgaattcgaatttgtaattctccatatccccatgcaggctgcggagcggaggaatcaattcaatgtcttcctccgccgccttggccttggccttgaggagggccacctcctccgcgcacaagcagaagcagaagcaggccctcgccctaacggatgccgccgcctctcgaatacgccaactcctcagcctccgccacagaccctacctgcgccttggcgtcaaagcacgcggctgcaatggcctctcttacaccctcaactacgctggtaactcttcacttcttcttttctctctctttcttccacccaacctactactagcatgcgcctgcctgccttcttctttttgttcaatcaggccatttcttatcaaataaaaatgggccaatcaatattctctcaatatggttgacatttaggcctcaatattctttctctcttgtcgaatttagacgttatatccatttgggattagtggcccatctatgctatgcattgcgagtctcatttggtcaaacatcctaaaaaccctgctaatgttcctacaactccgatcggcctttcctacataacataaccattattacattagtaattactccctccgtttcacaatgtaagtcattctagtatttcccacattcattagcatcaatatgaatgtggaaaatgctagaatgacttacattgtgaaacggatgaagtatctattattggtcaaaccagtgtaggaatatcaatccctatttgcaggcctttacatattgagtttatgattcttatcaactaattgatttttatcttcagctcatatccatgtttgatatccttaccatgccttgttaggatactttcacatctaatgttaatatgttttcttctttttgcgtggaatctaatgtttatatctcattgcttctttttgcggggaatctaatgtcatatcttattgcgctactctgtcaaacattgcccgtgtaatgataaacttaggtcctgtcctgtctttcaatcatcaagaataccattactatttgcaaaatgtttgtagaagctgacgctgtctctgtttctttgtaatattttctctatatagatgtcagtaatttccccattaattagtggatatcttcctttttgtgaactgaatcatcatctccattgtccaacggctacatgttcctcttcctctactgctattatgtttttatttctattcatgctaaagagcgaaatatctgtttattcagatgaaaaaggcaagtttgatgaggttgttgaagataaaggagttaaagtactaatcgatcccaaggctctgatgcatgtcatcggcaccaagatggattatgttgatgacccgctaaggtttatgatttgtgcacaacatttcctcctctctacttattacctcctttcactaccttacggaggcttctcctgtaggtctgaatttgtgttcatcaatccaaattccaaaggggagtgcggctgtggtgaatctttcatgactacaagcagcaagggatctacatcttgaataacggatagtgatgggggtagtacgtgaggtaaacagagctaaatatgtcgaggcttcagctaccacttttctgctttatagcttattattattacattggaagtacatagctcaacagtggttgtaatagatgcaattgtgtgaacccacctcaactgtgttctttacattggggggggggggtatgtgttcttggtttctgttgtttgtttacatgtgattaatgaaagaaacgaaccacgtttggttcagacacatctgacgtgctcattgtgaagtggagactagctaattcaagtagctagctagagttgtgttttgctgcaagaaaaaaaagtatgatctggatgtcacatatcagacaggtctctgctctggctacttgactgctgtagtatatgatgtgtgcctgagcaaagaccaaattcttaacaaagaggagacatacacaccagacaaaagcagaggaatcggatactgagatcctccagccgagtccagtaatgttgctcagtttgatgagtagtacaactttgtgtgttggatctgctgtagctagctagctagatgagctgacattgttgtatagtactcctagctagtagtatgaatctgtgatagattagttcagtttcctctgaaattgggtggaggccaaaccccattctcgttggtgacgtaggaggtgcacgacaggggcaccaggcagagtcctctacttcggaggtcaagctttgctgctgcgtcccctccatttgacgtccccttctaattgattaattaatcaattgacaccaagcaaacatgacaggtcagttaacatagttttaatttctcttctgaaactaaatgaacagaaaagtttatctttttacccgttgttgttgtgctgccctgcaggctaatttcttgctgttcttggatgatctcaggtatggaccgctcaaagtctgcttacattgcaatgttttattattatttttttgcaaaacagcacaggaacaattaattctcagctcaggccaaagattaattcacaggtagatgtgcattgttacatacctcaacttggtcctgaagaaatttgatgtaaccgatggcctccatgagtaccgatgcggtatcagtctgcatctcatcattttaaaatcaaattctatcaaagggtgattatataattacagaaactggtaatgcattcattgattgtttgttacataccttaccaaagggtgagaccagttgctgaagggcggcaattctatcccctagtttctctttccttacctataataattagttgaattaggatatgcattaccattgtccaatgttcatgcagagcagataaatgatcaaacatcgatcggtcagatcgatctttgtatgtgtatatacggaccttgaatgaaggaagcattgaggaggagtgtgactcgagccggggcttctttgacgatggcggcagcgctgttgatgatctgtgctccgttgaactcccatggcggccacctctcccttgagctgctgcattcgtattcctcttcatctgcatgtgtaggtacacaaattgacctgcttgttaaattgcttacgtattgagcttccaagtaattaagctagtttcatcactgcaagtaaatataattatgtgttgcaaactgaagtaccactgatcaactccagtccaggatgcatgttgctgcaactgatgcatgttcaatgtagtaccagtactttttggggcaaaaagatgacgcatgtcacccttaaaagctgcatatgtgcagaacaaaaggctgtactttttgtgaatggaccgggcctagctagctaattggttcaggcaggccgggaaagcaaaattacctaactagctagcttgctgctactgtttcagctgtgtcacctaagcttgctgcacatatatgcttatgctgtccccagttcattacagacaaatggtcctacaattaacaactcacaggcttttgccaagcacaaacatgttctcttgttctctactctgcccaagacatgcagatcgttcccttacgtaccagttaagctaattaagctagctagctagcttgctgacagtatatctaggagacatctgaatcagggcaaatgcatataaatatgtatctgtcttacaagggcactactgaatatacttcaaattggcactccgagatactgattcatgcattttagcccgtcaatgctaattaatttcgtcatatatttgaccatggcaggataatatatatatgtatgtatcgagatccgtcaaaacctgatatgtcacaatcatgacagagacaaaagttaattatcatcatgcctgatgtgtaagtatttgcatgtgtaagtataggctgaaaatgcatgcatgttcctaattactagtttggttatcacttatcaccattattagcttaatcagttccaatatgtctacagtaacaattaagtgttagtcagacagtttagcacgtactcctccaaggaccatgtactatatgagaagagaaggcaattaattaagctagccagctggattaattaatgtataactagtgcataaatgctgtgattatgtactgacctgcagggtgttggatggtccttgaattagatgagcaggagggccagcataggggcagggcacatgctcatctcttatgctgctatggccgaccactgcagcagcagcagcctgcctcttgcaacatatctgcagcggctcatcgccggcggccagcttctgcagccgcgagacgttgatgctcgggagcacagcgccgtccagatgtagatgcggcggaggaagaagcgtggtggcgctgcatgaccttggattgctgattagggattgatcaggacgtggccgtagctcctcctcgttcatcatcacattactattattattcgtggagcttgcaatactatgttgatctgctggcgcagcgcagctgctccattggaaccctagctcctgcatcattagcaccgtgctgagttgatgagcctgcagatgggggcttaatgtcggaggagcagcagctgccagctgactttcaactgattggagtgattcaagctcatatgagcttaactgatcagtactgctgcttctgatcaagagagaaattaagaaaatcgagtcagatattaattacttaatttgttattatcactggtatcatctatctaccagattattatgagatatacagaccttgatcatgcatgacaaaaggaacaaaggtaatgcgagcggatggaagctttttacatcaaggaaaccaacaaatcaataagcctagctagatccatgctgccaatataattaatgcacacattgtttcctctgaagttgtcattttgttgtgcttgctacaattccccagaatctcagaaggaacaaggaggtagcagacaagaagccagagaagaaaatccaaatcctaggaatcccaggtgcatgatctacaatacaaactcaaaagacatacatataacttcattttcgatccttttcagagggaacaacatatatgcatgaacaactcaaagaaaagatgcatgaataaactatatctatatataaatatgtatgtgtgtgtaaagctatatatcttacagcattggaggctggctccattggtggttcaatccaaaggtgttgggagcaggagcaaagggcatggaaggccatgggatcaggtcatcttgcaagagatgattatcacagaggctggaggaggaagaggaggaggccatcatgatgatgatactaaaaggtttataatgatgatgatctttttatttgatgttccttccaagagagtaagaaaagataggccacacacgcacacattgacacatgatcgatgcacgtactactactagctactgaatgagcttttagaatctctcaacaacatgcatgtgtgtaaaaggagagaagaagtatactattgactattgagattgggaaataatggatccaggtgcccataagctaaggcttcctcgccgctttctctctttttatattggttggtaactttgttcccatgccatgcctccttacagtagttaagttacaaaggcaactcagtatcaagagacatctgcaactctctctctctctctctctctctctgtactatcgtcatagttgggatttctgtctttagatccataagcagatgcttgcatgcatgattgaccaattaatatagattgctgcatgactaattaactgtgttgcccttcaaattcagaaaacagcaagcaaaaagtaatgcaattattcatcgtggcatctatgaccttgtaaggcctgtttgatagagttccaactcctaaatttagcttcaggagttgagtctggagtagagttgtggagctgtctaaactcagctccacctctctagttcattttgtgtgagagagttccacccaactctactcccatttaagctgaactctgaaaaaggtggagctgaagttggaactgtaccaaacaggcctgtagtataaactgatcgacatctgtgacaagtcgatacatatacaagggcggaagcaggaatggaagtgaaatacaattcacagaataatttggtccatggacgatattgtgtggtaaaggttagtgagggtcaagagtctattgcagcgagtacaatagcagattataagtcagttgtatgcacatgtggaggagagaagtgaagagggagaaggaaagcgggctacagatctgtagccagcagcagcacggaggattccaatacgttgtgtgtgtagtatatgcttataggtaactattgtatgaataagttattagattggttataaatgaattggagtttgtagtagttggttgtagtattaaacttgctcttactcaagtaaggaagtaaaaatttacgtctttgcccctgctcagtgtaaaattgacccctgagcacggtgatgatccagaacaacgccttctctccctatcgagatatcgtccaacatctcacgaattgagataattaaggaacaagatgttctctgactctatcccatcgatcatcagtgatatcaagctaaccgtgtttagctagggcggagaacaatgcatgcaacgagctcgccggcaagcttccggccgacatcgatcgatcgatcgacgacctcaccgtttaatttgtcaatgcccggccggtaattgatctgaatagctgcaggcatacatgcgtcgatgaagcaggagctagctcctggagaattcaatttgctcaacttgagcagcatgcaaccggatgcatggcgaacttcgggactctctcggtgtcctcttatatatcgatccttacatagctagatcattatccttgggcgtactctcgtttaattttggatgacgtccacgttcattacatgcctgcctggtaagtgaaatactccctccatctacttttgatagtcatatttccaaatctgaaaattttatttttgataggcatatttcaatccaacaacctatcatcttaatgactttctcggatttaatgcgtgactcttcattgttccacacatgattggttacatgagcattgagaaatataaatattaatgaatcgcttgtttactagtagtatgtttaaatggatgataagtaaaattacttatccttggtctatgtgccatgatgaaatataactatcgattactagctagctagggtacgcaaattaattaattagagatcagtagggtgtgtgacattgtaggagaagatcaagatggcctaaataattagggagagtattatctgatcttttgggcttccaactagtagtatatactttatgtagcttttgaaataaagggacgagagatagcagtagttccggtccttttcctcagaaaagggacctctttgtgatctcggtaattgtgatgtagtatatgattccatgcatacatatggcttagggtgcataaagttaaagttggtctcagcagcagcagcagcacgctagctagctggcccttcttccttctccagttctctggtccttcggcctccaaccataaaaattaaattaaaccggataatatataccccacaatcctaaaatataataatctataattaaatggaacacattatagtcacataaatctgaataagactataatgttcagattcatatataaatatgttccgtttatttgtagattgttatattttggaatggatgcactaatattatagtatgcacgcacgaacttgtgcttcacacagcattgcctgtcctagctacacctcgagaaaacatgcatgcatgcatgtagccaatatatatagacaagctaatatatatatctactctgcaataaacaggaagactgatggatgatcagatggagccccagaacatatatcgatcgtccattgatgcatgtcatgtcactggagaaaggccggttgggcagccatatatatgagcaaaagctagagatcgacactgatctgctgcagctgcatctttcagtgtgtatgtatgggcagatgctatattagagcaggtacaatagcaggctataagccagctataaccatattttaaagagataaaggaagagagagaagagcagcgggctatacatctgtagtcagctgcagcacggactccaagacgtaatgtgtgtatgacaggtaggaccaggtattaatagtatagtaagcaactattatatgaattgactattacattggctatagatgatttggagccagtagttggctatactattaaacttgctctcaaactataaatctccttaatttacttccttggccctatatatatatatatatatatatatatatatatatatatatatatatatatatatatatatatatatatatatatatatatatatatgcataaatgatcgaccttacttagctcctacatgcatttcagaataatatcaagacgtgtcgatcgatgagattaagtactctcgatgcatgggggtcaagcttagggccagtttagttcccaaaattttttccccttcacccatcgcatcgaatctttggacatatgtatggagcattaaatgtggacaaaaagaaaaaccaattgcacagtttagctataaatcgcgagacgaatcttttgagcctaattaggccatgattagccataagtgctacagtaacccacgtgtgctaatgacggcttaagtaggctcgaaagattcgtctcgcggtttccagacgagttctgaaattagttttttcatttgtgtccaaaaacacttccgacattcggtcaaacgtctgatgtgacacccaaaaattttcttttccccaactaaacccacccttaacatacatcgatcacatcagtataaaaaggagagacatatgtactgtatataaagatgagctagagatcatatattcatatggagagccagagccatgcatgcatcgatcttaattaaagaaatgaaaggtaacatcgaaaggtatcgggagaaaggaaagggaaaataaagagaaaaaggcaaacaataaaaagggaaaggaaaaatgtactcgatcacctccaaaagttccatcaaatatgtcgtacgtagctttaagcgcatctaatccatccatcacttcttctctaaaggcctactagctagctctcgcgctacctctatcaaatagtatatgtatcttttgattaattattattactccatccgtcccagaatatagcaacctagtaccggatgtgacatatcctattaattcgtagtaataggatatgtcacatccagtactagcttgctatattctgggacggagggaatattacagagagttctgctttaattaattgctgcttttatgcattagatggacgggaatggaaaaacggaggaatagaaaaacataggattctgacaggaatgcaagtgtaaaatagaagattgcaaaacacaggaaaaacacaggaatgagggcccatttgaatcgcaggattgagaaaacgtaggaataggaaaaacacaggattttgataggaatgcaagtgtaaaacagaggattgcaaaacgcaggaaaaacataggaataaacgtttgattgaaccgcaggaaaaacgtagaaattggatgagagagatagactcaaaggaaagttaccaagaggttgaagctcttgctaaatttcctccaaaatctctataggattgtccattccataggaatttcaaaggattggattggattcaatcctttgtttcaaatggcttcatagaaaattttcctataggattgaaatccttcaaaattcctatgattttcctccaaatcaaaggggccctcatgatcgtttgattggaccacaggaaaaacaaaggaatcggatgagagagatagactcaaaggattttttccaagaggttggacctctcgctaagtttcctccaaaatctatatgcaataaaccattccataggaattttgtaggatttggaaaacttcaatcctttgaatcaaagggatacataggaaaatttcctataggatttcaatcctataaaattccttcataattcctttgattcagggcccctttgaatcgcaggaatggaaaaactgaggaaaaacgtaggattctgacatgaatgcaggtgtaaaacagaggattggaaaatacaggaaaaacacaggaatgaccgtttgattggaccacaggaaaaacgcaggaatcggatgagagagatagactcaaaggaatttttccacctcttgctaactttcctccaaaatctctacaggattagccattccataggaattttaaaggatagtataggattcaatcctttattttaaaggcttccatagaaattttttccataggattgaaatcctccaattttctacacttttcctacaaatcaaaggagcccaaagggggccttagcaagaggtccaacctcttggtaaaaatcctttgagtctatctctctcatccgattcctgtgtttttcctgtggtccaatcaaacgatcattcctgtgtttttcttgtgtttcgcaatcatctgttttacacttacattcctgccagaatcctatgttttttctattcctccgtttttttattcctacgattcaaaggggcccttagtttctaaaattagagagaagtttggaaaaaagttgggagtttggaaaacaagttgggagtttatgtgagtaggaaagttttgaatgtgatgtgatgggagtttagagaaagtttggtgagaactaaacatggccatacattttgcttgctgccatgcatgattacaaacttttgcattgcatgcagtacccttagcttccaccccattatggcctaatcatagtgttttgctttgtttcggatgtcgtctcttcttcgagaagagcatgcatgcacgcatatattactcattcctcttagtaacttaattagttttctcataaaacaagatcagttaatgttaggtggccgtcggtggtgacttcatcaatcttaaaataaatatactgatcagtcttttaaaaatgctcatagggatggaatgtgcgtgtgcgtgtgtgttcatagaggtgagtatgcgtgttgtaagcgcctgtgtttataatatgtttctaaaaaaaattaatggcgggcttaatctagaaaacattatttcaacataattatatgttctcccttgatttgtttcaaaatactatattatcaaatttttggctgtgtaactgaacaaaaatataaacattttttacttattatatattagtagacaaaatgcttatatttaatgtagaaccattggagtacgtaggacacgccattggaattaatattttttccctggtaactagttgaaagtgatttcacataagtaacattaatttgcatattatactatcatcatatagtagacagtgcttgtaactacggttaattaattagtgcaagtttaatagaagaaccaattactagcatatatgtatattatagctaatatatatgagtaatatatagattagttataaggttgtctttaattttcttctcctctctctctctttctcccttgtctaattaatagattaatgcatgtaactagctcaagtgagatcgatggaggaatcttctccatagaaaactgagaaaaacactgcatacagtcaattactccctccctttcaaaatatttgacaccgttgactatttagcacatgtttgaccgttcgtcttatcaaaaaaaaatcgtgaaatatgtaaaactatatgtgtacgtgaaagtatatttaacaatgaatcaaatgatatgaaaagaataaataattacttaaattttctgaataagacgaatggtcaaacacgtactataaagtcaacggtgtcaaatattttgaaacggagggagtataatatactatatgaagatagggttacatggatggcgatgcagtaggaaaattaaaaagaaaagtaaaagcgagccgaccggaggaggggcccggcctttggtcctgtgtgtcctctaaagctgattgagaagaagacaaaagcgggtccggagggaatatatatgctcacttaacattgcaattcgatactctacatcgaaatctaaccccggccctctcgatcgttgtttaattaagttgatataattgtcattattgatattacttcttcgtattaattacacgtgaatcacgtacggtgtcataacattttgtctatgtacacacttgagatatataaatgtcacttcatcgaaattaaaccacctaataattaactagtttcataccgtttaaagttaacattatatactaagttatctttgcgaggaaattaatatatactaaatgatttgagagttaagaaattaattataaacagattaatttcttcgtagttaattaatttataaatgaaaattggatcaagattacgtacgtcgaaggtaccaaataggagtatgcagctagcagctggactggaggcaccgaccaacaacagaggcagatcgaaggctttgtagccggccgccgcctgcactgcactgcactccatcaaggcatgcaattatatataggaccggaccatgcatcaacgtactacgtaccaggatggtgcatggcccactcgtttgcaaatgatcgatctttcatgttcttaattatatatatgttcttgttaattaattaagtaatggttaatttgtgtacataacatatatatagtgaaaatcgccggccatatctaggcccaggactaatcgcaaatttgtggggaaaagtacaccgaaggcccctcaacttgtcatcgagtatatatgacatccctcagcttacaaaaccgttcactttaggtccttcggtggttttgaccccggtttaaagtgaacggttttgtatgttgagggatgtcatatatccggttttgcggttgggggatgctttcgtaactcgatgacaagttgagggaccttcggtgtacttttttcccaaatatttgtgtacacacgagaccgtacaggcccatcagctaacagcctcatgggcttctcccctgctccctggtttacggcctgcatgaaccctcattgcctgatgcccttagtaatactctctccatatttttcacttctaagttgagtatttttttaccaaaggagtacttagcatgccatatttattgcattaatttttttgcatccaattccaaaccagtactagtactaacctcaccagtacgacaatacagtcattgagtggcccactgccccctatttacctcctgcctagctttgcccatttaattgaacaccatatatatatattttccttttcttatctctttagagaatttacgtgtgtctatgcccacgtgaaatacatagatgttaaatctgaaagttacttgttgggcccaaaagggagggtaaatagattaaacctataattttaaacgaactttgattaaatacttcctcgaacactccgatcaattcttcggaaccctcagtctagtttggtagttccactaagttctacagaggtttcaagctaggagataaattaacgctactaccacaatagaatcctaatatcaagtcttaaagggaaaacctagtccatcggtggggattatttaaccccgttttccttgcgaaggtggagtagagccttcacaaattttcttgggcttgccacactgacttagaaacttgaaggagatacctaaacagatagcaggctgcccttcaagagtaaacaagcatgtgaaaggtccagcgtcgatctcaagtgctcaagcataaatcctagttcacaagcacttaatcccctgaaattccaactcaaatcccataaagatttgcctcaaaggtaggagagagaggagagcttaatgagagagagacagagatggggtgaaaaatcaaagaggagaaagtgtgggttagtgggtataaatacccccaactcccaactagtcgttatggcatcgccaacacgatcatggagtctttgagcatggccctagagcctttggcctgccacatcgttgtggcagaaactgtggctcggaggccctggaaatgggcatcaacactcgaggagactttctggagtctcccagccaaacaaaaggaataagttcatcaaaggtcccttaacttgtcaacgaatccgattttcatccttcaatcacaaaaccagatacaacggatccctcaactatcaaatctggtacgaattaggtccctcggcggtttcaatagcagttttggctgacgtggcgcctacgtggctaatttgactcggtctcgatctgacgtggcactgacgtggcgcttacgtggcaattcaattcgggaaaataataaaccccgtgagacccacatgtcagtttcacacacaaattaataaaaaatggctgggcccacgtgggccccacatgtcatttcacccctcttcttcctcctctctctccccatctcccatctcttcatctctctcccctttcctctctcgcttcggcgctcgccccactctcctcgtccccaggcctctccgaccgcctcctcgccgcccgccacgagctcaaaagcggcaggagcacctcgccgctgcctcctcgtagccgacctcgccgctcgacttcgtgctgcccgcgccttacccgaccccctcgtcgccgctgccgagctcaagcctctcttggtggatcccgagggatctggatctagtcaggacgaacccgtcgccgtcatcggcgtctgggcacggttcatgagtaaaggcggctgcgccgtccgtcgctgctccatcaccagcttctcgctgtccacgctgaccaactcgctcgtcgtcggcgtgcgccatgtatggcgagtgggcgcagcagctcgtcgttgtcagctctggccaaggattacagcaacacgcgcacttcaactagctggagcgaaaatctttgtggacaaacacagaagaatttctcgacgacgaacgccttatctagtttttctcattcacttggaacttaactcaggagattacatgaattttatagcccaacagacacaccactaagcaaacaaacttcggccgcatcgtacgcgcacgcagcacgcgatctgattaattcggcagccactagctagccgcatgcacgaagctaactgccacacaaaaataatgctaacagttgtccagctctccgtcttccaggccatcgtctgtttcacgctgcacgctgctgctgttcgtgctcgaggtcaggaaggccgccatcggaatgtacgtcgacggcgcctcatcctccgacgagcaaaggacgtcgaggccagcgctggcgccgccgcatccacggtcatcgttgtcactgcggtgagcggcgccggcaagccgtcgctgtggggtgctggtgaaagtggtggcgccgctccctcctctcctgccggcggtcatcagggagaagggcagcggatggcggccatcggggacaagggcgacgaccggtgggaaggagctaggcgagctctctggtctaccggcgagcgcgtgcaagagcgagatggccggcggccactcttcgccatttccgccgccgccgtcgtcgcaagagagataaaaggaggggagatggggagagagaggaagcagaagaggatggggagacatgtggggccaacgtgggccccaccattcttttattaatgtgtgtgaaactgacatatgggtccttttttcggatcaaattgccacgtaagcgcccacatcggtgccatgtcagatcgaattagccacgtaggcgccaaaaccgctatcgaaaccgccgagggacctaatctgcaccggttttgatagctgagggacccgttgtatctagttttgcagttgaaggacgtaaatcggattggttgacaagttaagggaccttagatgaacttattcccaaacaaaaaggccacagcccccgagcaatggccctccgagcaccctaggaggtttgacggagtctcctgagtttttgggcttgcaagtggaaggcgtagagcttggccttggggcccctagaaatggtcctctgggcacccgagagagcttcccggagtcttcgggctgcctagttgaagcatgtaccaaggagcatgggacttggaacacttttaacttaagaatcgaggatggattttgtgcatcattgccttgcattgcacacacccatcttgataagtacgtcatgcttagactcagcaaaacatgccacgaatcgagcaatttgcttggatcggctccaagcatgtgtttcacgcggctcgtcggcttcacgatcctcttcggcgctggccctcccacatctcccgctgccactgctatatatgttcctcgttttccgctggccagtcagggtgcttgctacctccgtcgccccctggccaccccgaagccttactatttttcggggggtttataacatggttttcagaaagattaggttgacagtaaaagaatgtggttctgacaggctgatatcctttgagaaaagtaaattcgcaaggagaaggtaaatactcactggctgattatcacccatcttcttctgtaattcaagtttcgactgtgcattgtctcgttgcttcttgagttcctccatttctttttccacctgctgtgttcaattaattaggtcagttacaaaatggaaatgattccagttaatttcatccttgagcataggcatttacctgtctaatcttcctgttcctttccattataatgatctcagaagaggaggcacgatcagggattctcagttcagtttcaagtctagcaacttctatctgaaggtgcttcaccaattgcttatctgataccacctgtatgtaccaagggatgaagatttgcattctgataagtgaataaatgatgtctcacagtcacagatcttaccatattaacttttgcattatttgtaacctccttggcacaggttgcaaagaatagagtacgtatttctagattgttctacatgtgtttgcgctggactcatggtacagatgatggatgctcttgcatttccacccaaagaaagctggagaatgcgtgtcaactttgagtctcgataaggtatgtgtccacttcttttatccgagctgcagtggaaatttagagtcagtctgccaatattcccaataaagatagacttcattatactttcctgttcaaaccaaggagcagtaaaaatgcaaatatgcagtaaattatgtaaatagaaaagaggcctcaaactgtgtatttgcatgacagtgcaaataaattgtctagtttaacatgttcatgacactgcaaatacacactgcttattattagtcctgccatactaatgtcacttagcccacacattcaagaacttaccctctttataattagctgtgttgcggctatgaccttttaacaaaactcacattagttttaaatatgcagaatgattaaacaatatagtggcaataggacagagtacagagcaagtgcctcccacttaaaggaagtggcctagtggtaatattttgatctgatgcatctcattagcgtttttagaaattcattaggagatcagatacattattaacatactgatatcattacaactgtgattgtttaattaattttcagaataatttcataagaataggtgggccgttgactatttcatacatctagttcagtaagtgtaccttcacattgacaaatcacagatgtttaagtcttacaaacatggttttgatgaattcataaatataaaaacaacattttatacagaacggaaaaaatgatagaacaaaatttatgctgctgaaatgcatgaatatctcaagtgagtcctattgcagtgaattttgttctcaagattttagccaaagccgaactaaaataacatatggaaggaaaagaaataaactccactttggttgggagctaattacatgaattatagctacacagaaaactcacccagcattaaatatgattggtggaagcaatacacgaagaagaggtccttgctgaacagaaaattgtgtgaattcttcctgctactgacgagcagaatcacacctccagttatcagcccctgcaagtgccaacccatagtgcaaagctcaaactactccactgtgagacaaaaccacaaaatggtcagaaaaaaaagacggtatgctttaaagagcatactgactctgtaattagtctgtatggtggtgaacagatcaaaactatggcgaaacattttaggaaaaaagaacttgctatctgtagttggcaccataagcaggatgcaaaaatgtgctaccataacaggaaaccaaaaccacacacagcttcctgtacttagactggaggatgctcccagtatcactccactaacaaaccgcaacttgttcatctcacataaacaaatgaactgcatggcatacatcagaaacaagcagcctaccaacagttgacaaataaatcaatagcagtacctaattctgaaactatcgccttttccccttccaagagtacgggaatggaataatctaccagactactatcagatcgcgaccaatacatgcaagaactcacgtagcaccttggaactaagccgaataagcatatagacaaggagcgggaggggaacacgagtgatctttacccagggaagaggatgagcggccgaaatccggaggagaaagaaaataaggtggttcgtgtgcgggatagatggaggagcgtcgaggtgcacgcagcaggtccacttgtgctcgccatccccaggccctagcctcatcgcctcgccttgccgcttcagttcgtcagcctcctctagagatccagacttttttttttctgagatgtttctgaatttatttacagctgatgggggcgaaatcggcggaaacgggggcattacctttgtggcgcttgtacttggtcttgcactgggggcaagcctgggcgccatcctttcgctcgtactcatagcaggggcggcacaccgggaagccgcagacgtcgccctccgtcacctaagatctggcacgcctgcccgctcccgtgcctccccgacttttgcggaacagatcacccacaaaaccaaaaatcaaaatctggactctcctccgcaagatccacccacgagttgcggtgcatttcgggcggccattcaccacggcatccgcgtcgccatccatggcgcacgccgcagcagcagcaaaccagttctcagctcaccgaatcacgcccaggatccgtacaccgggatcagcaccgccgcatcccgcgctgccaagaaatgaacacgacaacatccagatcaagaacggagacaaaaccaagaagtcaccggcggaggcggggcaagcattaccaggaatcctcccggcgaagaaggcttccagcagaggacgcgggagtggacgggaacttcatcctcctcagcgccgcccgatctgtcatcgacgagcccggtgccgctaaatcaagcgaccaagaactcaccatcaactgattcgacagccaaaagccaacctggatctgtaacatggaacatcccatcgtctttggatttggatcagagagagagggagagtgaagaaagaaagggcaggggagcagggccttcccccctggaactcaccactctgaaggaacggccgacgtcgacacttgcaatgaacctcaatgtgctagccctcgcctccggatgaccggatctgccggcgaggaggtcgtggctgccagatccggtgaccacggcctgccctccaccggatttagtcccacggcgttaaggaggaaccagatgcctctcccttctccttttttttttctttctccgagaaagctcggctggtcaactcaatgcagcacacaagaggtggtggttggtctccgccatggcgagctcatcatccgacccccacaagctcaccacgacggcgagaagaaggcacggcgatccagctgggtgtgagaggagcaggcgacggcgacgcagcgaggagagcgggtggcggcggcggcgctgcgaggagggcgggcaacggcggcgacgcagcgagggcgcgaggaggaggagccacggaagcgtcgtgggaaggggagagcgatagagaggagacaggcgagtgaacggtggcggctagggtttcgggggagacggggaggaggaaagataatgcgaaaaggcccctcagtttccataattcagagcacggttcttttttcccatttttgtctccttcgtctcggatttctcaggactcggagggtctaaacgtaagattatggagccgaaaaagctacaacgaggacgtataacaaaataactataaaagcgagggcttttgtgcaaaaattccaagacgacgcggaggcaggagagctcgcgaaatcccacccattttccagcgccccgtgacgtgtcgcgccccggccgcgtccacgccagcgcaaaacgctgagggacgagcagccctatacctggccaaatgggccgtgccaagccgggccggcccaagcacgaccgcactgtagaaggcccaggcccggcacggcacgccggcctgtgggccgtgccggcacggcccgtttacccgtgccgtgtctgggccgacgccatagcccgtgggccagcacggcacggcacgtttactgtagagggctggcacggcccggcacggcccgcgagcacggcacggcacgggatcggctcggccgcgcacaccgcggcaccgcgcacgtggcgccaagcggccgagccgccgagggcagccgcggggccaggcggcgggaagcgcgcgtcgcttcgttcgcgcgtggcgcgtggcaagcggcgtcgcgacgtgtcggcgtgtcgctggggctggccagctgggaggctgggacgctgcctcacgctgggtcggtcgctcactcgctctcgctgcctgtctgcctgtctgccactctgcctccgtgcctcgttgggagcagccgagacagcgactcggcgagaccccgtacggcggccgaacggctagtcaaacgacgaatgcgagagtgccacgtgtcccccaacggctagtgagctaatccaacgaccagaagtagccgttggagagcaaaaaaaaaggaaaaaaattcgaaaaaaatatgaaatttatttctataaataggacacccaccagagcattctgaatcatccatacctcccattttgtgctctgttgtgctctttcgtgtgatagatcgattttttgatttagacaaaatttgacaaaattttgtgtaaaatcaaaaatagtttgtgactaaaaatagtgcatacaagaggtgtaaagccaagcaaaggtggtaagaaagaagtacgtcatatattcagttttatgtattattttattttatgttatgcgaataaatattctgaaatttgtttatgttgttttaaattttcagaatggatgaatcgaacattccatcgttcacgttaggtgatttcgaccctaactacgtgtcgaggtcattcccaactggtgagtatgatgccaccggatcggctccaacaccaccagttatggagccaccggcgggttcagaagcatccggcactatgagtgggagtgcatcgacgaacaccggctcaaagagatcaagaacttccggtgtttggcaacatttcgatgaggtggccatgacaggccctgatggaaggcaggtaacattcgcgagatgtagaatatgcaaaaataagttatctgcaaaatcatctggtggaacaggacatttgaagcggcatgccgaggcttgtgcaaagaagcaaggaatccaactacgacagcaacaactactactaaatcctgatggtacggtacgtacgtgggagtatgatcctatggtagctcgagaaaatcttgcccgtttaattgctagacaagatttacccttgaactttggtgagagtcctgcatttgaaaattacataaaaaattctcataatcctaggtttcaagctgttagtagacaaaccacaacccgtgatttgaaaaatgtctatgacaaaggttatgaatcactgaaggaattatttagtacatgcaccttttctgtcagtgtcacctcagacatatggagtagtagggctaaagaggattaccttagtgtagttgtacatttcattgatgatgattggcaaatgcaaaaaagagttcttggcttaaggttaattgatgtttcacatactggtgaaaatatagcagagagaattcgagaggttattgatgagtttaaccttgcagataaaatttttgctgtaacaatggataatgcatctgcaaattctagggccatggaaattctacaaccattattttgtatttatgctcaatcatttcttctgcatcagcgttgtgcatgccatatcattaatctaattgttaaatgtgggtttaagagagttaatgtacacatcgacgctgttcgtcaagcaatcacgtggttaactgcttcaaacccacggattgcacagtggaaaaggtattgttgtgcatcgggtgagcccccacgtaagtttttaaccgatgcagaccatcggtggaatgccacttattttatgttaaaggttgtattaccttacaaggatttacttactgttttccttcaaacacgtaatggcccaaaaaacagtgatggccagccaatactgactgatcatacctggcacattgttgaaaggttcaatcaatttcttgaaacgtttcatgactgtactcttctgttatctcaagtatattatccaacagctaatttaattttgcataatattcttgaaattgccactttgttgaaagagtatgaaaatgatgaccttttaatgcccgttgtctttaatatgaaacaaaaatatcttaaatattggaaagacatccccatgttgtattcttttgcatttattcttgatcctaggggaaaattacggggattcctcaatattctttcacttattggagatattattaatgttgattattctacctattatgctgatgtcaaaactaaattctatgaggtatttcgaaagtatgaattaaagtttcagggagatcgcttgcaaagacccccacctgtacctgcagcaggtaagaaaaaattacagtggagcagaatttggggcagttcatcttctagccatggtggtggtaccagttcatcagcagcaagtggggacgctagatcgcatggtcctgccgaagagttgtccaactatttggatagcgatgccatcaggcatgaaacgtcagacttcaacgtactcgggtggtggaatgatcataagatgtcatatcctgtgctatcaaaactagcacgggatgtgttgacggtgcccgtatcttcggtatcctccgaatcagccttcagtctatgcggaagaattatcgaggataggagaacaagtctgagcagcgatcatgtggaaatactattaagcgtcaaagactgggaacttgctgcagaacatgcccaatacactgctgacaaccaagaattggccgcacagttcgaaaacctttatttagatgacgaacaattagggtagctagtttatattttttaagtattgacctgttggctgtactcttttctttgtcatggttttctcaaatatgagtttttacatgataaagtttttaacgaggcagcatgtatcatgtaaacatcaataaaggtcattactcttttttcctcatatttttctaatatttttctaagtctaattatttttctatttttctccaactatccattaattttctcttagcttagttaactttcagacctttctctttgatttgaattgttccactgacagagtgacagcctgacagtgacagactgacaggcaatagacacacggtgacggacagcgtcagcaagtccagcgccaccgccgccacgtgtcgcccttcggccggccggtcgcgcggccccggccgctcgctcccgcgtgccgcgttgaaaatttcagccgcgccgcgcgcgcgccttgtcggcgactcggcgttgtcgcctagccgagtccttcggccgtgccgcgtgcccgcgtccttggctgcagtccgtcgtgccaacgggctgaccacggcccatgggccattgacgtgcccgtgccggcacggcacggcacgacgttccctcgggccgtgcttgggccggggagtaggcacgtgggccggcacggcacggcccgctataggagtcgtgcctaacgggccgtgccctagcgggccgtgccgccggcgtgcccgtgccgtgctgggccgggccgcccgtttggccaggtataagcagcccggaggaggtttgaagtctttagattagatgtggtcagtccgtcctatataattaaggtaggtagatagaggagagggcgggcgcacggcagcaataagcattatatagagagggagcgagggattgaattgaagcagagcgcagcaagcatatagtaggtagatatatatagagatcgtgggcgagtgcgagtaccggggcgaggtggtgttggtgacgccgagctcggccatgccgcggcgctccctctacctctctaacctggacgaccagcgattcctccgtttctccatcaagtatctctacgtcttcccgccctccgccgccgtggccgccgacgccctcagggccgcgctcgccaaggccctcgtccactactacccactcgccggaaggctcaggcaccacgccgacgataagcttgtgctcgactgcaatgccgagggcgcgctcttcgccgaggccttcctgcccaccctcaccgccgccgacttcctccgtgccggtgccaccgccaagccgcacaagtcctggaggaagctgctctacagagtccacgccgccaccttcgtcgccgtcccgccgctcgtcgtccaggtacttatttcattcatttcgtatttattatctcgatctggacgacgtcgctagctctacttaattaattatcattcattcattaacgacgaactcactgatgcactatcaagatactacatgatcgatgctatatattaattagttgagtttttgctttcccttaagattatctatatggctgcagacagtacagtacatcgatcgaactagtgcgtgctggttgagctagctagcattgatattcatcatcgccggcccgccctattgtacgtagtacgatcgatactctactatgtggagataagggagtaattaaggataattattgatggtatgataatctatagtagtattaattaagcacccccacccaattggtccataagagcaagtctaatagtacagcccactaccagctccaattcatctgtagccaatctaatagtcaattcatacaatagttgcttactatactattagtatatggtcccacctgtcatatacacagtgtgtcttggagtacgtgctgcagctggctatagatctgtagcccgctgctcttctctctcatcgtttatatcattaaaatatgtttatagctggctaatagcctgctattgtacctgctctaataataataataataataataataataaaggaagaagcactacttcttgccccctgatcgacctgtgtttgatgatgatgatgagcttgtctgcttttttctgctgctcctatcctactacactagttggtgattaaagtggagcttcctcttaactcctgagaggactaatggagatggaaccagggtttaccttaccgccggtaaccgcgcggttaccgggcttaccgcgggggtacggtaatataaataccgcggtaaactccttaaatacaaataaattttaaaaatattttgaaattttgataaattttgcacggttttgtacggtttttcacggttaccgcggttaccgcgcggtaaccgtgcttaccgccggggcggccccggcggtaaggtaaaccttggatggaactgcaggcttgctgctgatcttaatctattaattagtatatgttagtattaacatttcctttagttagtttgcttgtgaccaccacccaaattaagcagcagcagctggcactacgccagatcctcacacctctgacgggatacctgtgacgggcaaacgaattggtcagtagtgaccattacctttgacgggttatacgggatgccgtcaccggtgaggcatctggccgcggcccgtcacaggtatcccctcacctgtgacgggccgaaaggaaaacccgtcagaggtataccagtgacgagtttttcttccaacccgtcactggtatcccctcacctgtgacgggccgatacattagaagccgtcagaggtgatgggccgccacctgtgacggctttcatttctggcccgtcacaggtgagaggataccagtgacgggccgttgaatagaagcccgtcaaaggtatgagcaatacctttgacgggctttttttatctaacccgtttgaggtgtgttgggtctataaatacccccaaactgccaactgctttccatcccgaccattgtactgttcacaaatcggttgggagggcaaggggggcgattttttgctaaaattcaaggtaaaaaacacattattctccattcattctcaacatatcgatcatcatttatttttcttcgtatgttgttgatttcagatggatcgtagatggatgtactatgcgcatcgttcgtctaccgagtatagagagggggtcactgaatttgtcacatttgcggataatgacagaaaaagtaggatgagcatgcacatgttgtgcccatgtagggactgtaagaatgaacagatgatcgaagacaaggatgaagtgcatgctcatttgataatgaatggattcatgaagaaatatacctgctggaccaagcatggagagcaagaggcgcctgatgtcgcagctgaagaagtgttggatcaggatgtagagaacaccgccgcagctcgagaaggcatgttcgtaccttctcctttaggtggagagaccatagatttggacactcaatgtctatctacaatgttgcatgacattgaagacgcagaggacaacgacagagattatgagaagtttagtaagttggtggaagattgccagatgccgttgtatgatggatgcaagtcgaagcacagcaagttgtcatgcgtgttggaactcatgaagcttaaggctagtaatggctggtcggacaagagttttacagaactccttgagctgttaaaggatctgttgccagaggggaacaatttacctcagacgacatatgaagcgaagcaagtattatgtccgttgggcctggaggtcagaagaattcatgcatgtccgaacgactgcattttgtattacaaggaatacgctgacttggatgtctgccctatctgtggggcatcaagatacaaacgagcaaagagtgaaggtgaaggaagtaagtcaaagaggggaggcccagcaaaggtggtgtggtatctcccaattgcggagcgcatgaagagaatgtttgcgaacaaggaacaagctaagcttgtgcgctggcatgccgaagaacggaaagtcgatactatgctgaggcacccagcagattcagtacagtggaggacaatcgataggatttaccaggaattctcaaatgacccaagaaacatgcgtttcgcaatgtgtacggacggcattaatccttttgggccctatctgtagggccgtcacaggtgacctcacctgtgacggcccagagtgctgggcccgtcacaggtggtcttacctgtgacggctccacggttggcgcccgtcacaggtgacctcacctgtgacggccacatagttggagcccgtcacaggtgagtttgactagggttgacctagggttggacatcttctagatcgatccagatccggcgcccactctcactcactcactctctcgaccgccgcctcgcctctctcgacctctctgccgccctctacgccctcctctccaccgccgcctcgacctctccaccgacgccggcctgcaccaccgccgccgcactcactctctcgaccgccgccatccatctccaccgccatctccaccgtcgccgtctcgacctctccgccgccatccagaccctcctcgccgccgccctctctgccgacatctccaccgtcgccgcctcaacctctcctctgccctctccgccgccatctccgctgccctctctgccgccatctctgccgtcctctccaccgccctctccgccgccgcctccaccgccgccctcgccgccggtcgtcctctccgccgtccgtccatcgacttccccgacctccccgaccctgacctccccgacgccgggatccccgaccaccgccgaccgcctcgacctcttcgccactgcctctccgccgccgccaccaggatccaggacgactacggcctgcgccgccgtctccaagtacgccgcttctccaagtatgccgccaccctcccccattcctccttttttccgatggatgaattgcattgtttagatgaatgaaatgtgatttgttgtttcgattattggtgctgctgtatagatgaattaaatgtgatttgttgtctgtggatgttttggatgaatgtaggggctagattttatatacatgattttggtgcagtgaatcttagcatcaatagaggatcttagcatgaatttttaatgcattttgttttctataattctttgataattaaggacctttattaggtgtagggtttgaaatctagttacaagggaagaattgatagattggccgcagatttaatgtagttccgaggttatcaaaccatcacagaatacaaagtgcatggggaattttggtggataggccagtgtagtccatggacggaaccgacctagacaccaaaattctccatgcattttgttttctgtcataatttgatgattaaggaggctttgcagattatctaaacttgttgatttatataccctttttgtctatgaataggtcaattgtatgaattgttgtttatatacatgatttatatacccttgctgctgctgccacaatattgtgggctgttttattatgtagacttgcttgaattgaatggatgaattgctgtttacatgaagttagtagtactgtctccttttttatctacacccctgctactgcccctacacttgttcacttgttccttattaaatggccagtgtagagtagttatatacctctacacttgttctttttttatgcataagaacagattttgtgcacttgctctttttttatgcataagaacagattttctgcacttgctcttttcttctggattgataaatggccagtgatgaattgctcaataagaacagattatctacacttgatcatttttttatctattcttctttttgcccctgttgtggctcaataagtaatgaattgctcaataagaatagtttatctgtacccttattgtgggctgttttttaaatttgcatgattgactcagtggttatatacctctacacttgttctttatggataagaacagagtatctacacttgttctttttttatgcataagaacagatttgctcttttgatgttatgatttcctctttttatcccttcatggaaatgaatataattgatgcatatttctgagcaaaactgaggccatatctttcatagtataccccgtattacatgattttggtgcagtgaatctctctttttttatgcataagaacagattttctgcacttgttcatttttttatctacaataatatatgcatgatttatataccactgctgttgttgcccctgtacttcttgttaaatggccaaggatgaattgcttaataacattctatctatacctgttcttttctttatggataagaacagattatctacacttgttgatttatatacccttgctgtctatgtgaatttccctctgctgttgctgtttatgtgaatttccaccctgctgttgctgtttatgtgaatttccaccctgctgttgctgtttcctactctaatttcctgcacttgctcttttccttatggataagaaaagatgaactacacttgttctattttattgataagaacagatgaactacacttgttctattttattttctatttcctcttttttctgcacttgctcttttcttctggattgataagaggagtatatctagacatgttgttttagttaatttgcccctgctgttgctacccctgtggcatatatactcctcctgctgctgttttatgtcaatcatgcaaattatgtacccttgctgctgctgttttttaaatttgcatgattgattcagtggttatatacctctacacttgttctttttttatgcataagaacagatttcctgcacttgctcttttccttatgattttctctttttatcccttcatgcaaatgattgtaattgatgcatatttctcagcaaaactgaggccatatctttcatagtataccccgtattacattggatctaatgctatttagtctaatggtaggaaatttataatctttttcgcgaaagttaaaccatgtcaacgcccggcgcaaacccgccctccccaacacctgcgaggatccaggaagaagcaaacccagccacagaggcagttgccgaaggtcatcccgcgacaacggcggtccaacaacccgaaattcatggtaatttataggataaattttcaccacatgaccacataaattttagctagcaccccttagcaaatattgccttctgtttgtgctgcagaattgccgcaggaacaacatacgtcgatgtcgggcgagacaagtgcaagtaggtctagtagaaatccgcggtcacaaaatatatggccgaccacagtgcaagttataagagaggttgacgctagtggtaggcccacggcgcccaggactgtcattggaagatggtctaactgctgcgggatagcggcacgtgagaacttcgggatcctccataaagatatcgggaaggtcacagaagccgagaaagagcgagcttggacggcaatggagaaatggttcacatttccagccgaagcaaaggataggctcaagcggaaggcattacaaaagatgggcaaagcttggaagaattggaagtcgaagctcttcaccgagtatgtcaacccgcccggcaatcatacgccgttcgatgaataccctcaaataaccgaagcggtgtgggaggaattctgctctctcaagaccacccaagagtttagggaatccagcgaggcacatcgcgtactgcaacagcggaatgaacacccgcatcggctgggcaccgcagggtacatcggcaaggaggcaatatgggcccaagaagatgcagccgctgcagcagcgaatgtacctgccccgttttcagacatccctgaacaaagagctcgcaactgggcgcgggcaaggggtaaggtcaacccggacggctctgtcacatttgagaacaaaagtgatgccgtcgtctatcaggaactggtgagttcactacttaacctaactaatttccgttcgtataaagtacaagttcgtataaacgactatcttcttttctagttgggcttggttgctgaacaagcttcacaaagcgaggttgagtccgcgccgaagaggcgcgaagatgacatcctcacaaaggcgctcggaaccaaagaacatcctggccgaactcggggaattggtagcgatgtgccctggaagcatggactccctcagtacagctcccaatacaggaaacggaaagtctccaaggaagagagggacgctcgtttgaaggccgaacttaaggttgaggtcattcaagaactagaagctagcatgaatgcaagggtggaagaaagggttaacaaggtgctcgccgacatgaatataccccgagtcacaacacctgctgtgcaaccaactcctcgtatacaacacgacgcgagtccgtcacagcataggagtagttgtgcatccacagaggtgccggcccctggtctcccgatcgcaccactagctgcagtggaccacatcgaggtaattattgttatccgatccatatctaataaaagacatttacacattccaatattaaattcaaactttcaccttatgcagggcgcagcacagtgtgtcctataataaattaaattgttgcatatgtgatgttgtaaattgttgctttgtgatggatctgtgatatgtgatgcatctgtgatgttgggcagttggggaatatgtgatatggagggggggtgactggcacctgtgatgtttctgtgtttcagagggcatggctagcaattcctgaggctagccaatatttagcatttattttttttctggaattaactcatcagtgacggttcggaagaaacatccgtcacaggtaacttcacctgtgacggactcgcaaacgtcggaccgtcacaggtgacgcacccggtgccggatgttacttccgaaccgtcactgatgagttaattcccgaacagatattattgctcaatattggctagcctcaggaat

SEQ ID NO: 8879 - DNA, 91804 bp, Oryza sativa
catcagagctactttggtgattaacataaaagaagtaaaggtttaactgctgggttcagtagcattcgagaaatacaattatataaatacctcagttcttgtatttcaagtttaatcctgtacgttagatgcgctttttcagtctccatgactccatggaattaaggatgctaaacagctagtattgtctttagtgccatttcagaaggcatagaaaagatatataggcatatagcctcataattaccagaagttttggggaatgcaacattgtatcacacataaaaaaaaaatcagccacatcgcaaaataattacctttctttttctatcatcaaggggctgtacttcaatagctagtaatgtgtccacgtcatcggcagtaaccaaatagttaggttgtcttgctcctatgccaacagaaaacatttatttcccaactttcttgaaaatcatagaatcctatttaatgcaagtgacaagctcacagagctaaagtgacaaaaaaaagtaccttctatgaaatttacggagccatcttctaaatggcgcacccactgcacataggaaaatatattttttggacagtgagattgccatgaaagtttgaaactcatatgaacaatataaggtagagaagttcttttatccagaatgtggaatgacatgaattacgaagagcacctcaaaattacaactggtggttccattggtggagtacccgcttgcttggagttctcttccaggaaaagcttcacctgtgattcgaaggccctctatgcctggcagtggatcatcctcagcagctacatattcataaaagaggaatatatcatcagattgcattagtgttaaacaaatatataaatttatttctaatagtaattaccttcagagaaagaagatccaggctcctcaagaacagtaggaagatacggatatgaagggtttgtatcctcaatgccggataccaaattaactgagtctccatgaccccaatgagcagaatgttctcgtgcatgttggacttcagcaccctccgaagcatccgatacgtcacttctactaaggtgcttgaatggtgggttttgattctcgggctcaaagtccaatgggacagaatgtggatcatgctgagatacttgagaagaaacatccctcctgaattttaagctattaaatataaattataccacgtttaatgttcttgtgatgcctctatataataaaaaaaattattgactagaaaaatgattattaaatcttcctcaaaaacagtttagctatttgaaaatagtgcggcagcgacaaaaaacaaagagaattcaagaaatgccattgacaaacgctcaattccaagaaatgtcattgacaagtgcgagttccatgaaatgccatcgtacaagcgactttgtcccagaaatgccatcgccgttagggttccattagcagtcctccgttaagtgctataggataaacaacgcatttaacggtgtgggatggacgaaaccctaatggcaatggcatttctaggacaaagtcgcttgcacgatggcatttcatggaactcgcacttgtcgatggcatttattggaattgagagcttttcaatgatatttcttggattttctcaaaaagaaatgaaatgttcttgtagcaaattcccacatccctgaatttttcatgattgtagcatactaaagaaagtagagtgtaacatatcagaaattagtaaaagcaattcaagtaatgagtaatgactactagaagctgctagccaatttacataggtcaagaactggcaatcatagctgctaccttaagaatggaattatttcatcatgcgcaacggcaacgctggtagatagaataaagtcagtcaggaaggtacagtattaagcacttaaagaagatactacctgcttgaaagagagtttcttcccatgtcaccatgatcaacatttcttggaggaacatcagttggaatgacttgacggtttttgttccctgctacaccccaatcacctctaacttgaacaggggaagacattggagattgtatatgagggtacggtgtctgggtcacaatatcgaggttgcttttgttctgaaaaagtaaataggttagagcatttctgcaatagttatgacaagaactcaaggagtatagtgccatactgaagtcaccaatgcttttccaagaggatccgtaggtgagtgtacaggaagagtggcatcattcgccaattcagtttgccatggagtaatctgataacgtgactcttttaatttctcctgcaccatttaaatttgcacaaaaggaaacttcaaaattcagtcagaaaattttcggtagtaagtttgcatgcacgagagggacactattgggtacacttgcactgcccacccctagtgtctctgaaaataaatcgcttctttctttatgggaaaagtaaatgcatatttgcttgagcttattgagactcacctcagtgataataagttgctcctgcagatgcttaaacaaaacctgcagaaagggacacatttagtgaaaagtcaactcaataaggtacaagaacagaagcaacttgatgtgttgatcatgtgttatgaacctttttttaaaaaagaaaaatgcttaggttgctttttcaataatgaaagtatggcatatttctcagatgaaattaatgtcattgatctcttttcccttttttgccatttgcattcagtagtgaaatttatttctagttgctaacgtatacgacgttgcccccacgaaacggcagaaaaaatattagaaaaaagagtaaaccttcaaattgctgacgatggattgagcatcaagaacagaaggctgcaggttttcatattcagacagaagaggcagcaacgaagatatgaaagttgtcctttcttgttgtgcagcctatagcatatagtgacataagcaaaactcagtatagtatagaagaacaactacaatcttaactacaagccctgatttatcttatagtaacagctgcatagatccaaaatgaacatcaccatggcaatttatgatcctatctaatgttaagatgtacccatagaatagtaagagctgcatatatccaaaatgaacatcaccatgggccatggcaatgaatgatccaacctaatgttaagatgtattccataggatagaggtataaacagaaattttcaacaaatactaccttggtatagaccacaggaaaatccattagtcaagaccttgcatcaaacagctggttctaaaaactgttgtaaatatatggattaaaaaacagatatatcattctgcatcgttcctaacaattttgagctataacaccaagggacaaggtcaagtaagcacagaaaacaacattcattaaagcactacacgtgttatgatcatttctgtgcacgttttttaaattttgcagaaaggtattgaagtatgactggaagcataataagcctgactaatataacacaaacatactaatcgaatttcaaagaaatttccagtgacagagaactacctgcactgcatatgccagacggatgttttcctcaataatatcttgtctatatgataaagcttttgatgctgcatcaattaaatcttgttgctgctgatcaaatgcctgaaagatttttttttttgagataatatgatatactcactagttactccaagtgactaatagtttatgataaaaagaaatggcctaccatccgcatttgagcaatgcgcctttccaacatatatttatcatcgagtatccgtgcttgctgtcagggatattatgtagtcaggtacaagataataaggggaaaggcaacaaaaatgaagtactttccatttgtaaaaaaaaaaaaaaaggccaccttcaatgagtagtcagcaagatgttttcttaattgcgcaatctcttcctcattttctttgatcttagcagtaagatcctgcataggaattatcttcattagggatgatggatgatacaggtacaaatgacatttgcaagcaacttatactgacatgcttccatgacatgttcgaggccatctctgaagcaggcaataacccctgtccagctaggttcaacctaggatcatgctcgccttcttttctatgcctgtatggaagggcttctattttgtcaggatatcgcaagcaaacaagaccatcccacaaaaggaaggcctgcggcctaccgttgttctttttccccggcaacaaaaatggtagggaaaacatggagtgtggtcaggtgagttacctagtaggagaaagggaatgggaggatggagtagagaactgtgagacggcagcgctgtcgagggcaggctgctcccctgatgatcttttagatgctccattggacagggcattgttttgcctgatggtctgctgcattgaaggctctccactttcgaatgcgccattgtggtgaagggcagagggggtgcgggaattatctgaggacgcagcgctggcaggtgaccttgacgcatccatcttagtagcaacgaatgagcggcggtcttgggctactccactggaagaagcttgggatgcagcatcttcccgctgatcccaaaaattgaaagacgctgggtgttactacatggctacattttgtgcatatacatagctaaaaggaaaagaaaaaaaaagcaggcttacaatcctctgcaattgtcgcgttttctgcatcagttcctctttgaggcgattattctcttccaactagaaaagaaaaacatggaaacccaaaatcagctacttcagtggtgtgcggaaataaaatagggcgagttgggagtgggacaggaggggaattgtggaagaggcgatgaggaaggaattgcaagggtaggttcgtgggtaggaaaggataagaggtagacctggttgcggatggtggcctcggcgccctcgacggcgcgcatgacgtggaggaggtggtcggcgttggccccatcggtggcggcggcggaggaggaggaggggtggtcggagacggaggccgcggctaggcgccccgcgagggcgtccatggcgggggcggagtcgcgagggcgagtggagtccaagagaggagaggagagagtggaaattgaaggcggaggggaggcggaggcgaggtgggctttgggttaggtgggtgggcgcggacgctcacgaggaagacgatgacccagcctcctcgccttttttgccatttggatcggaataactacttcttcatcatttttctattttagatttatcctaaatcaatgcttttaaaattaaatttattattaaaaaaatatagtgctgtactatactctttattttacgttagaaatactgctatacagaagcttagcaccaactaaaacgacgaacaagatgagtagtgaagtctatggctctgtttgaatctcttaaaaataaagatggagataaaaattaagtgttttacataaaacgaggtggtaataacttgtgattaattgagttttaattattataaacttaaaaaaatagattgaacaactttaatatataaaattttcacacaaaacacaccgtttagcagtttggaaagtgtgctacgaaaatctagaaccctctcatacagggcctatgttgtctgtgttctaatcctgaataaaaataagtggatttctccataagcatcacgcatattcattaaaaacagagttttcttttttccttttgaccaaaaaatagaagagaatatatgtgtatactttgattccgttttattactaaaattgaagggtttttttgtcatctttgaagatatatatatagttaaacgccgtgtcgtcccatccaagcatactacaattgcaagtgaatttcgtttgcaacagcataagtagattgcacaacaaactaacttcgatggaaacgtgaaatctacgccatgcatactctattgcttatatcaccttttgttttggattcattattatcacttgagagatgatgagaaagggaaaaaagagagtgaatttactcggccattgtttgcctgccgtggccccaatcctagcccatatatgtgaatcttcagcgtcattcacagctcggcccatttcatgttacatctccttttttttcctttcctttacttttcttttggtaatggatataccttcttcgaatgggacaattcggtgccgtgcacccttcacatttcttcgataacgaactaaaaaaatgtgcagccttaacataattatggtactagatctcacaccccgtttgctttaaaactccatcaagatttatattgaacattggtttgtccaaatatataaaaaaacgcacatatgtatagcctaattaccccgatatgtgcatatttcacaacagaaatagaatatgaaaaacaaataatgaatataaaccattacgtccctcaaccattttgagatggcatacggggtacacagctcatataacctttttagcattgacggttatataattggtgtccataacttatacgaatatctccaaatgacgaatcacgaagttactcataaaacgtcaaacaatgatattaatagctaccacctctagaattatcgtgcaaaattaagttatgctccctccgtttcagattataagacattttaactttggttaattttttgagaattacgcagtacaacgcagactcgcactattgaaaaccattaaatcctgaaaaattcgttctgatggggagtcgaatccaggacctaatgtgctactgaggccctttcgcaaagtactctaagtttgactaattttgtagaaaaaaatagtaatatttttaacacaagacaaatatattatgaaaatttattcaattatagatttaatgaaattatgctgatgttgtaaatattactactttttttctataaaattagtccaacttaaagcaatttgattttgatcaaagtcaataacccgaaacggagggtgtatgagatgatcaaatacacattttgttcttgaaaaggaaatagtagtgacagattctcaaaaggtccaaacgtttggacgtgaaattcacttggacattgacttgcacggtttgtatttgtgatccaagtgaaaaggctactaaaggagggggggtagcagcagcggggggccccagttggcagccacttatctcatcgtagcccttatcttcctcacgggctcacgcgcggcggggagagagaggacgtcaccgatcggccatgtccgcagccaccgcgtgcgcctcgccggcggcggcgcgcccgcccctccacatccccctccgttcgcctccttccgccgggcactttccctccgccgccgcctcccgccgggcttcctccgccgcttgccgatgcaccgattcggcccctgcctccgcctggccctccacttgggattggacccgctggacccgccacttcgccgacgtcgaccaggccgagagttacgcctccctcctcaaggtaccctaccctcgccaccatccccccctaatctacttcctctctatccatttcaatccaccctaatccctacctatcttgtgcatccactctgcgcagttccagctcgaggaggccgtcgacaacgaggacttcgcggaagcctccaagctcaagaaggccatactcgaggccacgggcaacgacgccgtcgcccaagtcatgtctgaactcaaggtactctgcttcctgttcgtcgtccctttgtcaccgatccaggattgaggatctcaaccccagatgctgttgttgtagctagcgattctttttcactattgtttctccacccatgtagactgctatagaggaacagaggtatcaggacgcctcaaggttgacaaagcttgccagaaccaacttggtaattgattgaatcagattatctttaacaaacacatcacacataagcgatgtattctaacgacttgatttgcaggtaggttggtgggtggggtacgctaaggataccgatgattcgatcgggagaatcgtacggataagccccggtgttgggagatatgtggctaagagcttcagcccaaggtgcgtttatgtctctttgcaacctatgctaaaaccaagtaacttttgtctaggtgatccataattaagtgcatctttcctgtaggcaattggttactgcatcgtcaggaactccattatttgaaattttccttgtcagagatgacgatgagacatatacaatgaaggtgcactgatgaaactgatattagtagtttgtattatagtcttcacgcagttcacaaaaaaaacaagaactctgttatgtctagttgtgatatttgtatttacgaaatttttagacaggttgtacacatgcgaccaacaaaaggcacttcaagtgcatcatccgtatcatcagcaactgcagaaagtccagctaaggaagagaatgaaagctcattggaaagtagtgctatatctgagggcattaccgatgaagcgaatacagatactacattaaagggagatgaagatgttgaggataaagaacaagatgttggtaacgccaaggatagtagtgttgaagggttgaaaagcgttctgaatttcttcaagtctcggattcctgaattcaaagttcaagtaataaatgtagatgtgtctgaggaagctgaattagcttcagattcgtcagaagaattagtgcaagatgatgtgaagagcacgtcagagaactcattggaagattctaccactgaggagcttcagcaggatgatgttccagatggagattcagactcagctgaagatagtaaaagtccagaaatgaagctcttcattagtggagtggttcataacaaggaggatgctggagcaaaatcatatgttcgagttccagctgaaatcaataatttggaaaaggattccttcgaactttacattcctggaaaaggttctgatcgagatctggctgatacaaaggctgcaaaacagaaagttgctgatatggctgccaaattggcatcagaacttatgccttctgatgttgcgaaggcattatggggaacgaccaagagttcttcgaaggtgagcataacacttggtttagctatatataagtctggagtttagagcatttagtgaggtatgctttggtttattgaagtcttcacaattagttgaatagtatcatgtctttcacaaagtaacatattagtatatgagcattgagaaatagtttgacccattctatctatcaagtctattcttgtttcatccacttgtagtggtaattgtcaactctccattgtccctactccctagtattctaggctgtatttctttcatgcaatcaagttaactgtgaaatgatggattcactgcagataaataaagaagtacaagagctcttaaagcttaccctcagcaaggctcgagtcaagctgactgagaatacaattttcaataggatcattactgacagtaacggctcagatccatttagtggtaatgtcttgtcagttaaacggacgccttgatattttctctgctttgactgatggattcttggtgtacatgtaggtctctatgtgggagcatttagtccatatggaccagaagttgtgcagctccgtcgaaagttcggccattggaacagcacagatgaagtggagtttttcgagtatgttgaagcagtaaagttgactggtgatctgagtgtccctgctggacaggtttgcaggcattttgtatatttcaacgaacaagctggtcatctttctaatgaataatgttcaatacagataacattccgtgctaagattgggaagggcaaacgtcttgagaaccgtggtgcataccctgaagaatttggtgtggtaatttctatttatacttctgtttatttaattgttgtttcgaattgttagactagactgtaatggcatgcagtctgcgatgattcaaagtgtatttgtttaagcaaattaacagcttcttctgggccgtgtgtaacatatatcattttccaattaacttttcgattttgcagattgctagctataaaggtcaagggagaattgcacagcctggcttcaaaaatccccggtgggtggatggtgagctattggtgctcaatggcaaggtaaaataattttctgcagttgcaatggccctgaaatatattaaaaaattatgaccataacattgcttaacaaggttttctttaaccctatttcatgtcttgagtgaaagaatggctcacagctgaacatgtcgtttattgttgtcaacactgaaatacctttttttttttctaaactttggaagttttaggatatgaaattataccaccatggcaaatttgatgcttgtggagtgaaagaaagttttgatttctgctgcatcttttgtgctatgaactttcttcaattttgttttgggtcttgatctggagttctggaatgactgacactggaggaaatttaacacgaagttacaagaaaagcgttccttttaaaaatattagagcgtctgttgttagcctaacgtcgattgtcttatcaggtcattagtggagaaaatggttcttgtcaccagatcgaagcttagggtgacacttctatgagtgacttccacagttgaaaaaagttagtggtccaggtaccgaggtttgtatacggtacctgagaagtccaacattataggtcattttcatttgcaaattataaactgggcagaaggtatttgcataacaaaatctctagaacttatcaatgcaatttacattattttactcacctacccaatcctgcccagaacaatgatttcgttgaagtactttttacaagatcatccttgataattggtgttaaattcatttgcagagcacgatcccacaccttggaggtgcggagcttggtttcctgtacagcgtgcctgagcagagtttcttggtactctttgaccggcttaaacttccagagtgatgagattatgctgaatcgagctgttctcacatgcaaattgcatgagtacagagagaagctgacacagtttcaagagaaacgtatagatgtcccgtcatcttcctgaaatcctgagatgcctcagctcctttattagtcagctcctacttgacaggagctgacctgtttgagctttttcagggtataagagagctgactattctggtctaactgaatactgctattcttgtccaatggaaaactggagcttcatatgagatcatgctaggctcttagatgacgcggtatagatataatttgtgtgacagttttgcattcggttttgccttaataatgaaggatgggaaagttttgtattgtctggatgctacagataaataaagccttatctttcaatacagcatgcatggcttaattaatggttactttggttcctgattccaaactggcgcatctttacccaacccaatttttgacaggatcagtttgtcctaaattttgataggagcagtggcaaaaagaggtgtggaaaaaattccgttgccgggactcgaacccgggtctctcgggtgagagccgagtatcctaaccagctagactacaacggattgttgaagcaaggacactttcaacagctgacacatggtcgaatctatgagacgcaaaggcaaacagcaattcagttacgtgaaccaaacagcgacacagatcacggaacaaagcaatagttgtcacggtattcatctctttcgtcttctctttttatcagtatcaccgattcatcggtacagtgtttccagttctcaacatctcaggcacacgcgacaaaaaagatgaattttagtatttgcaatcaatactactccaaaacacaacgaaaaattgtttaacaaaatacaaagaaagataaaaattcacgggacaccttatcttcagctgtggtcccaaaacactccgtttaactgttacaacccgttagattagaaaatcaacaaatgtgaaaatgacagctcctaaagcacaactaagctccactatgtcagggttcttctgttagaccaataatgtcaggaacacaattcagcgccttctcggatgaagaagctgcaggatcatactagaattcaaatcagaccacaatagctccttgctgctgatcagatgcaagtgctactctatttggatctgatttaccctgctataccaaattgaatgtaatatcatgtggaagatgtcatacttgatgggatttggatgccaaataaagtgcttctgcacccgttgaacattcgactgcatagccatgtattgatcatcaggaattgccaataagatctgcttcagtttgggtacatccttttccggtatgaccacagagaacgcactccaattaagtgcatcatcaaatggaagcacaaaattgtccgcaattatcaccggaacacactcataatagattgcctcaactattcttgggctgtttacctcgtatcccatgggacaaatacagtatttacttgatttcatatgctgaatataattcatcctcctagtgattctgtgtggcaaacggtcatatattctcatgtctgcatcctttcctccccaatactggaggaggacaggtcgaactcgtccatgcatctgtcctgcaaagaaggctaggatagatctctctgcagcaggttttccaccaatgcctcttaagggtcttcttggtgatctaagaaatgtttcaggaagggacacatctcttccatgaatgaaaactccttctgagagatctgcattacatagagctttaatggtgttttttctcaattcatcatgcaatttggtagtgtatggtccctgcaaggaagggccagaatcagaaacagcatgttagcttctttcttgattaagtttcagcctccattcaaatttgtatgcactaatattcttgttcaatatgaccattcaacaacgagaagtactcaaaggaagaatacatacccagtcatgacaagcgacaaaaaaatgatcagctccttttgtcctattccaataggggaacttggtggagataaaatctatgtatttctttacaaagatagacaatggctcaattgtatttgacccaggcacataaagattgtgctctagctgacgagagctatacggtagatagaataggtgagctctgtttggatctctcacaacaaaatgttggttcccttccatcagtttcataaaccacccctcagatgcataaatgcctttcaactctggtgaatggaaaataggttttgctccatcatggtatacaaaaactttaagaagtctttccatcagttcatagctcctggaagcatgagaaaaaaaaatttaaatagtcatcttctgaaatgcagaagccattgaacaatggaacaaacaagcaatggcatgataatttataaacatgaaggaaatttaagctatcattacagtttcctctattaacattttcaatcacacgctaccaaaatagaatgtgagaggaaaaaattacacttatttaaggcaaactagtgagcgccacatgtactgaaactactacgaataactaggtgtgggaaaagtaacatgccaaccatgggaatttgtcagaaagcggatgtatgcaacactaaaacattgcttatcttcatgataaaaaaaaaagcaacaaaaaagttgtttccctccctaaaaagtttgttcaacatatagttgggcatgcaagtccataatcccctgataagaataatgctactcacaaattgttagctaaataatatatatgaagttaaaccatagtcatacctcctaaagacagacacattgcggaacagtggtgcatgcagatcagggtcattggacaccagcggtgcaatagtgatctctttctttgcatagattagctcttcatcagctgctgttgaccaaagaggtataggcacctgctaagtttacaggccaagaaaaagatatttaacatttttttactccaaatacaaagagctcacatcacattgtaaaggtgcgtaaagcatcaacctctggtcttggaggaagcattgcatggtccttcatgtcatgtcccttattatagatatcagacctccttataggagaaccactggaaatgggcttcacaagtaaggaggttaaaaaccagaaattatattagttacaagtctatgtattcggcgcagatatgtacctcttggagaaaaggagctgattccgccggtggattttcctgaagttaagtaaaactttgattagatgctattagattagatatatggatatccatcgatcttgcatgatatagtgatgtaggacaagatgaaaacatttgtaatatgctactgtacctaagagaaatatagaatggaattgtatgtatgaaaaagagggattggtggggcaggtgaggtgagtacctttaaatctggagggtcagtttcctccatagaaccatcatctaagttttctgctggagaaggtgaagggaccaaaaacatggaggggactgttgtaaacccagatggcaaattagtctgcaaaacaaagcaaattccgccatttgatgcactctgatatccaataatcttgacatgttacaataacccaatgtattcgcaaaatcacgcacatttactatttacaaagaaagaaatgatgattcatgaagaaggagagccttggaaagcagaaatctttaggacagaaaaggagaggagacctggagctggaggatggaagtggaaggaagcggcggttgggaggcggccgcggagtcgggctggttgcttgtgttgttgtggaggagggaggcgaggagatacgggtgggtggggtcctcggtgggaggggtggccagcaaaaagagcgccgccgcggccgtgagtgcggcgacggcagcgcaggcggtgagcgcgcggcggcgagtgaggaggttgcacgggagaggcgaaggcatttcggagggcgacggccggccgccgcgccggagcccggaccagtacagacagagaagatcgaggacacagcggtggggagtcgaatttacgcctttgccctccggccccacacgccaatttcccatttgcatcaaacttttttccaagtacaggagggctcgtttggtttagtacatatcaaacattggtagtatactgacaaaatctaggcatgtttagcactaacaatattttagtaggatagaattctacgcattcggcagctagagattgggaggagatttgtctcgttttctacgtgcacacttcctgaactattaaacggtgtgtttttttttgcaaaaaatatatataggaaagttgctttaaaaatcatattaatccatttttaaaatttaaaatagttaatatttaattaatcatgcactaatggcttaactcgttttgcatatcttctcaatcttctcttttcctttcctctcaaacacaaactaagggtgtgtttagtttacggcaaaattgaaagttcggttgaaattggaacaatatgatggaaaagttggaagtttatgtgagtataaaagtttgatgtgatggaaaaaattgaaagtttgaagaaaaatttgggatctaaacacaatgtaagtaatgtatttggattgatattaattgggagccaaattttatattatggtgaggaaagttctagaaatataccaaattaaacatgggcattaccatccattctaaaccaaaacatcatatttactattcaaactactaaaaatttggcatcaatcaaagtggcccaaaattcactgctagtgctgatcttgtcaccaaaacgagtaaccaaagctggaggagtactataagtttcacacatctcatacaatagcttcttttgaaacgcaagaatttataagaatttcatcgtttttagttaaatcctctattagacttgagtttgtttgtacatgtttcaaacttatctctcgttttcaacccacatgctttttaaattactaaatagtatgtatttttttaaaaaatatatatatagaaaaattgcttgaaaaatcatattaagcatcttttaccttttttcactaatacgtaattaatcatgtactaacttgtcactctgttttccctcctaggatgtaaggttcccaatcctcactttacaacacagtttaagagtttgtcaaagacacaaaatgcttacttttttacatttatataatagatatagacgcacacaaacaactacacataaacactgcatccatacatgcaactgtgaatgcaccctctaaggcatgctcaaagagatggaaaccatcacatctctgaacacattaaatttctattgaaaactcactcatatggtgtatgtaatattcgtggtcatttgaatttaaacgagtaaaatcatacaccaacgattttaccatcacattgtcggtgctttcccagagaaactttaatttttgcctaccatcagagaaggatgtaaaaagtatttctttttttttaacactgatattatttccttcctccagtggagtatatgagtatatttgacgctgaaagtaatttgagaatatagcaatggtatattttacgcaatactcctatataagcgcttttttaaaaccttttttaaaaaattttgcaacctgtggttgtcacacgtactgtgacggtactgtctctatcagatcgatggtcttacatcctgattcgtacatacggagtggagtactaataaagacggacacgcagcagcataattagtcataattatactgagtaagtagtttaggtagtacgtgggagtaataattcgttattagtcggtggcgtcgaggcaccagcagtagtagtccgaggtggacagctggaggagctcctccggcgacatgcgctccagctcccgctgcctccacgccgggaacgcctccgccggcgttggcggcggcgcgtgcggccccacgccggcgtccctgcaggtgtgcggccgcgcgccacgcatccggcggtagaggcgcagcgcggcgacgcagtcgtcgtaggggtggtggtggcggccggcgatctggatgtggtagccgaggtaggcgagggtgaggtacttgagcgagttgctgaggcggctgttgctcgtcttcatcagcgccgggtacctcgccgtgtcccgcttcaggtactccgggtagtccatgcccagcgactcgaggtcgtggtccaggccgtggccgaccaggatccgggccctcccgcggctgctccgcgccttccacgccggctcgccgttgagcagcagctcctgcacccggcgcgccgcctgcttgggcgtcatggcgtcgcgcaggtgctcggggcggatgccggtggtgtcgtagcggtagtgcgtgacggggatgtgcggcttgacgaaggtgtccaacaccacgcgctcctgctcgtccaccacgcacacgcgggcgcacacgtccagggacccgtcgctgccggcgcccaccatcttgcaccccagggcgaggacgccgccgagcggtggcgcggccgcggggcaggagtgggcggcggcggtgggcgggaggactacgtggaggcagagggggcagccgcgggaggcgaaggcggcggcgcactccggcttggggagggcgccggtgaggtggtcgcggagggcgtcgagggagcggcagtgcttgccgcagacgccgcagcgagggtcgtgcgccgaatgcagcgacgtccgcatgtgctccaccaggtgctccttcttgttgaactccctatagcacgccgcgcacctcttcctcctattcatattttttatttaacttaatcaatttctttctttctttctttctttcttttcttcatatatatatatatatatataatcagaatgtagttagaacattggctaatacctctgagaatctgaagaattatccattctcgatctgaagactactgcaggagtgcaggtgagtggccactggtgtagttagttgttgtgctgattggtgattgctatctgcacttgtttccgatgcctatttatacgcaaatccaacggacagaatttgattcttgacagtgttgtcgatcgaatgtgatgtccctgctagatactccctccgtttttgacatatcctctactacgaatctggacaggctccgtatccagattcatagtatataatgtgtcacatttcttcaaaatggtttatattttcgaaccgatggagtagaaagcttcaccaatattctgctgcatgctttacacatcatcatcttctggttttgaggatattattcaggacatgctcatgcacaaaacagctttagaaccaacactgttaaagaatgttctgaatgcatccatcactatgctacatttcctttctttctgttagcatgcaaaaatatgaaaaatatctctgatgaatatcataatttgcctgcaaaatgctaaccaaccctgcagaacattccacttctcaaggatatactgccaatattaataaagctctagatagctaactgcaaactccatttccatttcgacccccttttctttatatgctgtctgtctgcaacgttgtgacagccattcgccttgcaaagataaataggatgctttgtaccccatatatagttcatttgcattgtgcaaaagcagtactagctcttttgctgaaactgcaattgctttctctcaacgagtgagaggctctcactgatggcatattgatcctcagtcctcacttacaactgaatttttcctctcttcaaaatcccttgtccataaacaaaatcaaagcagcaatccattgacgagtaatctcagtatgacatatataatctgcaagagagtaagaatcaagtaactgaaagtcaccttgttgctcagtgttcagatttatctgaagatagaatgccatgaaatgcaatggaatgaggagatttgtatcacatgtttttcttttctatcccttgattgtttcaggaaaaatcacgtgcagtgcttacatatgcatacatcattaatcatttatgtagaaaaaagagagaatacgggtagataccctagtcaaaaggaatggtttgaaaaagctaactattacgacgatgctgatggaaagattgaaggattcttatgctgtgacaaatcattgggtggatcttttcttcggtgacgatcaagctagccgtgccgtggtgtctgtactgtaagcatcttctgttgtttatgtgacttgatcgaggacattgatcgtgccttactcaatctcattcagttcatgaagtttagagctcttacattgtctaaaaaaaattaagattaatttgaagcttgcccggctagctcttgacaattgtcgaagttgattgagcacagtgaaatgaagtacacaggttaatttagcgcgcggtgaaaggtaggagatcgaagagattcagttcaagcttacgctatctttccatgctcaatgtgctagcttttcattgtgagaagcatatgcattggtgggtgttgttaatttagatgaggggataatgacctggctcggctcgttattagtagtatcatgactagccagctcggcttattaattaaccctaacgagctaaaagcgtggctcggcttagcttacgagttggcttgttaagctcgttagtaagttcaatcttatttatatcaactttaaaatttcaatatttaccaatttatcatatgttagtataatataagcaataactagtaaaatattcactaaatacaaatagttagtttgctagtaaattaaaggactaacactacaccatggtccacttttgctaacaaaagtcagttggaaaaaagactaaattttggaacaaattatgtgtaggcaaacatataaaagggctgcaacaccgactgctgaaaattctgttggcacaggctttgccgatactttcttagttgccaaacatgacttttgtctacacaatggacggacggtgaacgtgggtcattgtgtagtgtaagtactcacaacttaagaagcactaaatatgaaaatatatagtgacttttgtactaatgagtagctcgatcatgagctggctcgttaaattaacttactaaaaaatggtcgcgacacggttcattatgattacgagtttgagccaatcttagccataagcttttttcacccctaatttggatcaggtgcaaatgcaacagaagaacgggtagatgttccaaaggagaagtgcctgctgtgtctcaactctccactgccaaatactggcaatattaaagctatggctacctaactgcaaagttcatttccatttcacccctttcttctttttgttactgtttgaaaagttgtgacagccacccgctatctgaaactgcaagttctttctctgaacaaagctcttgtcctcactaataactagtgatcgagatctcagagaaaacatatcagggtagcaactgaaaatctgctagcttattgctcaggattcagatttcctcaagatacattgcgatgaaatgcaatacagcaatcatatgtttccgtatattttccagaggaaagcaccatatgtatacatcaatctctttatgtagatcaaaaggaattgtttgaaaaagcaaggtgatgctgatgtaaagattggaggattcagatgcaagtcccatccgaaaccgatgtgtcgtccgaaaagaagaaaagaaaaccacagatgaacatgagcctagctgtgagagcgtgtgacaaatcattggatggatctttttttggtttggaggcagcagctgaagaagaagcaccggatatgctgtgaacataccgtttaatcttgtgcttttcttctcattgggatattgttctgatggcctcatcatgtccaaaaagaaaaaaagaagcatcactgttcgatctcaatctcgatctcgatcacgatgcaaaggcaggccagccggttctccgcatatatatatttggctataggtagtggcagaccgttcatgtcgatggagggcagatgtgtatatgtggtgtgtagtggaatggaatagattcagaagagcaaaactaataaaattctgatatgatcgatatgacagcaacatggcatggcatgtactctggcctatattctcatctcgtcgattggaagcatccctgatcaaagatcgtttctgcatttgccatttctccttgttaaattcagttctcttactactaagtatcgtttcacaaaaaaaaaaaaaaggagaagaaaatctcttgttcagttcagtttggcgttcagatgatggagggatggacgatggtcatggtctcatgtatggttgcaggcaagggaattttttttaaaaataatattattttaatggaaaattgcaaaagtagaagctgatcggttaaaattacaagtttaatgccctgtcgaacatccatagttcgacaggggtacatatcgaacaaccacaattcgatagggtacctgtcgaattgcgattgttcgacagggtataaaaaataccctatcgaactgcccctgttcgacaggggataaaaaatgatagaaaaaaagaagatcaatcactatgagcactgtacaccactgtgcatgcagacctatcgaactttggatgttcgataggccccctgccatgctctttcttgtccttttctgtttttttaagtgaaccacaaccctgtcgaacaactgtagttcgacaggtacctgtcgaactgtggttgttcgacagggtatcaaacttgcaattttagctaatcagctactacttttgcaattttccattaaaataatattatttctaaaaaaaattccaggcaaggcagctcgatagatctgctcagacagagataggtacagttaatttgctactactaccattactctttttttttttagataatgtactactaccattactcttactcttgatcatgcaaggcatgggtgttaggagccatgtgggctgcaatatgggctgaatcagctactttccaagaagtccaagcaagcccaagagaccagatcattgtccaaagggcggcacggcgacctggaggcgggcttgcctccttgtcgatctctccttccctctcttcttcttcctaccaaccaatgtatcctcttactcactgattcattcagaatcttctaaatcttgctcctgttagttgttgttccttccagcccacctatatactcgtgatttgtattggagcttaaacaagtgggtctctaacaatgggccaccatttacttaggatgagatcgaaaccgagggcatgaaatggatggcaagacgaagaaagggacagagacagatacatggagcaggaaaaaacagcaaagcagcagcaggatgagaggaggacatggatggcaacatggagatccagatgcagtgcagcactgcaggcagcacgacactcacgaccacgacaactgctggctgcttctacgagttactccatctgtaaaaacaagtaaagtaagggaagtgcttctatgcttcttaaaaaaaaaactgcacgaaagttaaagcacgtcaatggtgaggattaaaagttgattaaccgagtaatcaccattagcaaggggcaatttcgtccagaagtaaaagcccatatccgtatccacatcccttctcatggattgattcgcggccagcgcgcggcagttctcacgacgcattccggtgaacagcgccgcacgcccgcaccctcatcctctaccccctgtaactgtaagagtgttttccccttccgctactaaccacgccgtcgctgcttccttcaccggcgagctctctccttcggggagctgtgtgttgacgtgttgtgtaggtggtgctcgtcgtcgtgctttcaggttcgtcaatattctcgtggttcaggaaacatggctggttggctgattcattgagcacaacaccctcactcaccattatcaacaccttattctgcttcttcgtgattctcggcagagattaccaaagcttccatgtccattttattcctcagtatatggtgatacctctgatatgcattcagaattgaactgaacttaacacaaggctgatcacaatcttttgaatttacatagaattggttgtatgcgctgatcctatccgtctcggactgttcgcggccgcgtgcctatatataaactgcgtcggcttcttaccggccgcacgaagaatcgatggcgatggagattatgcaacagctcgccgccgccgccacggcaacggccctgtgccctgaaccatctctgatggcgatgacgacggccggcgcaggtggaggccgccatcgcgacgctgcatggcaagaagcaacgcctccgcgaggcctgcgacagcctcgtcctccactcgcccatcctcctccccttccgctggtccgacctcgactcccacctctcctccctccagtcctccatccacgcccgcttcagctagctgcaggccctccaggcttcccgccccgcggcccccgccgccgccgggagccatggcgaggacgtccaggaacagggagaggacgaagtgatggcagcggcggcggcgaagatggtgcctccgtttacggtgctgcaggtcaaggagaggagcccgcggaggcgccggcatgcgcgagcatggacgccacaaggctgtcgtcgaatgccgccggcaagcgtgccggcgtcgggcaagatgggttcgttcgacccggtgggatggcggtgccggcggcggcggcgaagatggcgcctccgtcaaaggtgcaagtcaaggaggaaccagtcgattctgatatgcggacagggtgggctagatatggtcagctttttcttaggacaaaattacccctcgttaaaggggattactctgttaatcaacttttaatcctcaccgttgatgtgctttaattttcgtgcatgttttttttaaagaagcatagaagcacttcccgtaaagtaattaattctaaagattaatgatagttgtttattcaaattcatcttaaaaaaatagttattagtagaaagtagtacatctttcatcttaaaataagttcatttctcatctatctcacatatatcaatgcaaacaattattttctattttatctattcctgatacagttattttatacttttacaaacttcgatggaataattgctttaaaaaaattactttgagataaataaaatgagctaaaaataaaattattacgatagagggagtactagtcacattaattatggggattgatcgatcagatcagatgagcatggtacgttgttgttaggcagggtcgcccgtgaagtagtcacgagcgaattgaatttgcaatcgatgtatgcctactactagctgctacgtataccgaggtacgtacgttctagatgaatgctgtaattcgtacgtatacgtacattctgattaaacaaattcgcagtttactctggtccaaacaaacaatattaacaggaatgcttccaattgagggattatcctgtattgagggggaaaaaaatccacccatacatacgaattatcctgtattgaggctcccccgttttatccgtttttttaaaactttttatatttttttattttaaaaacgaaccccctctaagacttaatttttaatatctgaatgttttgacacatcagtcaggctagcgtgaggacggatccagcatggggttgataaggctctcaagcctccactatcgatgcaagatttttgtctctacaaatcaagataaacgaagatttcattcgattatatatgttgtacacatatatctcaattaaatgcatgcacacaccacactttgggtagctttcttgccgtctctccctgccgtccaccaccgccgaacccaataaggatccaactcattgtcaattcctaaaaaaaagaaaaaaaaatcattgcaagttaattaagaaatcgagtattatcgtaacctttttttttttccttgaagataaagatgttgaattaattacttcgggcttaggaagcatgcaataagcattttttatatcctattgatagcaaatcaatatgattcaaaaaggtgtaataggggagagagggaagttgttcatataggtggcacacggaggtaggtgctgaggattaggtttcgacaccactttatttgacgctgagaccattcaacttcagctccaaatacccttggcaccgagctatgtatctattttttttattaagttttagaaaggcttaattgtaaaataagttttttttaaaaaaaagaaattgaaaccagcaggtatgcacgtgaagatagtactcacatgctcactactttgggtccacgctgaggtaaagagaaatttcacggtctttaattaagagaaaaactttaagcgtaagatctagagcttatgtacatgtcttggtatttggtattaacaggtgctactaaattttacatgatgacttttagtaatttttcaagagctgtaaaattactcaaacataaatgaggttatgagggcacagttatgctgttagcattggggaactgtatattattagccgttaatctgaaataaaagtacggaccattactataaaatcctccgtaggtaccgactcatggttgtcggttcatttaaaatcgatatctattaacctttttcgtttctatgggataaaaaaaaaactgacacctttgagcaactatagacaccggttctaatataaagaccagcaccaataatactagtgcggatttttttcaaaagaatcggcacctatacttatattataggtgtcggttttataaaaagctagcccgagccaatagatcatgggatggtgattccttttaaccccaccgagtcaaccagcccctccttatccatcccccctctctctctctctcacacacacacacttatcccgccgcccctcaacttcacaacctcgtcgccgctgcattgtcctctcctccctctttctcctcctcactgcatacgtgcctcctcgctgttgtcgcccatcctcacagcttgtgaaccactagaccaagctgcctggagctcgcgtgccactgatctggcggcgtcgacctcgacgcggagagggctagcctacgacgacgacgccgtcggtagtcattgtctcccacgccgctcctccttgccataaaccgctagcggaacacggtggtgcagattggcgacgatgacattagtggctccgctaggactggagggaggggggtagtgggttcttgatctcgtgtagtccttcatcttcctggtgttgatatatgatggatggggaataataattgaatttcttgatcagtgtggatggggattgttgttgttgaatcaatatggagttctagccggcgtctatgtattttctttaaattgtggggagcccaaaaatatcaattctatcaagtcattggtgacgaatatataattgttgccgactataaaaccggcacctatccaggtttacaaccgggaatttttagatgttctgtagtagtagtgaacaattataatttatatccctatatgtttacttacaagagataggtatattgtactccctccgtttcgttttatttgacaccattgactttttagcacatgtttgaccgcttgtcttatttaaaaaatttaaataattattaattcttttcctatcatttgattcatcgttaaatatacttttatgcatacgtataattttacatatttcacaaaagtttttgaataagacgaatggtcaaacatgtgataaaaagtcaacggcgtcaaataaaacgaaacggagggaatacaatatatatctgctctccaaagaccaagctcgcatgacaaccagatgtttttacacaccttggcaacttgtaagaagaaaaaggatgcaacaaatactagctagcctagcgtatatgttcatatttgtagcagtacgtggtggtggtggtgagctataactcgaggatcagctctcttctctactcatggccaagcatatatgatgtaatcaattgcatatatatatgtttggctgtctctatatataggggacaaaaacagggatggaaagtgagccgatccaacggaactaaacacattttaggcgaataattagaagggtgaatggacagttaattaccatctctatccaagtgtgacagagttaaaagcaggtagctagctagctgccgaaaacactttggcaaagcagctaggaaagaagacaataatgcgttagctgtatgtatgtaagcatctttggcatgtgattggttggaggattgaagggcacatgatgatggagatcgatccatcgttgtgcagctggtagggatcggatagcgatatcgatcgatcgattcatacatgcattatgttcacttacatttcaattaattattgttctagcatttaatttttttattaagatagtacttgttgttcttacatttcaaaataattttggtgctattttttcccctacccttcatcaatacagccatactcatacttatattaattagaagcttctaaaaaaataaataactatacctcttgaaagatgattataatgtaatcaatagcaatgcaatttatcgtacctcctagttcagcgtgagaattagtagaacggtaagcaaaatggaagcgggagtgtgtttaatttgcaactgtgcgataacggagagaattgagaaagtatattaattaagcagcatggtagctagtattatttttccattatctaaaaaccagtgcaaattaagtgtattttaaggaagagtttagtctgaatgaataactttggtcgatgctggttttaattaagtagagcatatgcaatgcaaggctgatagtgggcgtggcggacaagacaagtagttgagttgcttccgtatacggatgggtgatacggccgtccttcaaccatcccccacaaccaagttgcataaatactgtaggagtacatatatgcagtggtcctcctcccatattgtacaataatactggagtatatccgatccacttgctctctctaatctaatggccacttgctaattaaataactcatcatcatcatgcatgcaaatatgcaatgccttgatgagtggcctacggtacatactcgatcgatcgacaacaatatatgatccatcatatatatatgcgctgatctctaactaactaacaaatctagatttttaattgatcctgtatagtatagctaggtaggtaagtaccataacccaaatgactggcaattctttctactcttgctccagtattcccaggtcgttgtaccactgccgcccctcgcgtacaattcctgctctatttcaaactctgcttgtacaagcacaccggcctgaccacgctgtctacttgtaaaaatatgatattttctaatccatttagattagaaaatatcatatctatctattattatataattaaaggaatagaaaaatgagcctccacgttcgctctcatggcctagaaattctcacattaatcggagaaaaagaaaaagcagagtccatatagaaatacaatttagaaatagcttaaattcggaattaaaaaataaggaatattagaagaggagaccggagtccatatagaaatacaattaggaaatagctgaaattcggaattaaaaaataaggaatattagaagaggagaccggagtccatatagaaatacaattaggaaataactgaaatttggaattaaaaataaggaatattagaagtagagtatagagtccatgtagaaatacaattaggaaataactgaaattcggaattaaaaataaggaatattagaagtagagtatagagtctatatagaaacttaaaactaactaaaatttggaataaacataataaaattaaaagtagagtttagagtccgtataaaaatacaatttacaaatagttaaaattcgaaattaagaaaaaatgggaagaagagtttaatgctaatataggaatacaatttagaagtaactaaaattcgaaattaaaaattaaataatattgaaagatgagtttagagtccacatagaaatataattagaaataataaaatttcagaaataaaaataaataatattagaagaagaacatatagtctatatagaaatacaatttacagaaaaaagaaatattaaaagacgagtctagagtccatataggaatatatataatttacaaataactaaaattttatcttaaaaataattaataactaacacgtatataaaatgcaatatgaatattacacattagtagttttgtaaagttattgcaaaatttaaaattatgttgttattttaatatatttgaataatataatgagaaaacatatatgctattatatgagagaaaatataatgatgctagccgcgcaatctgcgcgggccatcatgctagttttttttaatttaggttaatatattttagaacgaatagagtactttctctgtaaaaatacatcaatttctgctttgaatttaaatatagcttatgtccagattgaaagctaggcgttggtttttgtaggatagatggtgtactccacttgtaaggaggttaacctgctgctataagtgaactgggatcaggcacagtttctataggaactgcatgttaagctataggagccatctactttgttgatgaacggaccagatcgtcagctacaagtagtggtgcaaagcgctttaaaaaaattgctacagtaagctacaatcctggacgtattttaaccattagaccaagatgcaggaagtattttattttttttacttgtgctgtgccgttacatatcaggcgaccgtgcgggcatctggttgatcacataaaacgctttcggtggcttattatttggctgcacaacttgtatctaagatgattcatatatacggtgtcaggtgtcgtttttattatttggaatacgcttgcgtatttacgagagagaagtgcaacagaatatacaacggcatttttttcaatgaacagaatacaacacaaaactaattatgcgaccttgggatctatactcagagttagatttaactaagggcacccgcaatggttatctataggctctctacaagagactcatgtcagcatattttcctacttggaagatattaaatgaagagagagcaaagctatctactaacttagagatagtctatagagaaaaacgagacaatgtatgagagagctatagatacctatatagacatactattgagatggtttactattaatctagtatattgttgagatatacatgttttatagagcaccttactttactatttcgtgtgctcgaatgaggaggaatcgaccgttctcacccacgtgcggtgatttgttcatgtctagtcggttgatccgttgatggatggatcgtgtagacgtgtagtcgtgtactgctccctgggaggctgggacatgatatactccctccgtttcgttttatttgacgccgttgactttttatcacatgtttgaccattcgtcttatttaaaaacttttgtgaaatatgtaaaattatacatatgcataaaagtatatttaacgatgaatcaaatgataggaaaaaaattaataattatttaaattttttgaataagacaagcggtcaaacatgtgctaaaaagtcaacggtgtcaaataaaacgaaacggagggagtatcaagttttgcaatacgaaatgttgggcatttcttcagagcttatcccgaatgcatggtctcccatggatggatgtcctgtgatttcttcctttcctacagaaaaagcagatctctttggcttggcagctcgctgtcctgtgattactgtactgtacttaaaagggaggaaggaaacatataaacgcgtcttctcttgagctaactaaaaagaaaagaaaagaaagagtgtcttctattgaggtgaggtcatctgtcgtggtgtcactcgacacttgcaatcaacagctgtttccgccaaaacaaacaaatctgttctaatctcggcacccctgaaccaccgaaaaagctcatcactctcttctcttcactaataacctgacgacctctgctggctgcacttgccacttcatcgtcgtcgtcttcttcttcttcttgttcgctttttacactctcatcaaaagaatcatctctctctctctctctctctttttcttgcttgccttgtttggatcgattcgattaggatgcgattgaatcgcccgtctcatcttcccagccacacccacaaataatgttgtctttccgcaaatcccctccgatatccgtgtcctgctctttttttttgttatcctctaccgaaaatcccgattttttcgctttgaatccgccttttatccttcctcccataaagctttgaatccccgcgagcgagagcgagattccaggcgccgattcgcttccacttccgcgagcgtttcgtgcattgattccaagaagatccaagcttatcgcggaaaagaaagaaagaaagaaaggaagaggagatgaaatgcttcaagcagcagcagcagcagggcggcggcaatggcggtgggcaggggaagaggctggagaggcggctgtcgctgggggagtacaagaaggcggtgtcgtggtccaagtacctggtggctccgccgggagccaagatccggggtggcggcgaggagctgtggagcgccgacctgtccaagctggagatccggaccaagttcgccaccggcaggcacagccgcgtctactccggccgctacgccgcccgcgacgttgccatcaagatggttagccagcctgaggaagacgccgccctcgccgccgagctcgagcgccagttcgcctccgaggtcgccctcctcctccgcctccgccaccccaacatcatctcggtacctttcttccttcttcttcgattcaatttcaatttctatttcttcttcttttctagtacctttattaataacttgttactattattatttcaattataatggattctgtcctgtgcatcttgtggggacttctccatcatttttgtgcacttccatccatcaagtccaatttaatttctagtgcgctcgtagatgtttactactaacacaagttgttgcgttttggtttggttggttttgtctgtaccagatattgaatactagattatctcacttgaacagcctgttagtttcacatcttagttcctttacgctttattggtgtgccccatgcgtgcactaggctgtaggatttgttatgctaaccgatcttcacattaaaggttcttactttatgccttgttttgattgggcggaaggatggggtcgagaagataagtctgggtgcgacatgattcatgcttgtttatactaacccaatgaggagggagtgaacatggcagaaaaaaaaaaacttctcttccagtagtatgatattgatagttaagatagcgaaatctgagtcacgtacaaatgttacagcaatactgttctcctccctactctttctctacgttcatatctcaccctttcgatccatcgagcagagagctggtaatgattgttagtgattttttgtgagatcctgaatgtttttttgtgcactttccatcatatatattacttaatagagcttcctttctttggagaaaactcaacagagcttcgtatttaatggagaagcacatctaataaacttctctaagccgcctaactatttttagccatccactggaggtggtttataggaaagtttaacccctctgtttctttgattggcggtatatcaggatatttttacacgagtgctgcaaaagctagccagtctttaggttaattgattagtccaatcactgtccgcaccacttttataacttatgtgaattggcttcattatgaagaagttgggtaaagagagccaccagccaatggttgtattcaggtttttatcctatgcttgatgagttcatgccatatacagcattataggtgataatgttagatacttgtatgagaagttaaaagatgctattttcctaattaaagtgcgtggtggaccatatatgacatccaaacttaactgctttcatatgccaagaaaagtgtctctcgtaagaatttaatacggagaattgactcagagagtgatagttcgtgactttgcctacagataaaaatctatgttacttttcactttatcaagtgcctacctggattactggtcccacagatcacatggaaagtatcactttgtcaaaccaaccgaagttgagtaagcacaaaaatcatgtgacatctatgcaagttgcactccaaatgttcttcagtaatactggcaaatttctgcaagaaccttaattatttgtgaaattggtttatatgagtgttaggccgcatttgatctcaaatcgttttcctctgttgcattatttgccgttataatattttagctgtccatgttaaatatattgctaaaataggtcttggttctgatagtttgatagataaactgttcatcccttcgtcaccccttttctaacctgttatcctctatttgccccttcgaaatttgcacagtgcgcagagtgatgggaggggcaaatagagggtaaaagttaagaacaagggtcattgaatggatgagcagtttcagagaggtaattaagggaagtggccaacttacagaggcaaataaagaatttctctacatataaagcatgctggatttgaaatgaaagatgcccactacttttaacttgtgaaggaactcttgtaaccaattaatctcgtttgctcattttgttgagtctcaaactgataagaaatatatctaaactcttgtttttcagtttgttgcagcatgcaagaaaccaccagtcttctgtatcattactgagtacatggcaggtggctcccttaggaaatatctacatcagcaagaacctcattctgttccaattgaattagtgttgaagttatccttagagattgctcgtggaatgagctacttacactcgcaaggcatacttcacagagacttgaagtcagagaatatacttctcgatggagatatgtcagtaaaggtggcagattttggaatttcgtgcttagaatcgcagtgcggaagtggtaagggttttactggaacgtataggtggatggctccagaaatgatcaaagagaaacaccatacgaggaaggttgatgtatacagctttggaattgtcttgtgggagattttgactgctttggtaccattcagtgagatgacacccgagcaagctgctgttgctgttgccttgaaggtatgaatttttgacatgccacctctccaatcttcatgtccatctttgtttccttggctataatgtaggctgttaaaatcatgagatgctgctgccttttcagtcgcagtaccagtagaaaattttggtttctttctgtaagagagtaaaaaatgttttttttcccttatggaaactatggcggacatttaattagcctgaactttattggtatcaaaattgcgggtaattagaggatttaattaagcctgaactttttttttgcttaaatcctctgtatcaccccaaaaattgtttgtaattctgttgacatggtttctagcttgaaaaaaaaaacatattaaacatgctcgatccatttaggtaattactgctcaactagcgatgaaatttgaataggctgaaaatatggtgtttttccacacattgtgttgcgcagcaaatatctatatgatcccataagtttggaaaataagagtcggttagcttgtcctatctgttactgatgaccttcatctattggacttttgcaactaatagcttttgtgcagaatgctaggccaccactgcctccttcatgccctgtggcaataagccatctgataactcagtgctgggcgaccaacccagacagaaggcctcagttcgacgacatcgtcgccatacttgagagctacatagaagctcttgaagaggatccatccttcttgcagtcatatataccgcctccgcatccgctgcaccatcaccatcaccagcatcataatcatcatcatcaacagagccttctccggtgcttccctcgctacagaaccacccgacgatctgcatctctgagagtataatctggatgacggcttcgtcttcgccgtgtatgatgtatgcactttgttttttcagtttcttttttcctttttcaatgcgccggccccctattatgcggcagtaaggcttgctatgatttagtattccccttctttcattttttttctgtttattattgacgattttccatcattaatgcctgcctcgatcgacttacttgagagacgacaagcagcagtttttctggtgattatctatctctgaatgtcgttttatttgggtggtggaacaatggacgagcatctgtaattgtaatataatcgagctcttccgtcaatctgctgtttttgttgtgatcactgcaatgttatgccttgaacaagtgcaatgtttatccatgcatggcaagtgagattttaaatatcaggttcaaaaagtgagattagttaggcactgcgttttttttcacattcatctctctgcgtatcattaagagaatcaccagtgtatctttaaaattgagaaggaataaacaatactactatcagtttatatacattataagactaataagtaacaaatacaatgtaatatacttaattacttagccataagaaataaataaataatttctttcatccctctctcatggctagtggttgttgggttagagattttgctaaaaaagcatatgcctttagcaagtactataagtggaatgtctgtcaatgtatattgttatgtttacattgtatatggtaagagacagtattaaggtggaccttacaaacacaagagtacccagagagaagtactacctaagggtgaaaatggtcatggaaattcccgattgaccaagcgttgtttctgtatgaagggcattgttttttatagttgctgatttcgtttttggctatatgtaaattttgtttttttttctcaatttctttctgtatcgtattggacaagtgtcgtttaaatgataaatatagtcaattaccgaccgatcgagcgtctttttgaaagagatgctaccgattccgttttcacccttagtactaccatgtgagagtgaagagtgactttttagttacttgtgggtggtctttatgcatatggccaccttaaccaaatgcctcctgtaagaattaatctcacaatgtataagatccaccttaaaggcttaagaccccccctatgttattgtcctaaaccccttaagtacttgcccctatatgccgtgtaggctcatttgcagatgtggaagagagaaaggattatattagagagtgaatgagctatccctcatgtaaagagcaaccattacacaaatttcagtaaaaatatgagagcattagagttattgggggtttgtgtgttagagtaactattattgtatactcccttcgtctaagaataatgttacttagtatggaatgtgatatattttagtactattaatttagatatactctgtctaaattcttagtactactatcatatctcataggtcaacttattatgggacgaaggtagctggttacctcttaaatctatataaagatgatatatatgaaattggaggtaacagtcacctatattataaaacttgctattatgaaaaaaggagaatcaatagaatattaatggattctaaacaaccactacattaaacatttatgaatgatgaatgtataaatgatgaaaaaactctgaaattgccctaatataatattccaatagaaacctatgttatatgggagtattcaagcactagtaataacaattgttggatcagtagaaactcctggcagagcgagtccaccaacttgagcctgagctcgagctagagcttgaggttgacgacgacgatggcggcgatggagaagggctcctccttgcctccttcttgtactgcggcggaggagaagggtttctctgctgacgtcgccgcgctaggtcatcatccgacgacgaggaggaggactcggatgatgaagacgaagacgaggacgaggactcggatgatgaagacgaagacgacgacgacgactcggaggaggaggaggtgtcggtgccatggctggagcgctggcggtccttaagggaagaagcagcaggagcctccggcggcgtggcattattgtcctcgtcctcccccgccggcgtctgcgtctgcgagtggagcgtggcgaggcggccgcagatgtcggcgtagcagacgagcacgatggcgacggtgaaggcggcgcaggcgaggctgatgacggtggaggggtcgagggcgcgggcggccgcattcatgtcggcggcgatcgcgcagagcgcctcggcgatgacggcgaggtggtcccggaaggtggccatggccggccgatcatctaatctaatctacctgcagtatccaagtgtacgtcgtgtagatgtagaggaagatatatctatatatatatatatatatatatatatatatatatatatatataattcgcagtgttggtgtttggtacggatacggataatgcttctgtttggtatcgtcgccgacatagccggaccccaaaccaaagcttatctcatatgggctttcggcctttattttcagcccacttcaaatcctctcaccttctggtcctcccctctctgcacattttcattttccccctcctccctcccgtgcgttgcagcgcctccgcctcttctcctccccgccgctacggcgcctcctctcattcccgtcgctccttctcgccatcccttctccgcctccgcctcctcctagccacgccccctcttcatccccaacagcaccacctcctcccatcgatcagagctctctccggcaatagcagggtataattcgaagcatggctccatccgatggcggcacgcatagaacgttactttacgaatcgccgtcgcctcgtcttttgcatctccactagagatccccttgacctcctctgcagtctgcagcgcctcgatccccttctccagttattcttctcgtccccctctggtgaagattgccaacggaaagactaaaggtcccaaaaactgcacgattggggaagtcaacatcgatagcagtggttagtataacttcttgctcctgccagtgttcattgtatatgatgtgcagataccaggtcttcagctaactctgagaagttgagcacattcttgtcctagctgctaaagtgggattaagtcagttaacagtacacgcctgagaattaagacctaaatcaaaaatagtaagtttggactaaaaaagatcaacaagttctaaaacggggtgtttaaaggcacttatgtatttgcattttttttattatgcaggtttcatttaagatcactgtaaaaagaacgtgtcctacaaacatagaaagattgtaagcaataaatattatagttatacaatagaaaaatgtgttgatggttcaaattcattaatgataaacaattacacgcacaattgaatttcatatatcatgttatactcatttcaaaatgcatatgaaaacaaatgggtttaaaactagcagcataatggtttgtaagtggattgagatagtatctttattacttttgcacacaaacatataaaattcagtttccaaataaattccatgagtattggattaattcgatatttgctaaaaaaaattagttgtgacaagttagctgctaaaaaaatttagttgtgacaagttgtgataagaaaaatctagaattatatgcaagttggctccttcagaagtcattgtattatatgctatagataagagtcatagaaatttacacattcttttttgttggtattgtgtctaacttctgggtgttgaaccataccaatattgttgaattgggctcctcgagtacattcatctgcactggaattccttatcaaccattagtcagtaagtgttcttccatgtcacactattgcctcaagtaaacaatctactgaaatttgtgtttaattattactttctgaggtcatagcaacaatagccgtggtaatatgaagcgttgaactgtctatcatatcctaaactaagaaggcaagtgggagggatactgtatttacatttgccatagtatgatatttatgaatgtgattacaggttggatctgtatactagactccacaccccttctctaaaaaaatactagaccccagccatgcttttgtgctacttacgatatgtttcagattttttgttgttgtacaattttcaaagttttttttagacattttctcttggtgtcaccatatatttatgatatgatattctttacatttgaagaggcagagaatgattgcaataagcataatcacattggagagcataagcaagcaatggatgatatattttgactgtcattcttttctttttttatattaactgttgtatcgatggacactaaaaactgaagagtaatatgtttaatttgttgtcagcattaatccaaaaaatcaaaagctcagtaagctgtattctgagttcaatatttatcatgtactatctcaggctgttatgtgggttttccttttacctctttggcacatgtgatggcgtaggtaatgagagtcgcgcaacacacgacttatgtggctagttgatttgatgatttcccttcccaaaatatcttaccaaatactccgtattaataaatttatagataaggtcaaaaaaaattatagattgcccaacaacaaacgatcgtgacactaaacattatgggtttaaacgatcataacaatctttcgaaaaatgcataagtactccctttcttttttttcttggagccgaacacacctaggataatactgtaggaaaaaaaatgcttgtgagcacatctttatttatcttttcaaaaattccttgtgaggtaggaggaatatagagtttctttaaaaaattattatggtatcatgtactacctcctagtattttatttactaaaaatcctaacatttttttgttttggaaaataaccacgcttaggatcttgttactactatttgatattcgagaatcaattttatacacctaggtggatgtccacctacgccaatctccatccaatgttctttaagatctgtgccacccatatcccacgcccatcaccgaatacgaatctgcctgtgcacatatctcgggggatgcatcgacggcacaacagttgggtggacatccacctatgcgatcggaataatctttctttgatattctatatatcacaatacaagaataaggctaagttatagtgtttgcaaaaaaaaaaaatatacgaaagttgtgtaaaaaaacatattaattcattttaatttttacctaatacttaactaattatgcattaataaaccacctttccaagcacagcctaagtggtggtggatctaccatcggcacgtcacaactacttttacacgttttataaatcagtccatgaaaatttttaaatatttatttaaatcaagtgaatatatatatatatatatatatatatatatatataaaagcatttgcaaaataaaacacggacattttttttacccatagccttctgttagtagatagaaaaaagaaagaaaaagaataaatgccgaactgcaagtgaccatcagtcctcaccacagttatccatggcaacacagagagaagaagagaaggggattgctttgatgaaattgtgtgtgagcgaagcgacacgtttcgtttcgttttcttggaggaaacaaaataaacaccctccgcgtgcagataaagtacatgtgaatatcgcacatgctcatcgctgcttctttcctccgacgactcgccgccgcctgaaatctctttcttgattcgtgcgctcctgagctaccccgatggccgcccaatcttccactccctcgccgcaaggtcaggtttttcttcccctctcttactgtctcatatcctccgaaaatcgtggcgctccccgtccaatcctttggatcaagatgacgcttttcttcagacttggaatcttggcgcttcttgctcgatgtttctatcccgccgattgttagccatataatttgggactgagtttatgagcaactcttctctttctgttgagagacgagggtttggtaattttgagggttagaacatgagaaccgccgaatcttgtaccgcgattgcctactggaataagcgtaagagtcctggctgctcatatcatcactaattctagcctcgttagcaagggcaactagcttttgaggcgattcagccaagacaagttcatgccctcttgtggttgtgggcacaagtccagtggctggctgcagtttttgctgcaaatatcgacaatttagaggtccatagcaccaaatgaatttggaaccaccggggagaaattggctattctgaaaccttgagttattatcttgttattttgttagttatagtcactcagattcccctgtcctgaaaatcgaactgcattcccatttgctcatgctgcagatggttctggtagaggtgaattctcagacaatttggtacttcaaaccccacagccaatgcgggaggattacatacagaatgctgttaactttcttggacatccaaaagtgaagggttctccagtattttacaggcgctcttttctggaaaagaaaggccttacaaaggaagaaatcgacgaggccttccgtcgggttcctgtatgatttactttctaccgcccctacatggctgtttgtatacctccaaatgaaaataagatgaaacgttcctgaaacagcttaatgtcttgtaggatccacagccaaacagtacagatgttgcagctgttgcttcacaacaaggtaccctattgctctacatgataaacatttagcactagcacagcaatgggttgcagtgatattatatcactgcgtttgtcttacttttggttgagtggattgtcctaatatagtattatgacataatagccaccaggctttgctatattgttgttggttaacttggacgcacacaacatgcagaagttttattggtttcactgagtttgctcaagtgatgatctattggcagcttcttttcttttgtttacttgattggaatgtcttattttcagctctttttcactaaattaattcaaattacatcaagattttagatctttagattggttctataaattattgtgctttgatagtagttcatatctgtgattgcaagtctgtacccaaaaatcttacaatacactgaaaaataaactctttttgttagcttgatcacttaaaggccgtgttattttctttgcttccagccggcatcgcaaatcaatctgctggagtacaaccttacgagacagttcaagcaccacaagccattaacactggtcctatcgttccacatgcgcagccgcaacttagctggtcccgtactctcattggtgtaggtgttttcctcggagttggggctagtgctgctgtcatcctcaaggtatatctcgtgaattttgcagactatcttaattttagcaagttcttgagaaattaactctatatgcgtgcatgttttgtacagaaattgtttgttcctaggctaaaatcttggatccaaggagcccatgttgaaggggatgaaatttctgggaatgaacttaaatccaagttttatgaagaaatcaaagcagccatacaagattctgcatcagcgttttctgatattgctaaaacaaaccaagagttgcttgcttcaaaggatgaaggtttcataattttccgttgatacattagcatgttttagcagaagaaatgtacaatagctatcactgtttcgggtttgatcgtcttaatgaatctcacttgtttatagataagaagatacttacaaagttggcacaagcatttgattcgcaagcagaggcgtttagatccttgagtgattccttgaatcgtatgagtgagaataggttttaccagtacaatctaatggaggatcattttcaatctgccccatggaatggttagaatcaattcttttttgttgcattggtttctttaaatctgttgctaatattgacgttatctgtctgaatagggccaactacaaattcatggagagcttctcaggtatagcttattgttatttaccccattgtgaactcattattcttatttaccctttctgtcaatacctttttttttaatctttgcatcattccgttgtagttctcattcggtttctctatttacagcaaacaaacgcatacaacacatcaccacgcagtgattttgactccggtaagtagcctccaccagaagcagcacaactttcttgtatcatcacctgagaatatttttttctgccttgcacttattttgtgtgccctctttcgtgttatctttatcagggaggcatccgttcatgccagtaccgggagaaccttcacctggagcatttccggcgagatcctatgttgaggtaggccatcgtatgatcatggattctaggtgcagtagacatgatagtattccaaaacttgatggtgtgtgagtacttatttcagcagcagcggatgcagaggcctgggtacggatttcagcctcagatgagcaatgacaggtggaaccctggctcgccattgacgaactaccacggtgctcctccgtatcagcagtatcaccatggatccaccaacgccatcgatgaagctccagctccagctccagttccagctccagctccaccagctgaaagcccgttccagcgtcgctgggttcccccacagccaccgggcgtcgtcatgccggaggccgtggccgccatacggcagccgaggcagcaagttgcagcggcatcgagaccgtcggaatccgccgcggcgacagagcagccacagtcaggtgacgtcgccggtggcgccgccatggccaatgcgggcaatggcgaggccgagcaagagcgggaagctgctgcttaattactccatttcttttttttttgtttgccacgcgatgcatgcgtctctcgtgtacaaaatacagactagtgacgattacctatgagaaaaagaagaggaacaaatgttgtgtattcattcactgtgggtgtgaatactgactctactgagattatactctgtctgtctctaaatataagggattatactatgtctgtctctagatataaaggattttagtcgaatgtgacatattctttttctgtctagattcgttattcgttattctaggatatgtcacgtttaaccaaaataacttatatttagggagggagggagtaatggccaagaaaaacaagatgctcgcgctgcttgctttcttgcgtaccttgtattttttttacaagaaaaacaacattattttcatgccttgttttacatgtggatctattatatctgggcgttagttatcgacaagtgcagacaatgcacatgggacacagacagagagtggctccaagtttcgtagtctgttgcatttctttgtttcctttcattttctccttggaaaaaaccaggccttgtgatggtgacatggcatctcctcctctcttcttctcttggtactccaaaaaaaaaatgtatggaaaaaaacatgccgagatgcagagacagaagtatatattatgatatttttcaaactcgtggttgttaatttcgttgctccttgtagtacaaaaacaagaaaaattcagacttggtttgacttgtggttggtcttgcgggatgtcgcaagtagggcaacacgtgaactagaaatccatgcatgttcaaagcatgcctgattatggtctcgtccatttcacagtcctactaattcaccggtcaaacctgcaattaacataataacaacatttggctggtgccttagctattcagttattcaaactcgtggctgggaaattccactgcatgcctctgaagctttgacgcactattatacatgcattggaaactgtcagatttcgagcatactgttgtgttgttttcagtctccctccacacgactgaagatcaggcacgcagatgttcagaaatgcagaagcagcttgacctcctctccaattggtaagtgcaaaattttaggtttgtacttattgagttgcacacgtaaggattggttcaactaaaaagcttaaactgatagaggaagacaagcaatttaccaaatactagtgctattagaagatacagttttaagaagaagatgaaagcacacaaatttctgtagtaaaatatcggcgaaacgcagtgcgtaactagctatagatagctcctcttttccatagtggtggcactatggactgattgaagcaggtcaaaagaaatgaaatgaaagggccagacctcaccttaatttgctgtgcatttccactaccaaaatttagagtcagtgatccagctgagtggatgcactagtatctcttcgcaagcagctgtacacgtgtcatacttctatcagatatacggagatgtgtatgtatgggttgatgagatacacacacatgtcgtgtcaagatggagtatgtcccatgtgtatgggtaattgtcatgttaagtagggtaggtcatcccacgaggccgaccggccgaccacgccattcgcctgcgaagaaagaaaatgcctgaatattcaaccacgccacaagtgctgcccacaattttattagcaataactcgttttagtttgtgcgacacatccataggcggcccactaaatctcccatttattcttccccctccttccaagtactgcactgcaatttaattactcacccaacaaaaatactactccctccatcccaaaacatgagagactgcttcacaatatttcaaagcccggaataacctaataattgcattgagtatttgctagaaaaaaatatttttttatcatacattagcattaaatttctactggatggttcgtcgggtggtggttccactactggtcgtaaggccgtaatatctcaaagcaaacaatatatctagttctatcattttacatacaattgattataacttataacacttattaatgtcttaaaaaaatttaaataaaacttttaatatactagaaaaaaaatactcgtgcgttgcaacgggtgaaggctattttaatcttattattgtttactgtgaaattttctgtaagaattcgcttgaatatatatttttcaagaaaataatgtcaagttagcatataagttttttaaagagatttctaatacggtatttttaaaaacgaacaaacttacggatatgtatttccaaaagcgaacaaacttaaaactgacttatacacagatggcgtaccaaagtactggtaaaaacatcttcagtttttataatagtagagattttataaacgacttaaaattcaatgatggaaaataaattataatgagaaaaacaatcaaaacaactctaaaattaagttttaaaacttaaattcggttgtggctgataagccaaagaacaaacgatgaagcataggagataagtatttaacccataaggaaagccagtaacatacgaatgtacgaagaatattataaatttgaccgagtttgaataaaatttatgcaagtgatgaatatgaaataaataaagtacggtacagtgatagagagggcatttcgtcctcacgttttgtttttgttttttcttttcttttctgttgggagtggcattcggaagaagaagagagaagtccatctccctcaaggagcatcggctgctggcgctgcagtccataggagtctcagattcccatctcgtcgtcttatccctccactccgctccacacaatcttcttcttcctcctctcctctgtttatatacaactccttccctcccccattcgcccgcttctgcatcccgaccagacgtcgagtcgagcattaactcagtcagggtggccatggcgctcaaggtcgtctctttccccggggacttggccgcggtctcattcctcgactccaacagaggaggagctttcaaccagctcaaaggttggatcttttcctctttcttatccccttccggatcaactttactgctctttcttgtttcttggccctcgacttgcttctgttttcctctcatcttgtttagacttcatttcgtctgtttagcctgtttcaagataatccgcagtgtgttcaaagagcacccattcctggtgccgattaaattaggcacttctactcactcgacacagccggcacccatgctgtgagtgggattaggaaagctgctgcttttgcaaggatttatgccacaattttggtttggattgcttgggctaaaataaaattggtcttcgttctcacagtgcatgggaatggcagcttctgagttctggagaacatagacacacagtcattgtaaagttgcaaactctgtgccttaactgttttgattttgacatctgaaaaggtggaatttccccggttcgcagaaaaaaaaggggtctgaattcatttctttgagattaaaaacgggttcagatttttctcttatacgggtataagacacaattcttccagaatttatgcaacttcctcttggtcgagaattatgctgttgtcagtattacgtgtctagaatcgaacccctttttgtaatcaactgggtggattaaattctgaaatatctgagcattatcttcatgcttgcaacttctatctttggaatatctagtgttctgagaatatattctgcatagattccaattcagtttctactttctagtgatatggttctattcagatgagttgcactactgtaacgtgcttttactctaaattgcttggtgcacatgaaacacgcagtctgccaaattgtcaagatcggcctcaattagctcaggcctcaggactattttttttttctgccatgtttcttgagcatattgcagcaaacgagttagcagagagttgtaggcacgtatatatgcctgaacattgattactagtactattttcattcatatatcttaatttggctgtctttattgcagtggacctcccgtttcaaacgagggacagaagagcagtttccctgagaaggacttgctgttcaatgcaacaggctccaccaccagcatggcctggtcgagccgttgttgaacctgggaggaggtcatgggatggccccaagcctatctcaattgttggctcaaccggttctattggcacacaggtaaatggaacatcaagatctaagattaacggatggaaattaatactccataccttttttatatctgtcagttgtgctagtacatcaatgtttggtcaattagttcatctaagagtaaatgtttgacctatttatctgatgatacgagttgaccctttcaagatcaatcaacatgtcttgagctattcattgaaattagttggacatgaaaatgcgacgtttatattctgtggtactaatagtgttttatcttttcttttctttgcataactaaaaagacattggacatagttgcggagaatccagataaattccgggttgttgctcttgctgctggctccaatgtgactcttctagctgatcaggtataatgattttgtgaggaaaatatcccttctttcgacctttcatggtaggattatggacatgaaagttaactgaatataggttgtttaactaagcaggtgaaaacattcaaaccaaagcttgttgctgtaagaaatgagtcattagttgatgagctaaaggaagccttagctgattgtgattggaagccagaaattattcctggtgagcaaggtgtcatagaggtgagtttttcatgtcatatttatgtttaaatagctgatgctttgctgtgaattttataaagattcaactctcatataataggttgctcgccacccagatgcagttacagttgttactgggatagtagggtgtgcaggactgaaggtaatctttctttttatattgcatattctttgctctgcttcctttaatattaggtgttaatattacaaaaactcaattatttctttgatgtttcaacaagtatattcaagaatttattgagaaagaaatgaaaatatatgtgcttgaaaattatattcccagtgttatattaccataacaacaggccattttaaacatatagtactgaaacacttggaatacatacgttattatggttacatgaatgtacttgcaatttttcaaggcgagtatgtttgaattggaagagctcatgccaaaacagtccttttgtagagttgctgattatctactcaaaagtgtctagcaatttgagattttttttaatagagttctgatgcaccaaaaaataaagtttgatatgcaacaactaaaacggtagtggtacatatatcctattcttatcttgtagaacattcgtgcatggaccgttttgtatatcaggtcacccatcataccttgatgatgctacttttagactactcaatatcttgatcttctttttggtacttatttcttaaaagtttgatttatctagacgaatgagttgtgtagccaaacgaaagaattgaatgcttgctgaagttctgtatgcatgcaaactacattaccagaatctggcaccacttgctgatttgcctacttaaatttctttgctctgccagcctacagttgctgcaattgaagctgggaaagatatagcattggcgaacaaagagacacttattgcaggtggtccttttgtgcttccccttgcacaaaagcacaaagtgaaaatacttcctgctgattctgagcactctgctatatttcaggtaccacagaaaataaattacctgtaactaattttacttggttcatctgatataagtttggtgtaaggttgtgatagtctggtacgtactcaacgttgcctgttcaaaaacctcttatacactagtggctttatctttaacacttaaacaaagtagcagtaagatgtatgttgcttgttatagtttactgttgttctattatatgctgatttgcagtttccctctactatcatagtgtatacaaggcttgcccgaaggagcacttcgccgcattattttgactgcatcaggtggtgctttcaggtaaatctactgacatacatgttatatatgtttttctactggacattggactccatcttatatccattgatgatgtcagggactggccagttgacaagttgaaagaagtaaaagttgctgatgctttaaagcacccgaactggaatatggggaagaagattactgtagattctgctacattattcaacaaggtgtttgcagtaaactttcagaattttactgaggtcatgttggcagtatttgcactaaaatgatcacttgattcatacagggtttagaagttattgaagcacattatttatttggtgctgaatacgatgacattgaaattgtgatccacccacaatctatcatacactctatgattgaaacccaggtgagtcctacagcacagctatggaaaatgtttagcggttatgctcaactgcagtggattttaaactgttaatgcatgcacacttaatcctgatatggcaaccgtattttcatgtttacgtttggcttaatattttttttcaagtattcatgaagttctgtttctccaggattcatctgtgttggctcaactgggatggccagatatgcggataccaatcttatacaccatgtcttggccagacagaatctattgctcagaggtcacctggccccgactagatctttgcaagtacaggctcttcccttaaatgctgtgctacttttgcattaccactgataattttgttcgagaatgacctcaaagaattttagctttcttattgttatcgcatggttctctcatagcccactcagattatcagtaagcttgagcagccatcctataacagttaatatgtggatctactctacttaaattcaatgaagctcgtatcgaaccttcatacaaagttcaatggatcgattaagtcccttttggctggttggttaccagtgatacgcaagtagttaacgcttgtaatgaattatgctttggttgttaggcatgaacgctgcttcatgttactagctatattttgggacgaagggagtagtaataaatttaaagaataaaaggttaataaagtaaaagaactagatgcaacaaaaaattgttaagttatagtacttaaccgtgaagaccttttttcattgcacgaagggttaatttttaatttgataatgcaggctgggttcactgacattcaaagctcctgacaatgtgaaatacccgtcgatggatctcgcctatgcagctggaagagctgggggcaccatgacaggagttctgagtgctgctaatgagaaggctgtggagttgttcatcgatgaaaagtatgacactcatcatcatcccttttcctctttccattgcatagtggattccatcgtctgattttgtttacgcacctattctctgcaattttaaaggagaattatgtcctgctgattgcagcaatgcagcaaaacgaataactggtatctaccaaagtccatagatatctcttgccctttggaaagtgagagctgaaaggagagagcatacatgtcgtcaaagctaatattctccggcactttctgagccttaagatatatcatggattataataaaccgacaacatcttgattgatgctagtaggcctgtttatatattgtaacttgctagcttagctgggggctacctattgttgtgaatgccatgctgtagccatgagaagttgaaaagagaacacatgtccttaaagcttaaatattctcagacactttctgagccttaatatctatcatggatcgtaaaaaaccagcaacgtctcaatttatgctagtagtaaaaggcctgattaaaccttggagcttagctggggtacctgttcttgcactgtagccatcagaaggtaaggtacctgttcttgcactgtcagaaggtaaggtacctgttcttgcactgtagccatcagaaggtaagtaccaaaatggtatccattggtgcaaaataaaaggtttgtttttgtcgaagggcgaattgttttctaaatggtgaatggctgacaaaacttcattgcaagttatttaaactggtgaattaatgtttccgcggctatttctttgcaagtagacattttcccgtcagataaactttacatatatataagcaaatgaatagatgattgtggttatgtttttgcaggatcgggtacctggacatcttcaaggtggtggagctgacatgcgacgctcatcggaatgagctagtaacaaggccatcactggaggagatcatacattatgatctgtgggcgagggagtatgctgccagcctacagccatccactggcctcagccctgtacctgtctagtacttgtagcaatacaaaattacagtagcattgtacactactgccgtgccagctccatgcatagtcagcagctggccactctctagctatatctagatgcgagagaattttaaggatgtaaatcatgccttcacatgaataaatcgttcgtccgtgcgttgtgtattcatgtaaattttgacggatggtcaagtaaaaataacaatggcaaattaatttagggaagaatcaaatatgtttgcgttccttttctgagccgtggatgttgttaatcagttctaccaatcgctatttgtaaaaagtttcttaaagaaatttccttcttgacatcaatcaaagtactatatataaatcttcaggataaggcacgtcgccgaccaaacagcatgcaaaccgccagaatctgatactccattcctaaccaacactggacaatttaaattattagtcgaaaggataaaccggccgacgacattcacaggctcgattccatgtcctggaaagctcagaaaagcaatcaaaagcaagcactggacttaaaatggtaccacagcttaaggcaaaatagagagagaaccgctgaatacaataatagcaagttgatatgtgacccacagaacattaatatgaaggatcttatgccatacagtaccctctctacaaatcatccaaacacaatccctgtatgggacaagtacgcacgataaacgtccagcgatagatgtaaggcatcaaaagaagctaacgatggagctgttcggcagatgatacggcttgtgtttgtagcgcagccgtggcaacaaacaagcgcagacagcaggtggtgtctagtgcccatatttctgaaattcccattcactgttatctgcaagatggaacaagagctattgatcagcacacaccaacatacttaactccaagaggaaatcatacacaggaactgcaactacctaacgggcacacttggcgagtcttgagccacctgctgatgcaatggaagtgaaaagcatgattacagacacctggtgtacacgaaagcaaatcatgttagatccagtaaagcttaagactcaacaattcaaccaagcaaatatcatatacaggaaaaccaagaataaatcagggatgaaatcaagcaccatcagaaaaggtaaagaatacatcagctatgcataaattctttgaatgttttttttaaaaaattaatccacatatacatttcttgcagtgatatttggttcatggctaacagagtatgtttggataatttacagagttttattattcaattatgaaggcagattataatatcaagggcctaggtctagagagtcattacatacttgttacttgtagtatatgcctggggaatttactccaaacaaatatcaatgattaacgaaacctagaaactggtattgttatcaaacattgaacattagaatttagcctgtcacagggtcatatctagattgccctgccagtaccagaacatacatcaaactgactccccttaagtaccatagaactacaagtctacgacgacatcaaccacacgaccaggtgtagcttcaacaatagctaatctcaaaattcttatgtctaataaagatctaaatccaaatacacatccaaatatgtctcaatgttaattgttaattcctttgttatagacaaaatatatgaaggaagctagaattccatggactcatggctgctccatcccaccattagacattagttcaagtctacaaccacacttgctttttcagttcaataaggaaccatcagcactgcaaactataaaactgggtgaacttctattacgaatactgtagtatgattagatatgagctgaggatggtcatttgacgaggaacatggaaaagacttaaatataatttcagaaacatgacttgactctatgagtaataagaataaagatgtgagcatggtagtggagttaatgcaacaaagctcaggaatatgcattgggtgaagaacgcttgggtgtcctccaatcttacctgatgatgtgttaaaatatggtttggaaccatatgcgcgtatccatgtaaaagaatacacaacttcttttcaaaatctcaactacactcttgttaacaaaaaccactacatcgcatgtagttagatttggtttcattttttttagcacataaacattttccttagcacatacacatgtatctttacactacattataagtcaatcactctctccaatttgaaaaaaatacgctacctggtatcctaaagttgaaaacacaacgattacatcattacactgagccatatccatcaagaacagaggcacagaacatgtgtagttcaaattggttagagactactggcctagtggactgacagttgatcaaccagaataacacattaacaggcatcagtcaatagctatatatatatgaatgggataattaagacattggtcatggcaaatggcggagtgatatatacatgaagatttgcttcctgaatggtgagccagtctagagaaaagtttagcatgcggcaattgaaacaaggtgtgattggttggtaaaagtggatggaagcgtaccccaagcgacagtgcactcctcactggtggcgctggcctggttcgcctggcactcgatgcctgcagccaaggaagcagattagtattcaaatcgcccttaataataagtaacagaaagaaggggaaataaaaagaacaagagaagagaagggagggcggactgacatagatccatgatgtggttgcggcagatggcgcagttgtcgacgacgatatctgaggaggaggaacaaggatcaaatcagaactcagaagattgttaagattattagggttaggggggagtagagaaggaaggatgcgcgtagggtaccccatgcccagagcgcgacggcgttccacttcttgatctcgaagcgcttgttgggcttgcgggaggaggggccggcggcagaggaggatccctcgccggcgccggcgggggcgggggcggggggcggcggcgcgttgatgtcggtctccatggccgacatcgtgagctctcgatcgacccggattcaggaattccaccagaccaggttgggattggaagatgagattttttttctttttttctttttatccctcagatcagatcagatatggactccacaaagcaggccatggcccatcatcatgcatccactgggccgtgccttctctttcaccctttcctccttttcttttccagttctttatttcggaaacaataacttcttatctattagtaatatataaatacgccctgaagtattttggggttgctcatattgtagccaaaataaattttactaaatttttgtattgtcaaaattttggtaagttgacaatattgccaagttttagcagaattacatacatctttaacaattttagccgaaaatgatatggtttgaaatgacataaatctaaacaacccctttatttccgttcgcgagtctatcaaccttttggtcatccctgctaacgtcgtcgcaccctattatatactcctatgtaattatatacaacatgcgatcgagtattgtaaccggttataccaacaaagttttctttaaaaaaattgttcatgtattgttcagttacgagttactaggacatcatatgtacatgcatattttagacgattgcagttctggcaccatgaaaatcgacaaaaaaaaaaaatcaaagcaccaccatacaatctgctctcaggagtcaggagacacatcaatgcagataacgactcattaacgcaaaactctgcctgttgggcaaaaatcgatcgatacataaggcgctgcgctgctcaaataatgatacaggaaaagctctttctacgataatgtacacgctcacgcaccaacagatggccaaaaaaaaaaaactatgtttttcgtttgtgtgtcagctctacattgcatcgtaacagggggttgaggaaacactcaacactgtacaccgcaccttgtttgtgcctgggcaaacgccaagaaaatcttctcatcgtgttcaactgcgaaaggcatcagctgtttgatgtatgtagacatgccctttgaatctttcaacaaccaaatgccactgtcttgtcattaactctactgctgtttgagtgagggcatcaattaaagaacccatcccatcccatacagtatgaatgtatgtgtgggagagcaccctgagggcatcaactaaaagcttcatgggcacatttttgccttggctcagattccatctttttgttcatagtggcatagtgcttactgcttacaaccatgctccccaccctggaaacatttggcacaaccggtccgcatctactgcatcctgtatcagttgttgcacctgaaacccaaacataaaggaatgtgtagttttgcatcaacaaatacaaacatcataaacatatatttcctctttgcaagcacacgcatcaccaagggtcaaagagtgcttggttacctggccctgtacacttctcatttcaccatcttcatatccatctagtttctgcttaacacggaggatagctcgggctgcatccttgttgccctcgcaagcctcttgcgagtcatccaagcacgagtcaatgtcttcactttcctgcaaaaatataggttagcatattcatttgctacataacttacgactgcatacttgtcttccacatagcggtgctaaaagtttacttgtgaatttacttgttatgcttgtaaaattgacagaccatttactcccgtgttttatacgtactaaaaaggctttaaagatacatttataataaacttttacatattttgatacaattatatataatccaacatattatctacattccatcattaactgcaggctgtcaacctgctgcatagaacctttatgggcataggtgtgtgtttctttaacactacctttgcctttgccattttttattttaaacccttttcaccatggcactgtagctgatgcagtaagacaaagcaaccttgccatagcatcatgacacaaataggggctcgctcctatggcattgccaaagggcttagttttgggaataacattccagcaagtttgtttgaatactaaatattggctggtactagtcataatgctgacagtccaaacagaatgtatgcccagtagatgctggttgtatgaaccctgcactggagtgcagtgaacaacattcagcactaatgggtaattccaacaactttcaatgtacattgaaaagagaaacaagatgaatcttagaacacagtagtgcacaccatgaggaaaattaatatattttcaattaccttttgacgctgtaaagccttcagtggtgaaagagcccatttatacaacggatcatggacgaagacctggcatattacatatgttaccaggggaaattgaaatattgatttttccagatacataaaaagccttttgataacaaacatacttcaataatagtgaccaacgcttctttatttgccctcatgaccgaaagagttttctcacaacaccttctaaatacaccttcaacgccagtaactcccatgccatctatcatgtccctcgtcaggcgaaatggaacctgcaagtagaggtataaaacttaattcaggctattacaaaagaaaaaaaatggaaaatacgtacgtacatataaagaaaatgacaatataaaacatccattttacgttaaaaaaaaactcacacacaccagagtttcacaaacgtaaacagcaagatgacaattttaggaatacaaatatgatgcttcatcacatacccgttcaggagttttaagcatgagaccctgttcaaatgcaacaccaagatctatgtgtacaacctcagctgtctcttgatcaatgagaatattctgggaatgacgatctccaagtcccacaatatatcctacctgaaccgacaaaattgacagccagtgcttatcattctccagtaaccagtacagatccagacaaatgatttcatatactgctcattaactacaaagattaccattgagcttgctgccacacttcttgtgtaagcaagtctactttggaaccaatctgcaggctgcaagaatctctcaaggaagaagtggtgcatcacaggcctggtattacaggacaaagaaatgtatgtgaatgccatgttttcatgtgtccccatattgtcctagtagcaaatgaatataagagataacagaagacctgaagttgttgcagactttgacaaacgccctcctcttgtctttttcctattaaaaaaaagaaatgcttttagattggagtattggacatatgttgtcatggtataaatagcaaatattttttaaaaaagttccacaagtaaacatacatttgtcatggtctccctgcattgatgatatgtccagtctccagttccatatcttccatgtgctccaccacttcttgtactgtatggaccaaaggggaaaaaaactacataaatataaagcatttgtaatgtatattgcataaaatagcaggaaccgtgcacgcagaataccttcccacaagatattcagcaagaggaacagtcccgtttacccattcaacaacaccagcacttggggtgaagggaacaacctaagttacataaactagttaaaattttgtgtaaactacaaagaaggtataatgaaaaactaagatggacatgaagatatctaagaacaataatgaaaagaaaaggagcgaatctcttgattaaattcaaattcatgaattttgtttctaccttatatgtgcgaattctcaatctcctctcagatgtatctctgtgattttgcaagaacatatttactagactgaaaaattgttccatcacctgtaaatgtactcaatatagcacaactcattcatccacaagataggccattgctgaaaaaaatttctccacgcaattcatttcaattgaccttagcagacagtgaccaaaaaatactgacagaactacaatggtagctggttgctatgtttacttcctgttgctaactcatcagtttggtgatagtctaaaaatgtgagataataacactgtaaagcactatgacaagagataaaagtatactgcaggcattattccaaaccatgtctcctttgtcccactaaacagaattgcttacggtaggtaacagatagtgttctacgatatggtcaaatgccagtagcccaactgttttagtcatactttgcactagctgttactagcaattgggtacacactagttgctatgcaaatacatgtactaatcatttccctgaaatacatatgtagtcttgctaatgaagacaaacatctagggcacttatgtggatcacaaattaacacacagatagacatcccatgatgcaagtttaaatgagcagattcatagtacataggctaggagaaaaagataaaataagaaagctagaactttgttggtacttgaaagctctcaaacaatacatggtaaatgcattcttgtaaaactttctcatgcttaaaatgtaggaataagaacatacagcatcttgtcgcaggtcatcatttccagattttgcgagttggcgatatttgttaccatcagagccaatacattcaataaccttcggagcattaattccattcattaccctaccacaatggaagagtcccaacagttaataaagatcaaaaggtaaatcttcagtcacaagtaatgggtaaattgcagaccaacttacataatagaatctgctagcccattaaaatgtggaaaggaaccttcttcatactgacaattaggatcgactggaatactagcagttacaacaggaacctaccaaaaccaaatagaaatggttcaaaaaaaaatgcagagaagtgaaatttctatggataatttgaaatggaccgccagtgctatcaataaactaaaagaatatggaatgaaggcaataatagaaaacaaaagctatcaaaattgctgtgacacaacgcatccgctagaatgttaggttttttaagtacataaaactatcttcttagtttcttcaaccaaagaataaaaaagtttataaacgaacagaacgaagcaattttgttccacctataagtttttaattcagagatttgagaggttctaccaagcactactagcatgtgatagcacaaaccagttatcccccatagaagtacaagaaaaagttcatagaagtaaaatttcccttacaagttcaagctgacaaatgctgcggatctccctaggtagtggaattcttttgttcgtgtcctgataataagatggacggcatcaatattttaacatggataatatggacaaaaatctagcacaagttgcttttgaaaagataactacctccttcttggtctctagttcagccaacttaatgtagatctcaaccatttgcttcatctacaagatgtgcaaatgaacataataaagagtacactttaacaataaatgcattttgacttccatctgagatgactgaataagaatatatagatatttgaaaagagtagcaaacctgacgaatcaaagctccatgagaagaagataaatcctttaacagattttcagcagcaagtttcttgtccatgtctacaataaaagaacttctactcctttgcttgtctttgacgcggtcaccatttgctagagccaaaagctgagtaccaaacaacatgcttaaaatggcaaaagagatgactcttaattctagagaatgattaaaatgcactgcagctgccttcaaatacataaagtacacgtaaatgagctaattgcagagtcatgtaagtgaacaaactgagaatgtgtgccattttaagcacatatgtaagtgcactaaaatatatttcattttcaagtttagaacttatgaattatatttttagatcagttgtaatgcaaaggtatttttattgccattaaaaaaacttagaaggaataagggtagagtcaagtatagatgtaataacactaaaaatgtattttattttcaagtttgacacgtttgactctaatcttattccaagtatttttttaataacaataaaaatacctgtgcattatagcagatctaaaaacataaatcataagtaataaacttgaaaacaaaatatattttttgaggaaaaacatatataattcacaatcaatccacaaaaagccaaaccaaatgcataaaagatatatataaccagctttagaagatccgcaactctggaggtggtgggatggcagattcaccatcaccaccatgtggttcttatatatagtagagatttgacaatgtttaagtgtattggatcctttcctcagtagaacttacccacagtcgtagttagacactggaacctctgtaatgagcctctaggtgtctagaatgatttcttactctcacccctcaaaaacgatgacctggctacaggtgatttgaaatgattcaaaggccccatcccagagctcatgtttggcagactatattagtatattttgccttagtgttagcggttacattactgaaatgtcatattgttttaggcattcagcaggctagttaatcctatctgacatatcatttagttcctttcgacatatataaagatcagcaactacaatacctgaaatattgtatgataaggatgatcaatggccattttcttcagaagagaagctagcgcattctgcaagaaaaaaaaaagatggcgttataagattcatgtttacccaatgcaaacaaatctctgaaagagtaagacatgtatacctggaagtttgttgagccctgcgcatcttttgagctaccaagtctagaagcaatttgatagaccaatggtatgaatttgtaggactggacctatacaataagaacatttccatgaagctgataaaagcaccaagagagtaataagtgaaatttgaagatttacctcttttgttgttttcatcattgctttcacaacttgctctcttgagaaaagactaaaccatagtgagaccaaccggaaaacctgaacgtatgtttagcactgctataaataacagtgtccctataccccgagatatacaaagagcacagcgtacaaaagaaactaaacaattttattgctgcaagcacattgtgactgaaacaggaagaactcttaacaagaaacgataacagcaatgacatataaaggacaatgggtgctttacaattatttgcaggagatgaatgcttcgcattaaatgttaaaagaataccagagcaactatgaagcatattgtgactaacacaagaaacaatactatatccgaaaatggatgattgcaacttgcaatgataagcaggaggtgaatacttcacaccatatgaaaacatttttatagtgacaacacaagcatattgtgactgaaataatatgaaacaataacaagcaggagatttcatatatgaacaggattacatattacacgacattaactggcacctgccgattcaaagattataagatcttgaaatggaaatggcataccacttgtagatcatatttcccaccgacaacgagtgagcgttggtacccctgaagcgctagattcaagaatttgtcccgatcatcctaataagagagttcagtgaatgtttaaaatagtaggtatacaatgcagagcagtaaacatgcaccatcgtatttcaaagctagaatattgtggtggcctgttctcctaaaaaatattatgtggtgtcactccatttgatattgagagttcaaatttcaagttaaatcaacatcctaatatataaatgagtttggatttgctgctcctattggcaattccaggtataaatattacaccattttaccaaaaatttcaaaaatcacttattcattttttttcaattttttgaataaatatagaaattaaagaaatgtagatgtataaatgcggaagagaggcaaaattttcagtacataaaattttgagtgtcaactttactccttaacctgtccggttttgtactggaatgcaagcattacactctcatttttctaaatcaaattattcacgcttgtccaaggatgtggctcttgtaattctatgcacatgcataatttcaaggtccaacttgtcgatattaaatactgtagatgacaaaaaaaaagggagtagtacaagacaatagcacatgatgcaggttctggataactgaaaagagtagtacaggagaatgatgcatgatagtggcaataatgtttgttaccttgctgcttttttgaattttagcgctaaatttggcatgtgtgcactgtgaaggcataaaatatcatccaggtgtttttgttagaaatttttttagaacaccgcatcatgcacacatagaaaaatgaacagtgtggttgctgtggccagaagcacaatatttgtggatatatggttattgatctggttagtactattgatatagtgcgtgatgaatttgtgatagcagcaaatgctatatttaagttggagtcaggacctcgatgttggataggtctgtgaccagataggcgtattgaaaatttgactgaatgcatcatgagaggcatattttatatactttaaactacacatgcacacctgaatcttccctgcctcttcttcgtcaagtgcaagttgtttctgtaactcttggattttcactgagtaatcagtcttttcactctgaaaattttaaggattagtatgcagtagccaacagtgcccatgctccttgacattttcagacaccatgaaaaaatgcagtgcttacctttgatgaacttttaagtcttttcatcagtgtatccagctccttagactgcattaaatagaaaatgtattgagatatacagtttcaagttcgatatcgatatgatgccactgtcaaacttagttccttaccttgtattttcttaatcgcagagctgcttgccattcgttggatgaaagtctttcctcatagcttttgaataagccatctgtgtaatgcgctagatggaaatatgttcggcactgcctagacttgtactttttgtctgggcacttgtgcaattcagtaaaatctacggaatgccttaggtagtcatcaatgatagttcttgaactacaatatatatatacatatatcacaaacagaaaatagagaacagttctcaatacatgaaacaagtgcaaagcacaaagtagaaataaatggttacttgctcgatcttgtttcagccaaccacttgccgactaatcgatagacatctgatacattcttcttatcaggatggttctttagaatgtatttcccaagatttatagccatatcatgctgcccttgagctctcagcagtttagcttcttcaagctggagtgtaaaggcaggacatgaacttcatggatcacagataattcacaacatataagcaatatatataaaccaatatgtgtaatattatcaacaaaggcagcttactttaggttttatttttccaaaccactataatattattatataggaaccaccaatcgaaaccagtgaaccagtgggcttgctggttcgagcgattcccagtttcaaagctatgataacaattctatgggcaactttagtcctatttgttttacatggattttataggaaacagggcaaattctctagaactatagagctcttttgtccccaacgggacactaatattaaaagatgacttatcaacaaatattaaaaagacaaggccgattaagaactaaatgtgtactggaaaggctacatggactgatcatttaaaaccagtactactagtacttaatttgttgggtacgaatgtatgatatgagaacagagggtaggaacctcatgtaaccatctgcgtcactattacatggttagaggctctgaggctagatcaaagaagaggagagtctaggaactttaagaacaaatgatgataatgaagtactgaagtactaatatataatagccaaacacctgaaccaatctatctgtttattaatatttgaataacacagctaacagacaaattagactaactatgctgacttaatgcaattaactgatatggtagccaacatatgcaacaagtttatcctgccttgctaaaagcagaaaggcaagtgctgctctgccagctgatggtgtgtgtagagctttgctatgtggctgatgctcacatgcccaaagccagcaacaaaggagaaaagtaggaggttaaatggcagctctcagaaatgctcttcgccactttttacaatgaaatttctcaaagtgctcatggattgaaataacaaattcaagtagctatacctttctacttacctttgggattatgttgaaaagaatagaaacatatgtttcagtagggagtacataaggtgattttttttaccttaaataggaaataagaatttggcatagcttgatgatccatgtggtaacgaagttctttgagttcatataaagcagctgcagccaaagaaaatcttgctccctgaatccagaaaaggaaccacagaattattatgagaaagagcatgaaactgtgactgcagttaaaagcagcaagacaaccttccggagtgctgaagcagattgaaataaatgttctctgagatgctcttcagaacctaagatcttaaggacggcactgcggaatgctagaaaaggttccaaaaggtcaaggttacgttctgtttgacacaggatgaaagtccactctttattcagcagttccaactacaaccaaaatatgtaggaaacgattagttcacaaggaaaattcaaatagttaaacaaggaatgttaaagagtaaagacagtggtaaaccacatatacatatgtgcattctcttcagagataaaagacttaaagttgttttctcggccaaacaaactcaagcagcttagtatggggaatgaaaaagaacatgtacatgtagctattctactatcttaggcatccaaagtgatttacaatcagtgggaggatacaaaagtcaatataagacagtgactggtctgtatcaacctcgatgcacatttgacagtgttacatgtatgtgaaggaaaccaattgtctattttgaacagaagatcatgtcagaactatctccataagaacagacaatgcatgctaaagtgttacatgtataatgctgtgaaacagtgggggtatttcttgcacatggcaacctttttcgcgaacgcttgcacatggcaacctaaaaaggttacataaatagatatagacacaacaacagttcccaaacttacatctgaaatctgaatgtaaattgagtcgcatttatttcaaacaaaataatgagagaactagccaaaatattatatatgactacaacagatgtgaaacaaacctgcatccttgtaggaacagttggaactggagaaaaatccttgtttccaacataagactttgatgtctgattgagacagaatttccatcgtaggtcccaagccatagtaagatgatctaacatctataaaataacaaaagagagtaacaatgtacctcataccaagtatcacaacaagtatatcattgtaagataacaagccagtacctgtagtttgataacagtagaatggatgtattttgtgctctccttgctagcatttgaaagagccagcacaagatcctaaaaggggataaaataataagtattagaagctagattcacaataaatccaacagagggaagtgaaccacagatgaaattaaataccatcttggagttagaaagcttcacatggaactcctcggaatcaccattctgcagagctcttaagcaactaaagcatggagaaataagttgtatatgagaagttaggtaacaggtttctattggtccgaagttagaactatttttcaacaaacccttgtttcatttatttcaaggatccagtaagccgaattaagaaagtacatgtattaactttgtaatccaacaatcaacaaagtgcaatgcacaccttctaatatattctagatagaatggcataaatagcacaattatattatgtacggatctgataatatgcatctaatatggtaaaaaatgcctaggtccaggtcgtacctatcttgcttagtcagttcatgccactgagtccttaaaattcaatcgaaggtaacaggttctacaatactataaattattaaccatgccttttgtttctcaacagtcaacacaatactaaagataataagctattctttcagctataaatatgcaaaagcattgagatgtgtaacttaagagtaaggaaaattagggacctgtgcaaatttccattgaaaaggcagtaactttgggaatgggtagaaggctgagaagagtatggaatgaaaaaggagaaatcccaatttccagctctccaagcagcttcatactgcatgacaggcaataaaaattaggccatactactggaaaaaatgttgcaggatgtaaggttatatgaaatatgtactaacttgcatatcaataaattctgaatcttgttgaagacaacttttttggttgcttaaaccttggcagtagacatcaaggacatgactacatccagtcttctgcaaagatctcatcagacctttgtgcatttgccagttcagcatcttctcttcagctttagaaggcacatcagatggtccagtcaatgctgtcccagccaaactgccatggttctcctttcgagttgatcttacaagtaaatcgtgatattcaagagcactactccaatcaccctcatgctcatatctaatgatttgtgaagttatctgctcaaagagaataataacgacaaacaagaggaaaacataactttaagatcttaacacttaaataatgggtctacacatgtatatctgatagccctaacttataagttcatacagaaatgtaccatgaccaatgaccactttaagaataacttggagttcatatagaaagtatgaacctaagcctaccaaaactcaacaaaaaatagtgagaatttttttatgagaaacctcattcgccagtgtgatcccataaatgctgtccagctcatttatgcgagtaaatgaagcaaccagtagatcaatatgtgggggcaactgtaaaaaggcaagaaacataaatgggcatgtggcaaaactacggtagagctaaaatcacacacaagaaagtaatagttgaagaaaggataagagacagaccgactcttcgtgcgaaaaatctggaggtcctaatgctagcatattgaatttttcctcacaccaaagctcaacatacattagtgttgcaaagtcacatgagcacctctgcaatgatccagaagttcaaaattaatacaaacaaaggaaacaggagaattgaggtacaaggcatttcaatcaccagtggcacatgtgtaaaaagtgcaagctcaagcatgaagcacaacaagcatttgcatggcctatagatgtcttcatggcccattgctagtccaaataaattctcgagaaaaaaaaactagtccaaataattattttgctacgtacaacgaagagtagtagggtaggaataggattgggtacaatggggtttcaggtgaaagagacgaccccttgctagctttaaggagcttgcagaacccatgcaaaacagcacaagtgttgtatcaatccagccattgatttttttaacaggaaccaaaccatgaactggaactagaatcagattacaaccctaagagttatgtggtagatgtatctttgtctgggctaagaaggccattaggattatagtgtcaaatgcaatacatgtatctctgttgagtgttgacaaggccaagtggaaaatctagcctaaggttggcctatgatgtcttgtgtatcatataatttacccatgaacaacatgtccagttttgaatggcctctaaacttaatatcaagttccagaaaatattttgaatgtaaagtcgagtctggtataatacagtacaaaggaactaaacagcataatgatgtagctgtgggcagggtagcacacttacattagcagctctggcagccacaagataatcaactgaaagccagtacacctgtcgaataaacgatgtgttaagattctggacatcagctgcaaaattttccctagcttacaacctccaatcacatgtgccagctgaaccacagaaaaatagcaggtccattgaagcataggtaaaagcaaaagctctttcatttgcaaatagccaatcaatccttacaatagcacaagaatctaccttatgcatacaataatccatctagaaagcctgacataacagcaaaaaagctaaatgctggaatcatttgctaacagtaacatcaattgaattcaagttttccaaggagtgtacaggactatagtcatttgtacttggtaatcacaatttttttccgaaagaaattagactgacaatgccacactcttatgcactgctatactatgacaataaaaacagaagaaacgtactagcaaatgttactccaggatgtgtgtgtgtgtgtgcgtgagagagagagagagagagtagaataaaataccttcttccaggaggatgatggggtggtggttggtgatcgacttttggatctaacagatctaccatcctacaaggttcaatacgtagttcaaaagacaaataaacagaaacaagtatatcaagtgctcaatattaatgatgaaaaatattactccccctgtcccaaaatataacaacttctagcattcaaaaattgtcccaaaatataacaacttctcacctacattcttttctcaaccaatcacaaccttccacaattcaaattctccacctacttttcttctcagccaatcatactttcttaatacccgtgtctaagcctaaaactccttattttgggacggaggtagtaatagagtaacaatgacattacaaataacatctgtgtattgattatgatatgataacatatatttctttcctgacacaattataaattaacagtaacagaataccttgagagtatttgaagggcaacctctggctttttctgcaacataataagacctgacaacattcagcgcatccaaaaacagataaactgacttcatcaaatgattggagtcacaaaatattttttcctccacctaaagtaaaacataagtcatcaacagattggcaataatccaaccgtgcaaccttcaagtaatcaaataacttgggatgcaacaaaccatagatgaaattaatctgcagatgccagcatttgaatccaaattgcccgcaatgttcacaagagcacttgcaagcaaaagttcagcaacctcaactttgagaaaagcaatactcctacaaagtctataagaagaacatcatttcaaacagcaacaatacagtcacattgaagaagatgtgttaagctttagttactgttacaggtgtatttctcagttgaaactggtacctcaagatgatgtcatcacaatgacaaattagtgagcccaccaaggtgcatagccattgcttgtaagtccgaccatcagttctccataaatctgaatcttcaagtgaaactatcgagccaaagtttggcaggaaaaaagagagaataataaatgtcataccatagggagcataataaacaagcactgcaccatggagaagcttgttcaatagtgttctacattatggatgctttcctaattaaacaagacattacatcaatgtttttttataaaaaaaaaaacggatgcagtgcaacacccttttattctcttgttttaccagaagaaataattcacaaattatgtgcatgtggacagaacggggatcatgagattgacccatagatttatgaatgagtgattgttttttatgaatgtgcaatgtggtagatctttacaacattgatttagagcagtgtgctggcaactattggcatagacgtgcttgagatcataaactatgactcaccaccagaaaccttttccatgcccaaaagtgtttgttcaactacctgagcatttatgcctcgtgaatgaacctatgcagtaaaggtagttaggaaattgaacttagtaataagcaaaacaaaatgacaagacaacatagtaccacataccatcagcaaagacctatcaagagaatcaaggcaatgcagagcattcagaccccttgccgttgacagaactccctgttcatgaaaaaacaagaaaaagttttgcagcacccgtaataaaatagcttccagctaccgcattcaaaatcattcatctgcgatttcgatctcaaaatcacaattgttgtttcaacaacacaattacacaaatactgtattgtattgcatctgcataaggagtcaaaacaaatatagtgggaacatttttgtgaatatttaacaaattgggtactattaagtattttaatcgagagatgtctaaagaaatcaaacttgatttgatcaaaacaagagggtctaagtctaggatcagcagatggaaaatcgcatatacagcaattggtccacttgatttctcttctttttttacaactcagcctctttgcaactaaaataataggataacctgtgcacgaccacatactaagaaattcagtaaatgaaatgcatcttggaagtaatacttgaggctccaaatttattacagtatgggcttggctgaccccgtagaaagtttaatcagtgcattctatttgtgggtatgccactatccagtgtggttttggtacagaaaattcatgatagcaacaagaaaaaagagaacagtgcttacaaatttcaaggggataagtccagtcagataaaaaaattacaggacacacctgtcatgctctacaacgttctttcaagaatcggagggagttaagagcaaaaataacactaaacgacttaccctcagtgtccgtgaagtaacatctattatttcagctgactcatcagacaaacaagctttcaaaagtttcagaagaccaaccaaaatatcatcagaaatgccatagtccgagggcaatttatcctccttggaaatatgtggttgtatgggatacttttcagtaagattcggcacatgaaatatcacttgatgcacatcagatatgccagcctgcattagtttaaagagatcgagttattgcgacgagaaaaatgcaaatcaacaacataatggaggagcatgccaatggattaagaataaagactgaaagcacaccctagaaataaaatcagcaagcaccgatgaagcttcatttgccacagacgatgagctacagaggtcaacaagagtccatacagcagaaacaacatccgggtcactgtgccaacagctaattgtgtctgcattatccacagatacatcgcctctatatatgatctctcccaataataacttcttgtgatgcatacgaagacttaaaagtacaagaatagaaggaaataaattatgttagaacaatgaaaaacaccatacctccttgaaaagaaacacaagatgcattttaacacatttacacacaattaacagagaaaccccattagaaaaggctcttagacttgagagagaattaaggaaattatacctcagcagaaacagctctggtggcaagtgaggagccctgctaacaaactacaggaagtaaaaacagtgcattagctcatagtgaatgtaaactcaaaaaaaatgagaatttaaaatagcaacctttagaaactgatctcttgaatcataggaaccagaaagtgaagcatggaacacttgtatatcttttaagcaatcaaagctaggaagtggctccaaatcctgtaagatcattaagaactaagcaaatcaatggcagattaaaaaatatgaagcaatggatcgtaaagaataagcaaagaaccaatcagaatagatggagagtggagatgagtcatactcttatgtaatcataaagcaatggatcagcatcaactgtcaattgacgaagcaaagataaaactcttgatgagtctgcaatagcacctttccctcccttctcattacgaaggcaacaagtgaccaattttggaactaagagctgtacaaagtccatttataaggagtaagcgagcagacatactatcgataaattatgaaaaactatttatgaggaccacctgaagctgcttgccaagcgcagcatcagtttcagtagaacagttcgaattgaaagcagccaacaacttggacaagatattgcagcattggtcttgcaatggttgtctctggatgtaactccccactatacaaataatatagctgcagttgaaaaagatgattgctcaaacgttaatataaatacacaagcagataaatccacaaacgatctccaacacatagtaaaaacaaaataaataatccgcaacatgaaaatcaagtcaataggccataatcgcaagcttatatgcaagccaacacatgctatcagtgtgttagtctatccagaaaaaaatgggacttgaaagaaacgacgaattgacacaaaggaagtaatattcaacttaaagtgggacttgaactcttaattagtgccagtatgtacagctagtactccttggaggttactaaacatttatgttcacataagcaacatattctttttggacaagaacatgtccaaaagtgaatcattgtacaattcctgaggccttttttttttgtgtgtgtgtgtgtgtgtttgtagcgtgcgtgtgtggaggggctcaactacaattaggaaagagaatagataaaaacactcacaaccaagtgctgtaaagagccactctatgcccaagtacatctatcaaaacctcaatggcacaaagccgatggcgaatatgcctaggatggctagcatctgcaatttgctgatgtattgccaacagaaactgcaatgggaagcaaattagatggaacttggtcaaatccaattatgatcataaaaacaatataatatgtagattagaacgaaatgatgaatgtcttgcaactccgttaaaataacaactggatgatagtaaaaagtcatagcaaaaccggtagcaacttgtactataaaatgtacaagaaaacaagtataattccccctaaacaataaaatatgttaacaactggtacgtttaacatattcaatctctattctcatcggccactgagattgaagatgggttgtttacgagataaacaatttttttagatctataccagttaacattaaccgtgacaaccaagaatacacttaaatagagaaacctaaaccttgggctctccattacagttcttgatgtcttagaaaatgataaactttatctataaaagaaaatgatataatagaaaaagacattccaattctgttttagttcagagattagacaagcatgcaacaagatgtagatcgggtaccttaaaaaccctgtctgaacggaatatattgattttatcaataacaactgtttcagccaaattaccatccctgaaatgtggaaaatcacaacaatgctactgaattggcatgtaagcattatgtatgtattgaaaatgaaaaaaagaagagtatacattgcatccataaatccgtcaacaactgttttcaccgagtgtgccacagcctccttggagaagtgtgggatttctggctgacgtgaagaagatgaaactgatagcaaaaagccaactatggaaacctagaaaacaggagaagagtgagaaaaaaaaaagtacaaaaatgtggatcggtttatagctctgtagattatcaagtagactaaactagtcagcggcggagctagggcccagcaacccggggcagctgcccgggctccggcgccgcatgcatcattagattagttctaaatctcggtgcttagccacagtatacagcagccagcatgaagcaacataagtacgttttaataatctgttaatagatgttacatacacaatcatctagagtagcctgaagcaccatgattgtttactagatcattttatctactacttgagtggaagctattagacatctgcagcctgaaggcaaagtaaattttctagcacccattatatttttttcaagataacaaattactaggccctgtttgttccagcttatgattattataatctagattattaagtctataatgccctcagctatctgttcggttgatggcataggtgggtaatttttctcaagtatgtaggggtagtgggtctttagccactcgataatctgaaaaaagctcctttagagcagcttattagattataataatctggcttatagtttataataatctgctataataatctacttgtttgtttcagcttactcctaatagctagattataataatcctaagctgaatcaaacagggcctaagtcccatagtttgcaaaaacacaaccataggtttcctctaaattagaatatgataaaaaaatgttatatgatacatagtctatggagttatatgggatctgttggcgttgttaattagacttgcccaggctcataaatatttctagatccgccaccgaaactagtcaaccgcagtggaatagagatgccaaaatgtgagcaaaggggcaatggaaacttagaaataaaaaagtgaaagtgatgaggactaaagtaatataaaattattttagcacaacacaacacccagtcataaaagaagcctaaacaatatcacttatatatgtactgtaatgcaagacatacatctgaatttaatatttagctattttggaaaattcactgaacaagagagaatgtaaatgtgccagatgacaaagttgcagcaaattacatagaaagaatgaaacagaatgcaatgcatgcagattgaagggaaaaggctattcagggagcataccatatgttttttaatgagatcatcgcgctcaggctcagaaatttcaccaagctgcaaaagggattcacataagacagtctctgctaagtccttttctggccctgagccatatctggcagcaatgcacaatccaaagatcgggacaaagtatccctttataacagcagacaaaggttgagacaaaatctgagtaagaaatacacataaaaagagagattaggaccagatcaggttacacaaatacatagaacgaagtaccatcgaaacactcaaacaaattttgaaaagggaaaatacttcacagtttgataattttaagggaaattggtgtttgacatgttacacagtatgaccactttctacagttaagttaaaaaaatcaggggtataaaagtttattaaaccaacaagttaggaccatatttaggagttccacatggagatcctagtccttaacacggtgacagttaaataaaaaactggcaagcttccagaattttagaataacaataaacacaacaaatattgaactacatgactgccaatattaaaacaaatatccattcaccttggatagccaattaagatcggcagtctcacccctcagaataaggaaagaaagtaaccatgagcagcaatgttcaatgaagttctttggctcatccgatttaaagccaaacatttctttcacctgtatatgataaataaaatacagcaaaacatatgaatgattcaaaaatatgatgaaactgaaagatttacaggcaacagcatggatcgaattactataaataacctgcttctctgacgactcttcatcaagaaaagaacgaaagcaaaacaacacaaatagaaaaataaaagcagaacagccacgaaaaatttagtgtagagaaaccttctgtaggtcagtaacttattatccttgtggaggcacgtggtttaaccattaaataatgatgtttgtatatcaatctttcgtaacagttaataaaagttcaagtctacgatgttcattacttcaatgacaaacccaggtggtttcaccaaggagaagaacaccgaaaaggcaccaactacacaccaataccttcacacaaaagcaccaacagttccaggacttgcagagaaccagtatcaggctgaccagtaaagtgaattattttttaacaaaattcaataattgacatacgaaaagcactggagcagaagattacctcaacaagcgaaactaggctcacttcacaagcaacccaccggaaaagaattggacctatcagttggtccaaatactgcaaaaaaaaaaagaggaaatcatggtataaattttattttgcatgaaccgaacaattatcctttacaataaaccaaacaaacaagttatctcaagatccaattaacatgctcacaatactcagcaaagtaacaaaagagacatgctactcaccttacttcgtgaagcataattgagcctctttgagacagaatcaaatagagcataagttaattctctgaaatggaagtagcatgaaaataagaagcaaagaacatgtgcatgcaccaatgtaaatagtttattcgtagtgagaaataccgctgagaaggctctatagcagcaacagcggaaatcatgaatacacactgcaacatcagaaataaaaggcataactctgttgtataaattaagtgcaaactgaatacagtacatactatatacatcaaagatcagaccaatacgtttatcacacaacccaatccaagagaactcagtagggtacgcaaatcaatatgacacatatactcttatttcaaaataaaagctggtgagatcaaagcatacctcaacctcaatatcctcactttgtaaggacaaatgagctagtgtaatcagagcagtttcaataataggaacaggctgtggaccaatagccaacacttctctagctctaactggattttcatttgaaaactgcaccatcttgacaccaatactggagctgttttccattaaaaaagagagtatttattaacagaaaacttggtaggctaactatcacactttctttttcctttttaactacaagacacacatgtgtgcgcgtgcacacaccaccatgtgtgcacctcgaagtgcagccgcttagcacatgcttgaactaacaaaggtcaaggataaatccaagaacctcacaaaatcctaataaagcacactcacctatgaacaagtttggatactaggatttgaaccaagtgggtggagtcatgcatccacaattccaccaccccaccaagaggtggttccagctctcacacttattataacaaacgtaaatgaaaagtcccctggatccaaacagtccctaattctaaacttctacggtgagtaaaatattttcccagcattttaaaaattgtaagcataaatcaactagcccctcgtgaataaagagaaacattttttagtttgatcaaaaatagaataagtaagtagcaattatgatttgcactgcagtaacagaaagaacatcgcaaacaacttattatttaacatatccgaccactcttacagcatcaatagcaacccatgtagaaatattggctctgttaacacatcctcttgctttgcattgctttcatagtctaaaaggtctagtatacctatctactactagtacttaaaagagtgacagtaccacaataaaattttgatctgaaattggccaatacaaagcatgagaaataatatcagtatctaatacttcagaaatgtagctcagcattattttatcataattgtttcacttaccaaacatcatggaacaactcgctgtgtccttcccatatttggaatagcacaacaattttccgagccaaatacaacctaacacggtaatcagtatcatgcagcatgctaagcaaatgaccaatcatgtcctgcaatcagaataatggattacacacacaatgaatctagtggatgtgaccctcctagtacaatgaatctggacaacactctgtccagattcgttgtactaggaggggatgtgacccctcctagattgccttttttttgggacggagggagtatttgagatggtagtgcttgataacagataaaggaaataacctgtgcgacatcagggaacagataaataaagttggagatgcaattaatcagcctgatgcggaaaaaccaatctgtgaaactgatctctgtagccttgtttagtaagtctaagaagacatcctggttctggaataagtgcgaaagaactagcagttatcacaactttaaaatagaagataaaacatgtaagacatcattttagcatgactatagattatgaactagtccaaccaggttcaccaaaagaaaacatttgggaaccagttgcccatagtaaacctactgtacaatggactgtactaaaagtttcatttttttatttatgaatgattctagccgatttatgggttttctagggaactgcagaggatgaatttgttaatgagaacatatctctaaatactgaatgacacataacatttatcaacgatagccaggactaaaggattttcaaccaccaaatttagtcaatcaaggccaccgactgtctgaagaaagtggtagtgtgctactactagatattggagaaaggatccagttacacaaaaaaaaaatattgataaatatgctgttgttcaagaaaggtgtatatgctctgaaatggcgctttaatacatcactacatgatgaaaaatcataatatatggagtatactgaccaagtgaacatcagcagaaaatgattttgtttaaattacaccttagatatttcttctaactgtatttcttgttcagcatgtatttaagtgcaaaagaactagcagtccatccaataacatgatgactgtgattgccaggtctgcaaatagtacttaattttgagtaatttaattatatctatagctatactctatactcttctaaaagaaggcaatggtagattggtagaggcagtgaatttgccaccccaccaactctattttatattttcttaccaactactccttatgtacttccatattactacaagatagtatttctatatattgtggttatctagtcaatctctaaaatctacagggacgagtgcatgcatccgtagcaaagcacatgtatttagctagttattaaaaaaagacaccaactgtataaaactagtaaaactggtgttcactcatgaaaacctataactgaaggtatgttgtcacagaacaaaagttataaagttaagagaaatatttagcgaaggctaacagaaacatgctaaattgtatcatatgtcaaatagcaacctcattggatgccactttacatccttgtgaccttccatcagtattatgcccaacatcacaattagctgtcaaattccttagcaaggcatggacatgtgctaaacaatctgcagagctaagtagtgtacaagcacttctttcccacatatcaactacaagattgagctgcatgaccgaagcaaaaggataaaatcagataaatgcctgagtggataaaactcacaagaccaccagcacaaccacagattgaagtacgatttaatggaagtcaagacagtaccacagaagataaactacttgatgaggcagagatatttgtgcaaagttcaagcaagatagcctggccaacctgcaaatggaaataataaaccaagaatacaattgaagcaaaggacaagagggatattttagtggatactactgcaacttcgtaccttgatattgacctctttgtcagctaagttgtacaagacttcccaggtatgaagcggcacaacagagaaaaaagttgaaataatacagactagttctagcttgcactccaaaggccgtggtgagatacccatacttccacttccacctgctgtgacaggatctacttcaccagagccagtcatatcaagatccatatcaacaaaactacttctgttgtcaggatgtaggtcctctgacaaactgacaaaaggcactggcaacattttactaggattgtctccatcaaaattgttcatcaaactagagaactgagcaaatagctcagaaattgcctctaagagttcatcaagtaattcggtgacaccaagcacagaactagttttgttattaactctccacagactaaataatggagaatgcatgaagctcttaaatgaggataaggctgagccagttgtgtcaaatactgatcctagattggtaagaccatgagaaagttcagcatgttccttcataaccactgacacaatatgttttatggcattggtgacataatccaacataacttgcagaaaagaagatttttcttcaaagaccctgaaaagcaacattggaataaagaactttgtgggatcaaatactcaacagatgggagagaacaaggaaaggaggggcataattacattttcataaacaaaaactagttcagaaagatctggaagtttgaacttaatctcgttttagtgcaaattatcacagattttgattatgtgtactggccactgactgtaaaaataggacggaaccaagcacatatgattataaaacaaataccttgacaacagcgaacaatgaattagattgcagactagagagcaggcataaacaagattaggtaagtccactttctcaaactgtttatttgaggacatgaatcctttggtgaactctagaagctccaggagcaagggttgctgaatatgccgaggaaggtgcgctcggctgcatttctcagacatggcctgttaaacaaataagtttaacttctgtagttaccaccaattagaacacccaaagggaaatcatatgagtaaacactatattttcataagtttgcttctgcccccaaatccaaattttgtccaacagagcataccagatttccatgctacattactaagcttgtagtagcagatacatcataagatttcccaacttcatttagcatctaagctccagaatttgagatctaaaggcccatatgttgcacgtgggcacacagatttttttactccgcgtggtcaaagtacaaattaaaacatgccatattgaattatgcatacaaaaaagacatgatattggctttcatgaagttccaaatgatctaacaggaagattccaattctcttaatgattagtgttcagaattgagatttgaagttaatcataagcatcataatgaatagttctccacatatttcagtcaaaatggcattcagttgcaagtgaagtcagatgagttgaagacttccattatgaagtctccaagtttacaagatttgccacacaatctgttggataagaaaatttattactgacttaaaaaatgaaaagaagtgccacaagttttacacgcataaatagatgcacctcactggccaagatcaataagaagagcaacatagaaaacattcagctaccaggattaaagcaccttggtaggactttccagattgatctccgatagagtttccacagaataacctagttcttcctcgtgagaccagcacttgtccttcggaaacaaatatagcaaaccaaattagaaaaagttcaccagatagaaacattcttcaggattcaactgcaacatcctaactgacagctaaacagaaacataccttagataagtttttacattcaccaaacagttgcgatgtatctgctgagttaatcactggcgaggaaaaaccagcacagagagaaaaaatggtttcaggaatcatcagaacactttgttcattcaaaagagagaaaccctgccaaaaatatcagcaattgaacttacaaatctcggaaaaaatagagaaaatattgacagcccactccagaatgtagtttggaaatggatcataatgtaaattgaaaaatggataatcactaaccacaaacacaaataaatgcatgatgaaatgataattaaaggtccaaataatgggaccatctatctggatttttttcccttttgtagctcacatttgtatgttgaactattcaagaaccattaaaattagttatgtgattcaactagtgaaagcatcacacttccattgcagaatttaagttacaataaattacttagatgagctctatatatatcacaaatatgaagggcatctgtatatatctaggaataatcagaaggaatataaagcatacaaatgtcaaataagtccttgtgatgattacagtgataaataattatgttctactgttgcctaaatgtgtgatacttgtataaagtttactgatctatcaccataggaaactatgcatccacattcaaaacactaatgcagctaaacataaatttataatttgtcaagggaaaaattgtctcagttagcaaaaagtggtcgatacaaatgttgatagtatctttgtgaaggagaggatacacaaaattaaacaaaagcataaatggaataaacaaaatacagttgtctggtaaaatataaataattaccttggagtgcactaactcaaaagttgatcttaacagattctttctaataaatatggaattggatacatcgccctgcatataatgatattgaagaacaaaagtatgctttgagcatgtttgatataaaaagaaaaaaatctgaaatacagaaagtaggagtaactagtaataatagtcaaaggctcaaagcacaatagttgggaaggtaaaatgattagctccagtatattgaatagctaaggtgattagattttgtgcagatgttcctttttctacatcatcatactagcctatcattcacaaatttgtagcagttatttctagacaggctgtttactgaaacatcaagaagaaaggtagcaaccatagaaagcacacgaaactgtggggtggttttgctctttttcaacttcggccatagaaagtacaggcaaacgtgagcatttgccaactctgtagttactttgtgtgctttcatacttaatcatccaaaaagagttacatgacagttcaggaaataacaagcagtgtattttgtgagattgctgaacaataaattagcaagaatatgaaacaattagaattatatttgagaaggatagatccaaaacaattaaacaaacattttggcaccaaccaaactttaaaaattgggaaagactacaatgatgaatgccctctttttggcttgatctggtgaatttaccctaattagtgagttaagaacatgaatccttgtcatactttgaacaaaagagttgcataagagttttggacagtctatttgtttcctaaatgtatgggattgatcaactccactactccactgtaaccataagcagtaaacaactaaaatagtgcaagacagcaagcatacctgaaaacctatctttgaaaagtaacaagcaatgaagtacagagtagacctacagtaagaattgggggccaaaacgaattgtaagtataatcccaatgtcaaaaaaacaattataagaattagctcacaatgaaatgtaagtaagtataggccaaaatgttcacatcagttaaggatattgaaggaaaggttaggcaacaatggcaaggacataacagaatgacaaaacagcataactatgagtttattacaccatgcaatgtcttccacagttcagctaacagcaattgtaaggactaaggaatgtgtgctgcattagttatttcttttcatagcggcaggataacaacctgtggtttcttcatatgcaagaaaaatataaatcacaatcaggttggtactatcctagtgcactaagagcctaagaggctcatggctcttctatttgataggatttaactctcttaattcttagtccaaggataacgccaactgagcacacatacatctactgatttatatagttcacagctaaaccaataagatgggatcaatacatcataacagcagcaacatattcagatttcatggacctctgtttactgatgtgctatgtaagcaacagtgctcaccactcactcatttctcttaacgatttcccacgaaaggaaggatattattttacattattcaccagaccatcagaaaagtggattttggacttatttggcaacagaaatttcaaccaattttctgggacattccgcagataattaggatagtggcaactgattatttatgatccaagcagaatggtgattaaacaggaagcactgaaactagtcattgttggaagttcaggcaacaaagctactggtatttgagaagaatacacagtttattttttttatttgtccatcatctctagaaatcaagatgcagtttaactgtatgcaatatattctagaataggagatatttaccgtgagaagaaagactagtaggtagggtcacatgacaatagaaaataactgacatgaaaatagcatgcaaaaacaagttaaatgtattcaggtacatagatagcactgtgctgaaggtagtttaggagctttttactgacacatgcatatctcactacatgcaggtactcctccatccaaaaatataaggatttctggagtttctccacctacttcctcctcttaacctatcacaacatttccccagttaattccacctactttcttaatacccatggtcagcctcaaatattcttatattttttaacggaggttgtactgaaaaaatgaggcaagattacaactaataaatggtcagtctcacagaaagagggcatacgtacgatgatggtaattgtttaaatatttgtaggtcccatgtatcttctgacacaaatgatgcatgaacttggtccttgaagaaggaaagcacaaaatatcaatgatatctcgaaataactataactggcctgaaattatgcacagaatatgttagagcttctgttaagataattgggaatgagaagctcacccgcatgatcatttcacccaacaacctcagaactgaatcaacctataaatgtgcaataaaataccaatcaaatttttagatgttctagaaatcatacagtgatatttcacaaccacttgggtactctaaatgcaggttatattgacaattatcattccatttttagtgttcagtccctgaaggactaaaaaataaatggagatatggtaaagagcgcaaacactgataacatcagagtcatatacactctttaattgataattcaattttagtagtagtaaacagttgtttcagaagcacagcacaaaaaactgattaggcaccttttttcaaacaagaatgttatgaacttataacaattataagttttgaaatatcataagagaagggtcaatttctgatactcacgactagagctgtggtgctaaacaaaggaagtgcgtgaataagagaattccaggtatcttgccaataaccttccaaaattgacatctgcggaaaaaaggtgattggttgtgtcatatgtgggtataactatgaacatcacaagtctagaaaatacttagtagtgatagggggaccacaagagatagtggtagattcgtataagctctttagcctcaggctaattaactgaaatgtaaatggcacagcaaaacagaaataaatttacctcgtcatttgttaaccaaaatggtggtgcatccctagcactagacatgagaagcgcagagaactccttgagaaccctgttaaggtaagtgaaagtttgacatattccacttgctagctagaatgtacagaacaatttcagtaatcatctggttacataaagcagcacagaacaagacatttaagccaccaacaaaaacaaaaggtaccatcaaaacaaacctgataagccaaagcagtgaatcttgaaaccgtagggcatttgcattgctcaaaacactgggcaaccatagaaaaaatagaacattcaatgaactatacaatgcatgctcatggtaggtgaatacctataataaaatttggtactagaaatccctagagcacatgaataactactaatgacataatactatactagtgactaataatagcatgtactccctctgtctcaaaatataagggtttctgaagttttgcacacggtgattaaggaagtacgtggaactaaatgggggttgttgtgattggttgagattaggaagtaggtgtagaagttgctatattctgggacaaattttgaacactagaagttgctatatttgctatatttcagatcaatgattgattgtcgattccaaagttgtgcagtaaaagttatccacaagagtgattttgcactatcttgcatgcatgtgcatttcagacacgctccatataatacatatctagagtgagtgtcatatactgaaaaactcaaagaacataatcacagatctacttaccaacaagcattaaataacagaaagtaaagcaggttgctattttctttaattttgcagttgccgattgccacagaaaatattacatcaacaaaaaataaggcagttgcataaccttttcaaacccttacaggtcgccttgaaccaattgatcaacaaagatttatccactcggtacccatacttgtgaataagacaacaaatagaaccactcctgcgaaaagacaaagataataataggtatacaaaatcaaacacgttcaacagatttagtggtcctcgtgcttaacaaggaataagggattacatctcaccacagggaacatctgtggcaagtgctactatatatcacaccgacgtgcaacaagtttatcagttgtaacttgtaagggggcagtgagaaataacacagcatgaggcaactaaggaacagaacagtacatgctagccttgggattcaacaatgggagacacctccaaataatcaatttctagcacatggttaggccatatgcctacaagaacatttagtttaagggtttaagaagcaacatgtcaaaattgaaacttcacagagcatgaaagctaattgctcgaaaaggtggtgtcactgataagcactgtgttggtactaacttagaaaaatgcgagtgattttatacatatttcataatatcaaaatagaactgaattggaagcagcaagtaaaaggcatggaaaatgcacaggatgaggcatgtttaataaaagagattcttgaatttcgactgtttacctcaggttttaacaaacccaaggttgtcaggatacgcatatgagatttcagagataaacaatgccttcttttgaagtggatagatggtgcataccaaacaagggatcctctcagcaggctatccatgatggcggtcataacatgctccgtctttaactttttcttgttatgtgatgtcctcggtgtgcatttgtaggcctaaatattccgaacaatttaagctgttttcgagcgaaaacagaacaatgaaatgttgcgcgtgcaagtctgagcacatgtgtgtgcaactgtgtatagatgcagatccaataccagatataaggcagtagcagatagatccatcaattcttcctggaagcacctcaaggagccagctttctcgtctcgaggtgcctcgcacctatatttattgtatttcatcagaaaagaaatcaaaatcataaagcattttcaaaagaataacagtatccctaccatactaaaccggctccagtattaaaattttggtctaattccttaatgatgacatcaagaagtttttccaaaatctcaggaatagccctagcaagttccagctgaacctttgcataggtgatgaacaagctctggaaaaagggtaaaaattgttgcttgaatacaacacaaaagatgtaatgaaggtataatcaaaattatgtaataaagatgcagtagtgcaagtcaggctatcagaaccttcaaagccctgtcgtgggtcacaggccaagaatggaacataaaatcttgaacagcattatggatatcaacagatttgcatcccaggtttggcccatccttcagtagaaaggtgttaacgcattctataagtttgcgggtcagctttccctcttccctgattccacaaattaagtttatttcagttgcaactcagaaaagcagcgggagacaaaaaatataaaaatgcaaaccattcttcttaggaggaagtgggttcaagaggagcgtcaaaaggacatgagcaaacaatacatgcctaatatttgagcatattgcacaaaacccacaaaggacctcctccctcatgatatcagggtaatcacccggtgggttttcaagtagaacgtgaagggtcagtgtacaacggaaggattcctccttggagctggcctgattactgattttttcatcaaaaccagtcgcaactttcttcatgtagagcacaacaaaacctgaaaaaatataagaataataaaggaacaaaagtgtcaatgggatgaaaagataggagatctggcaagggaactcactgctatatgttcgaggtttcatctgataccggtactccttaacagttaaaagctgcctaagaattatgctgtactctatcagaaagctgggagcatcttttacaacctcccatatatgactgaaaagtttcttagcgacggaaatcaaaagtaacgaccgccctgcagagacaatgaacctcttgtttatcgtcatacagaatgtaaaatattccacttcaaagcaattgaaaaggatgtttgcatatctggttaaacgcgaagcatactgctgggtgtctggcaagtggcaagtgagaagatgcataaataaacaagagtacatgaaaatcaggagcatcccaacaccaaaggtatgagcattactagcaggcatgcatgaaagagaatgcctgagcacctcctttcagccctcagcagtattctttattggaagttccacgcagaaatttacgagtgaacattaatgctgtcatgttggagtagacatttgacaaaaaggaacggatgcggataaaataaacgttaaattgggttaggaataggtaggcaagatgagtcggggtaattgtacacatagcataagtcatggaatgtgcaagtagctgcaaaatgtgtatctggtgagcacgatagaagattatgttgtgtgtttgtgcatcattattgagtactctctccgtttcatattataagtcgtttgagttttttcctaatcaagtttgacaaagcttatagaaaaatttagcaacatctaaaataccaaactagtttcataaaatctaacattgaatatattttgataatatgtttgttttgtgttgaaaatattaatatatttttctataaagttggtcaaatttgactaggaaacttataatatgaaacggagggagtaggcagcaggctgcccaagtttgtggggatccatgcatgaaacgatgtgaactcaagcagtgtataaaatggtggcagcgcattgcgtgagaaaactagtgagaatgcagaatcatcaaaactagttgtgaagatagatagataaacaaaagattgattaaaatcagcagcgcagggcaggttgtcatttgtaccaaagttagagagcaacctccgtgaccgtgacatacatagaaatacaaagtggatgaaaaggagggcagagagcaggaaaatgttgtttggaaagaaaggtaaccaacctgagaggcggaagtcttgagcgcactggacggcgaggcggagcatcctggcagcggcgctcttgggagagcgcttcttgccggagatgtcggcgatgacgcatttggtgagcgccatgatgaggaagggccatgtggcggctgcaaaacaaacacgaaagaatcatgagatactactgtattgtacataggagtagcagtagtagatgggagagacagacagacaggcggggagatgggcgggcttgaggttggcggtgttgcgggcgaggaggcggcagaaggagaaggcgcggtcgccttgcagccaggtgcccagcagcttcaccccctcctgcgggcgagtccatggggcgaatcaaccaatcaggcaacatccaaattcaatctaggaagggaggaagggaggggagtgtactcac

SEQ ID NO: 8880 - DNA, 2492 bp, Oryza sativa
gaaaatattacagtacaaggttgatatgaaaatagtaaagtacaaggttgataggtaagttaatacactctaatgttgttgaggttgacctccaaatttctgccacatgtgctctatcaaatgttccttgagacgccgatgtgtagatcgatcacgaatagccctgtttttctctagtacctatgcaaatccatatattggtccgtggtcaagtcctgttatctgagcagagaattgaccttgttcatatgttttgtcatccggtatgtcataggaacctttctcatcctcaactatcatgttgggcaaaataatacaactatacattatatctgctagctcttctctttcccaaactcttgccgggtgacgtattatggcccaacgtttctgtagaaccccaaaggctctttccacatcttttctagctgattcctgatgttgtgcatacaatttatgcttagcgctctgtggtctgatgattgatttggcaaatgttgcccactctggatagataccatcagctagatagtatcccatgttgtaatctgactcattgagagtatattgaacaggaggtgctcttccttgtaggacatcagtaaataatggggattggtctaacacattaatatcattatttgaaccagcggcaccaaaaaaagcatgccaaatccataagtcttttgaggcaaccgcttcaagcatgatagtgggtaccccataatcaccacgtgtgaattgtcccttccatgcaaccggacaattttgccattcccaatgcatgcaatcaacactacccaacatgccaggaaatccatgtgcctctccaaactgaagtaagcgttgaatatcctcttcggtaggcctacgtaaatattgtttaccaaatatgtgcctcacaccttgaacaaaattgatcatacactccattgctgtgctttcagctaccccaaaagtctcatccataagatcagctggagtaccatatgccaacattcgcatggcagcagtgcatttttgaaatggtgaaagacccacctttccaaatgcatctgtcctaagacaaaaatatggagaccactcgccaagagcttgtacaatgtgcaaaaaaagatgcctcctcatgcgaaatctcctacggaattgatcatcggtgtacaaaggattgtctgaaaaatatttagcaaataacctgttgtgatcgtcttcatgatctctactgatgtacctgcgtgtgtagcctccacgctgattagagttcccagctaggcgtgccatcaatttcatctcaagttgagcttcaagccgggcttctagctgagcttcagtaggatcattaatttcttcccacatcatatcttccaaattctcactagtgatggactcatcagaatgactagaatggacttgtgaatcactagacatctttgtgggaactaggtggctttgttgagaatgaactgaattaaaggcaatggtatatatcttgctgaactgcataccctgtttcatagaagatacaactgaatggatatgtgctaacatctcagtgttgcttttgttccaacagctagtttccaacagctatattccatacaactatgtcatgacttgttgtttggatgtattccaacagctagattcacagcaggcatgccttgctgtttggatgtattccaacagctagattcttagtagccatgtcttgctttttatatatttaaacaatagttttataaacatccatgtcttgctttttatatattgaaacaacagttttataaacatcaatgtcttgctttacaactattttaaactatcacaacagcaagattataaataattgtgctaattattgctgctacatatgtattttgtaggctgctgttaaatcaagtgctaagaaattatgggccaacaacttcaaataagttcaattaagactgtgggctacatattatcagtacataacatcttctacaggtacaaagatacaaccatcattcactaagtttacaatccaacatttacttagcctacaaacttaacactgagttcacaagtctaataattgctaagtctaaatcctagcagcaaattgatcatagaccacatagtggcacactaagtaacagggatacaacatcacttggtgatcatttattcttcagcaagttctgtagctagcttttcgaggacagcttcatgcctcttcagttttgcatcactaaaatttgaagtgtctttgtccaacaattttaagtatgtctgatacttctccattcttgtgtattccttctttgcttcagctgatttcgatgttgcttctgcagatttcagcatcgcttctgctttcacttttatagcttcattgtaaagaacaaagtcttgacatggctggtctcccaaaggagaaggtgcgacatttttacctctcccttttaacttggctttggcttttttctgtccctcagggcgcttctttttgc

SEQ ID NO: 8881 - DNA, 14243 bp, Oryza sativa
tgtcgcatctgaacgtgtcgagtcacaattgtgtgttaggtccgatcgtacgtgacttgtcgtatctgaacgtgtcgagtcacacctgtgtgttaggtccgatcgtacgtgacttgtcgcatctgaacgtgtcgagtcacacctgtctgttaggtccgatcgtatgtgacttgtagcatctaaacgtgtcgagtcacacctgtctgttaggtccgatcgtacgtgacttgtcgcatctgaacgtgtcgagtcacacctgtgtgttaggtccgatcgtacgtgacttgtcgcatctgaacgtgtcgagtcacacctgtgtgttaggtccgatcgtatgtgacttgtagcatctgaacgtgtcgagtcacacctgtctgttaggtccgatcgtacgtgacttgtcgcatctgaacgtgtcgagtcacaattgtctgttaggtccgatcgtacgtgacttgtcgtatctgaacgtgtcgagtcacacctgtgtgttaggtccgatcgtacgcgacttgtcgcatttgaacgtgtcgagtcacaattgtgtgttaggtccgatcgtacgtgacttgtcgcatctgaacgtgtcgagtcacacctgtctgttaggtccgatcgtacgtgacttgtcgcatctgaacgtgtcgagtcacacctgtctgttaggtccgatcgtacgtgacttgtcgcatctgaacttgtcgctcattggaatattaatcatgttttatcatctaacaacaatgaaaatacgaattataaaaaaaattcacataagacgaacacacaggtatgacttggaaaatgtctggttagtctttttttttttacggagggagtagtcgtgtgcacttgtgtacatgtatatgactgatttatgacagccgtgcatgtgtatttgtgtacgcctaatttaatgtgcaactactactaaatgccaagcaatgaaagcaacagtcccaatgcgtccttatatactacttccattcttctctgatgcatcctgttctccaccattccatctcttctctttctgcctgagctgcatccccagttggcgaacatgaaagacaaggtatgtccgatcgtgtaaatcgttcgtagcgttagtattattagtttaagcgtcgccgttacttcgagttgactcgttctgttcatttgattttttgctagtttcaccgttctggactttgcttggaagttcccatgtatattgacgacggcgagtattttggggatgaaaccggtacccagctgaaatgtcgtcatggcctccgcccgaagagaagaactgcatgggaatggaaggacaccggaagaaggtttcttggttgcccactggaggaagaggaccagtgcgacgctttgttttgggttgacgaagaatggcaaccaagaatacaaaaggcatttgagatgctctggcttgcattggaccatgcaagtacacgcaaccctaccaaggcgcagtaccaatggtcaaattttgtagacagaacaatagtcgaagaagacaaaatgaagttagaatttcagatggcttcacagatctcggcaatcgaagcaaaacataagaagagagtttccaggataaaaaaggaaacagaagacctcaaggcttggcttatgggttccctagtcgttattgcatttcttttatttaaaattatcgaaaatatgtatcagggatgttgatgcttcaaatatgtatgacgtgtgttgatgcggctttaaatttgtgtcaatctatttcattgctaattatcacgtcacaaaagcccattgagtggcccgtttattgaagcccataaggtggcccattttatagacaataaaaggcacactctctagggtttcccccatccacaaccttcatcccatctgaccgaccatgtgaggagccagccgaccccgccgccgacacctccgatcccgccgtcgacgccgacccctccgaccccgccgtcgacccctccgaccccgccgtcgaccccgacgacgactcccccgccgacgaccacgccgacggtcctgaccccgccgtcgacccctcagaccccgccgtcgacgccgacccctccgaccccgccgaccccgccgacgacgccgacgactccgatccctcagatcccgccgtcgacgccgacccctccgaccccgccgacgacgccgatgactccgaccccgccgactgcgccgccgactccgacgtggcttcaacccctccgactgcccgacctcgcctacgcagccgactatggtgaacaacaggaaggttgttatccaagtcgacagtgacacgggtaatgttttgcatccatcgatttgtgttaacatttttttgatgaccgtgaattgagcaattgatttgtgttaacatagatgaagaggtaaaatccgacagtgacactgagacagaatccgagagtcatatggaagaggaagtagacccttcatcgttttttgctagtgtgcggcgcgaaactatcaagtgtggttagtatgcttgttttaccgagactatcaattgaggtgattgagtttttttttttttggtattatctattgtggttactatgtcggttcatttgtgcagggccaaacggcctgcagtacgctggaggctttcatagtagatgctggtatgaaaacgatgtgtacttgacaagggcataccaaatgaatgttttttttgttttttttgtatccttccattgctcactgcacaataaatgtacaattcgaactgcacagcaatggcagccgcaataaacagcaattcgtgattcgctgtaacttaagcaaaacagacttaaatcacataacagacacaagagcagcatttcaatcccaaaatacaagtcaaacacaagagcatatcattctacaacgcacagcaatgccaatacagactgaacatcaataataaaagcaagttgcatactgccagtacgtctcacattaagttcttaatacatatattcatcaatgccatacaccacaaatattcatcaagttccaccccatgttgcttcatctcagaacataaacaaactaacaaaaaatacatgttcctttcctgtcttattcaacgatgcaatttgacggccaactccatcgttctcacacatcaacacgtactttcctgaaaaaaattgtgaaccaattaaatacgcaggtattttttccaattgaactagcttgacttgtcacatataaattacctctcgtaaattggacacgaacgaatggtatggccaccgttacggcaatagccacaacgcctaacacgcttctccaaaaaacctctcaatctttttcgcggtgctcccttcggaactacctccatgggatcatgtaccaaaacatggccactaatgtctgtacgtaaactttgacctaccacgtgaccacacagtgtcctctctatttcgttaccatcacaatcttcagtttctaaatccaacttttctagcatctccatcaccttcaatgtacattcctcagatatggagcacttcattagtacttcgctaccgaagctacgcaacatgcgatacctttccatttggtccgaccatgaaaatgtctcaccatatctatccgacggaaagacacttttggctttcacagtccacctgcgaactatgcaactttcaggaatggcatccatcttcaaataaaacagaactgcaaacatgtgctgacatggaaggctttcacaatcaagtttcatgcaagggcaactcattgtcttcaaaaatgattcctcataagtacagttcaaaatcttcagcttctcattgttctctttcaagcacatgacatacttcactactgtatcctcatcaataaaatctattacttcccaatccatggatttaataatctcaaacttaaccttcttgaaaattgcaggtgtatatatgcgcgctacttctttctcaattaaacttgcatctgtacacgtgaaggggactgattgtgaagcttttgaatctagctcagcctccctatgtcttatacgcgacacgcaatgttcgtaatgctcaaccaatacaactaaactcattgtacgatccaaatgcttatgaagttttgaattcaaactttcactatgctggttgcttttcattcctagaaagtacttaccttttaaataagcagcagcccatttcttccttaagttgtacattctaaccaaccattgattatcttcacccactttatgtttgtccttgaactcaacccacttattctcaaactcttccggaccataagtagaatggataagtgccctgaaatcagccaacatttcaggccggagatgtcttgccatattctattctatatgccaagtgcacaacctatgctcagaatgtggcatcacagatgaaattgccctacgcatagaattgtctccatccgttatcaaacctctgggatgtttctgacccatgcaatccaaaaactgcttcagaatccactcataagatgcaaccttctcatcagccacaatagcacacgcaaaaatgacagtcgaaccatggtgattcacaccaacgaatgggatgaaaggcaagttatatttgtttacccgatatgtgctatcaaaaacaactacatcaccaaacgcatcataatctatacgagattgagggtctgcccagaataaccttttcaatcgaccagcctcatcggtctcatactcaaaaaagtactccatgtcatctttttgcctagcttgcatgtattttataacatgatctgcatctccacctaatatctgtttcttcttctgtcttacaaaaaaattataaaggtccctactcacaaaaccagtagactcaaaaccaccatgacgcctctccatgacatccatcacttggtgctgacgcaaaccaacttctctcaactccacaacatttgccttctgagcaatgctaatatttcggtgagaacgaaggaaaggaacttcatcagatttagccaaactatgactgtgctttgccacaaacttcatacaaaccaatcaccctgtttcttgtcaagtctaatctcaaatatagctttgcatccacaacgagttagtgctctaggttctctgcttttgttaccaatatccatataaacatctctcctatacccttctcttgagcaagtgtactgcctaaatataacatcagcagtcacaggatcacgcctagcaaaatttttccttatactaaatcctttccctttcgcatacctgttatagaacgtgaacccgtcgttctcgctcttaaacctcattgccatgaacgtagcatactcctcttcctcctctaagctactgaaattgtctgccatctcatcaaccatcatgattctgccaaaaaaataacaataatctcaatatataaaacaaattacacagtatcacttcaaacaatttacgacacatcgatttacctgtaacaggaaacacacggccgttgcagaatactgaaacggcggcagtaccttctggcgatgaacaagattgctccagcgactcagacaacggcgactgctacggcggagatgtgatttggcgcggcggctccttccggcggcgatgtgatttggcgcggcggctccttccggcggcgatgtgatttggggcggcgatgtgattaggggcggcaagtgcttccggcgatgtgaattgggccggatgttgcttccgccgtcgggcgccgatgtgagtgaggcgcgattcagagcgatgaaatttgggcgggcggtgggtcggggcgatactgaaggcggctagggtttgcgtctcgcgtctgatttggggagtagataccgattgcggtgcgccggcgccaattccaatcctacccgccacaaaatcaacggctggatgggttttggtaccacgcggtacaagtaccacgcggtacaaaacgcaggacgggagcattgctcttccatattagttttctttgcagcccggctaaatataggtctcaataaaccggaaagagcatatcaaatacaatttagaattaactaattaattaatacatcataagatcaattgcattttggattgaaaaatataataatttagaagttttttccataagaacttcaaattgaaaatcctttagtaacttctatttgaataaaaccgtggttgtgttcggcaatagtgatttgggagaaaatcccccttgttattcatgtgcacgttttctaaattgctaaatgatgtgctttttcaaaagaagttttatagaaaagttactttaaaaaatgtattaattcatttttaaaatttaaaaataattaatactcaattaatcatgcgttaatggttcaactcgttttgcatattttttcgatcttctcttttctcctcctcttaaacacaacccttagatcaaaaattgttgtctaaatgggacatcattcttgattttttttatctattgtaggatgaaaaatagatgtttgagatttgtttacgtcatcctaactaaaagttttacttatggtttaatttgggagtaaaagttttacttgatatgacgtgtacaaaatttatacgtctatttttacatcctacaatattttttaggtttccattacatattagccacacaaagtcgtgcatttgcgcgaccaagagatgcatctttgttaaatatcttaagatttttctcttacaattatagtggctttgctttcttgcccctaaatattactactgcgaagtagcccataaattacataccactacaacaatatctttatgtttttttacacaacaccaattcatgtatgtttgttttacttatttcacttctcaaatttaatcagcacgagatcaaatagtgtaatcatttcccatgcaaatcaatatcccatagtgtattttccatgcggtggactcttgttgcttgcgatgtgtcaaaggggagacgctagaagacacaggagggaagtgcctagtgcatgtattttcttttactgcatggatgttctatgatcggatggccatcttttatccaaacattcatccgatggggcgatggccattgtttttcggattacgtggtccaatatgctgtcaagaatgattctttctttcattactttagatatctaggaagcatattctaggatataatcattagttgcacaccgaactggtattatgtgccatggcatatcaaataataattcaaatttgttaatttgttcgtgtgatacaataattttatgtcctgaaacatttatgaggagcaacggaaaattgtagtaaagtgtatttgtggagtttttctttcaaggatatttgtgcagttttttttttgaatggctaaatagttgttgataggaaatcagggccaaaatcttgcaaatttctaatcataaaatttgcttcgtgattcacactctggcgaccttatttctatctgccctatctccagcgatgccatttcctccagctctgctgaccgacgatggcccgatgagttagggtttagggtcccgggtaggataggggtagggcagagggaagaggaaggagatcgtcgggcttggagggatggccgtggaaggcgaacatggataggactccagtgttggagccaaggtgttggaggagatggcagcgggccgacgttggttgcgagggccaaacagagcttgtggttaggcggtggcgaccggtggtggtggaggggagtcacaggacacgaagaagatggtggggggcacttgctaccgtcgtcgccttagggaagagaggggggggggggaggtggcttgatggcgccgtggaccccgttcggctagacggcgatgtggggcagtagtggtgcaggaggcgacgggcgggaccgaggaaggaaaggagaaaacaatagggtttgaatacgttacatgaatcttaaagcgatccaatggtctagaattttgtaagatttaaaagttttttttcctaccaaaagccatgtaggcaaactttcttttttaagataatccaagaaatgccattgacaagcgtccaagtcccagaaatgctatcaacaagtgtgagttccaagaaatgtcatcatacaaacgattttatcctaaaaataccatcaccgttagggttccgtccattttgtgacattaaaaacactgttcatcctatagaacttaacggcgcaaaatggacagaaccctaacggcgatagcatttttgggacaaagtcgtttgtacgatcgtatttcttggaactcacacttgtcgatggcatttctaggatttggatgcttgtcaatagcatttcttggattttctcttctttctttcttttttcttttttggcaaggatacctgtggtgggttttatgggcatggaacgtaaggacaccacgttgtcctcatgacaaatgggctaacttgtttgatcttagatactactccctccttttctaaatgtttaacgccgttgatttttttaaacatgtttgaccgttcgtcttattcaaaaacttttgtgagctgtgtaaaactatatctatccataaaagtatatttaacaataaatcaaacgataggaaaagaattaataattacttaaattttttgaataagacaaacggtcaaacatttttaaaaaaatcaacggcgtcaaacattttgggatggagggagtatatctctctcctttaatatttgacgttggttagtatcatatttagctagccaacgtcatatataatagtggaagggagtaaattttaaattcctacttgttcttaatacttattgttctattgttctagtagtccaccgtttttcttggattttcttcaaaaagtgaagaaatttacgtgattatgagtgaggtaaggaaaaaaatgaagaaatacgatttgtccatcagtccattggaaacgttttcggcaaattcaaatattccacgttgtaggtgagctctgcttttgggaaagtcagttgttgacgccgccaaaaattccagtcctctccatggtagtcaacgtcaatttctcacttgtactatatcctaacgagtttttggttcacacctgtttaatctctgttcgaaatcaagaaaagctggatggagtagaggatctatgtcgagtttagctccaaactttttctttaaacttttaacttttccatcacatcaaaactttcctacacacaaacttttaatttttctatcacatcgtttcaattttaaccaaacttttaattttagtgtgaacgaaacacaccctagcatgtatggcattgtgccaagcgtcgtgtcctgaactccagaactccagaattccatatccatatcgtacctacagcgaagggaaggttcagatttcagactcgctgtggtaggtcagctcggacagtttgaccacgccttggccacttccgctactccactccactcgcacggtcgcctacccagttttctggccttagcggcacatagatttccgcccaaaaccatccaccttttgccgcctccgctcgtgcgcagcagcgcagctgccttgccgtttcccaattcccacacgccatgacgccaaccaacccaagcacagcagtacaccacacgatgtcacgactcacggacacacgggctatatatatcgacgtgccacaccacaccgtacccaagcaaacagatttccaactaaacttgtaccaaaacacaaacgacatcggtcccagtcaagcggagcgcacgaacacaacgcagagcatggcagcctccgtggtgagggtggccatcgccaccggggcgtcgttggcggtgcatttgttcgtcaagtcgttcttgcaggcgcagcatcctgctctcaccttgctgctgccggtggctgtgtttgccggcattgcggtgggcgcgaagggcgggaacgggggcgacgggaaggcgccgccggggccggcggccgtgccggtgttcggcaactggctgcacgtcgggaacgacctgaaccacaggttcctcgcggcgatgtcggcgcggtacgggcccgtgttccgtctgcggctgggcgtgcgcaacctggtggtggtgtcggacccgaagctggcgacggaggtgctgcacacgcagggcgtggagttcggctcccgcccgcgcaacgtcgtcttcgacatcttcaccgccaacggcgccgacatggtgttcaccgagtacggcgaccactggcgacgcatgcgccgcgtcatgacgctgccgttcttcacggcgcgcgtcgtgcagcagtacaaggccatgtgggaggccgagatggacgccgtcgtggacgacgtgcgcggcgacgcggtggcgcagggcaccggcttcgtggtgcgacgcaggctgcagctcatgctgtacaacatcatgtaccggatgatgttcgacgcgcggttcgagtcggtggacgaccccatgttcatcgaggccaccaggttcaactccgagcgcagccgcctcgcgcagagcttcgagtacaactacggcgacttcatccccatcctccgtcccttcttgcggggctacctcaacaagtgccgtgacctccagagcaggaggctcgccttcttcaacaacaactacgtcgagaagagaaggtacattccatttttcttactttactgcattccctatccattcttgtcatggaaaaaatgaggattgcaaggtaaatttgttcgtgtctaatcaacaaaaatcttgatatgaaatgcaggaaggtgatggacactccgggagacaggaacaagctccggtgcgcgatcgaccatatccttgaggcggagaagaacggcgagctgacggcggagaacgtgatctacatcgtggagaacatcaacgtggccgccatcgagacgacgctctggtccatcgagtgggcgctggccgaggtcgtcaaccacccggcggtgcagagcaaggtccgcgccgagatcaacgacgtgctcggcgacgacgagcccatcaccgagtccagcatccacaagctgacttacctgcaggccgtgatcaaggagacgctgcggctgcactccccgatcccgctgctggtgccgcacatgaacctggaggaggccaagctcggcgggtacaccatccccaagggatccaaggtggtggtgaacgcgtggtggctggccaacaacccggcgctgtgggagaaccccgaggagttccggcctgagcggttcttggagaaggagagcggcgtggacgccaccgtcgccgggaaggtggacttcaggttcctgcccttcggcgtgggccgccgcagctgcccggggatcatcctggcgctgcccatcctggcgctcatcgtcgggaagctggtgaggagcttcgagatggtgccgccgccgggcgtggagaagctggacgtgagcgagaaaggcgggcagttcagcctccacatcgccaagcactccgtcgtcgccttccaccccatctctgcctgaactcatcgaatccctttaaattatgattgtgtcaggagcagattaaggatattatacagcattaatttcgatttgtcgaacaaaattagacaatagtaataatgcaagggattttacatgttctgttagaaaatatattttgtgaactgatcttatcattgtcagtaaacaagtgtggatagtactgttttccataaaaatcaaatttagtcatttttatttttatctggtgttggtagattgctctggtcgctgactgaatttttttattaattttctttttttatatattttttagaggagggtaaaaactgttttccatgaaaatcaaatttagtcatttttatctggtgttggtagattgctctggtcgctgactgaatattaattttattaattttctattttttattaattttatttatttttttagaggagggtatttttactcgtcctctacatctaaccggatatatggagcctttttaaaattattaggaacttagcccatcggacagagaacttaacttagccctcaaataacccaattcgaaattcgatactcaggtcagtgcaatcactaggctacatgccctttcacactgcaaccattattaatttatttttgcggggaacaagggatttactcgaataaacgagtcctcgcacacaaggtgcgagatcatattacaattatcgtctggccagaattccatcatggattcacaacggcctttatttgctaaaaagtgactaactctattttggttcctatgcactttggcaaaagacacttcctttgttccagtcatgagaaagcgaatctccctgactataaatccttcggctgacagcagcttctcctttgaattcaacagctgaataatttccagacaatcagattcaacggcaatcggaagcagggtccactgcaacgccaggttgaggccatctctgcaagcaatcagctctgattccagggccccattgcatctgccaatgaaaccacacgtggagaagattactcttccgaaactctctctcaagacagcaccagtacctcctctcccatcttgagggccatacgacccatcaatattaagcttcatccatcccggttttggccttgaccatctgggtgggttagttgaacatttaggggctgtttggttcaatgcttcaacttgccacaccacacttcacactttaggctgccacacctccttagccttgtgtttggttcattaccttagttatggcaagccacactttcttactatcttaccctatatgtcatagactcaatcttttgcctaactttactacaagtgtggcttacaatttgtaggccacaaaaagtgtggcaagccacacttgcctaacattgactaaagtgagttatggcaatgttagttaagaaccaaacatgctgttagccttaactctgctccccattccttcaggtttacaacatgcttccctttcataagatttgcaaaaggatgctgcttgatttccactagggaatgaacataactcaggataaaatgagtcgaggcctctagaggaggggccggctttccgtgagttaattcgttgcggatgtaccagatgcgctaaagcatcatcagcacaagggcctgttcatcgtccggtaccaactgaagcatgtttaaaatccagtctggccctgcccagccagctgaaaataggcttgagatatgcttttccttcaccatcgactgccacatactcctagcatgagggcatctgtataacgcatgacccacatcttcctgttcatggccacaaatactgcacacgtccaacaattccaaaattcctcttcttcttgttttccatagttggtaagctatttgtggctgctctccaaccaaagattttcactttttggggcacattacaggaccagatcaggttccaccctttcttgatggcgtagtccgaggagcacgagcattcatcctgtcgagcaatttgcattgccaactgataagcacttcttaccgaaaaacgaccaagccgatcaggaaaccaaacaacaaaatcctcctcttggcgggaggatatcttgatctttacaatttcttcaacatccaccgggaggaagattgcagaaaccaagttctcgtcccaagaaccatccggtttcaggatgtcagaaacccactttaatctattgttccttttcattgtgattggccggcgagacatgttcctgggaatccagggatcccgccacaaccggatagaacccccatttcccactctccagataatccccttctttaggagttccaggccgtactcgattgctttctagcctggcgaagcattgcccgtaaagctagtgtcagtgagactaccacatggataatacttcgctttgagaattcttccacacagtgaatctggattatcgatgagcctccaagcctgacgtgcaaggagtgcctgattgaacaatctgaagtccctaaaacccaagccaccgctatgttttggtttagttatgattatataaaaaaatatacacatacacaccacaacacacgtacatcacactcactagccacatgcgcgttgcgcgactctgattacttgcaccgtcacatgtgccaaagaggtaaaaggaatatccacataacagtgtgagatagtataggataaatattgatctcaaaatacagcttacagagcttttgatttttttttattaatgctgacaacaaattaa

SEQ ID NO: 8882 - DNA, 29909 bp, Oryza sativa
cctgaggaaactgatgtgcaaaaacaagcgtcatcagagcatgaaccataaaatggccataattcgaagtaataggacagtaaaccgttcacaggtttgtggggggtacatactacataattcaaactttaaaaaacagattctatctccagaaagattatcattgcctatttcagtagctgtatttgtgaacaaaagtaaaggacagacaatctacaagacatggtaggcttcagcaggctagcatacaacataagcacataaattattgtatgaatttatgatctcgactggctataacatatattctaattcaaaaaatataatcattatcctcaaacctaaaagattgtatacataaaacaaataaaataaactggacacacactgtacatatgatttttaacaaaaacagattcatgcttataggaacataaatagaccaattcctaaagaaatatcaaccacagattggtcaataggtcaagactattaaccttcttggtaagtctttgcttggtcagaatggatatggatgaatggttacgttgaggatagcgacgtagtgcactgttcattttacaaatgtaattccaaatgcccttggcaaatgccagttttgccatctctatgttcatgccgttgtcttcatgatgcagcactgtaattcggcatgcatcccttccagggactgtaaagtaacataaagcatataagcaacatcaaatttaaaagtagttgaacatatatgagatacatccccagaaaataacaatttatagatgccttttgatcataattataacaaagaaaattgagagtcgagataagctagcaaaaatggcatgtcataatggctcaactttcagttgcatattcaaggtcataaagaaaattgatggcaaggagaagaaatgtgtgacaatggtatttattcttcaaaaataaacacttaaaagaatatttgttttattttcagttgatacacagcctgcttatagcttcagtagaactcttcccattctgtttggttaacaagtacaacagaactattagtgtattaactcatggatgcagaaacaaaaattacaagcctttcattcttatcagctaacaaattcatccaactgcatttcaatctaaatattaaagtataaaatatatactgtagatactagaggctggtaaagcattaccaaacaattagatcatttgaagttattctatgcgtattttttagaaattacatcgacgcaatacataccactgaaacaagataggtcattctaaactcaataaggaccgcaaaaagaaggccttctatgaatattagagttgacttacttttcctaatgcaccatcctgatctcaaaagttgcactcgaacaaatttccgctgtcttggtgcaacaggatgctcacattcctgtccaggttaacaaattggcaacaacagaacaaattgtaaaaaatgactgagtggtcaaagaaaataagataatggggataaggttaatgtcatcaaaattgcatatgaaatactcgtgtgaaattggtgagttcattctaaggttgtatattcaattagatttcaactgattttgtattttctcaaattgggcgtgtacagtgcattatccctagaatttgtgtattctcggctatatcagtggtgttttaggctgtttgtttacaatgcagaatgcaggaattctacagggagcagtttacttcccacaataggtgaaattcccacatcctaaacaggtccttagttcatttaaaaatgtcaagcataggatcaaaaccaattcaacttgaatttcatattagaattgaagatgtagttaggacacaatcaacaattgtggcatcattggtttcttctgcaactgactccatgagcattaccgaaagcttagaccttatataagtacattactgaacgaataatctacaatgtttacattactgcataagtacaaaagccaaaacaatgacaccaaagtatatcacacttttacctcgcaaaaaaaatatcgcttttaaacagttgagaatttaatgacgagaaaggatggagagagagatgtgactaaccttcaccaaacagtagaaagacttgtcatttccttcccaaactcgccatgccaatatgtactcccttggtgttaagagcggaaacttcttgattgtacgccctatctctattccactattttcatcaaactgtagctgctcatgctttatcacagtgttatcccactccattctatactcattatccatgtaaaagtccctcaatagctctgttgagcatctctcatatgttgtcacactaagatatctaggagggccttcctgcataggggaatataactgttacataaagaaactgaattgttaaacttgagcaagcaaatagaatcttgggaattgtgatgttcccaaaaatgtaatgggtcaaaggacatcatggaaatagcatcacaaaatgaaaccaggcatcaaaatccaatcatggcagaacccagcgaaaattcctaaaccctaggtaacttcacgtagactgcatcagctgatcagtaattaatcccccaactattttgaattctaaagtattaaggctttgtttgcaaaagctggttcccaactccatacttacgttttccacgcgcacgcttttcaaactgataaacagtgtgttttttacaaaaaaattctatacgaaagttgcttcaaaaatcatattgatccatttttgaacaaaaaaattaacaaatacttaattaatcacgtgctaatggaccgctccgtgttccgtttttactgtttgggttgggaacatgttcttgcaaacagagcctaaatagctttagtttcttttgtcaattcttaaccaaaaaaatcatgatcaagtacctagagcacacataaaccaatatcaataattctagtgtggttctaagatctcacccacagagttggcatgctcccaccgtcccataaaaatttaagcccattaggggaatagaccaagggatattgagaaggtgataccaaaattagctccaaacagtgatatcaaatgacaccctacaactacgcatccacttttaaagcattaaggcagggtggatggggttgaattattctaatacctacaatcttaattttctcgatcgacttgtactcttgcactatgaagtatgaactacccatacagtaagcattagttgtggcctttcgcagctagtaaatcgcatggacacaagtaggcagagtaaattcacaatccgccttacgataagaagcagatcattagaacatttccattggccagcaacaatataaaacaataaaacatttccagtgacccgcaacaatataaaacaagatcaatggattcaacaagaacaggaggagatagagctaccatgggcttgtcgcaccacaccctgtaggagacgtcatcgttccctttggcgaccacctgctgccacccctccctctccggctcacgcgcggccaccccgaggttgcccaccagctcccgcagatcgccctccgtcacaaggccatccatcctgcgaaatccacacccccacggagcaaaccctgatcaaatcacattctcgctcaaaaaaaaaaaaccccgcgcgagagggccaaggagcggaggggaccaaaccctgcggcggagcctggggcggagtccgcggtgacgacggcggcggcggcggcggaggaggaggagacggcgtcagcaggtcggaggcggcggcggaggcggaggcggcggaggaggaggacggagaggtgggaggcgaggagcaggaggagcgccgcggcggtggcccacccgccgccgcgggcgacgggccgccagagctcggcgccgccgccgaggaggaggagccgcggggcggcggcctccggcggcggcggcacggcgcgccccgcggccatcggcgtggaatccgtctcccccgccatgttagccctgcgtgcgtgtgaaccgcgttgatccgcgagcgaccgccgcgggcgctttgttgggctgcggaggagggttggttcctttcgtggcgggggagaaagcgaggaaaaaggagacgatggatgggcgagagaaaaaaaaaagaaaaagaaaaagaggaggaggcgaagcgatggaaccgaagaaaatgggggcatttggaatttctgggagtgtgggcagcgacgtaattataggataatgctcactatttctgtgagcagtgtttttctcgcgtctgggatgtttctctaaaaagaggtaatggtgtagattgatttagtggaagttttcaaaagatatacatgggccgggaatttttagttgtcaattatacgtatattcattcgtgatcattatcctttgcttatgaaattatggcgtgctacaagctcttgggatcatccatcgtagtcaagcttttaaaatagtttctgaatttctggatttttcactttttggtcctttgaaaaaacttatttcgcaaatagatccctggaaaaacttatcccagaaatgatcctttttggggcgccagagtggctggcgccgtcgtccaattagaaggcgccagccgtccccctgccgacgtggcggggcgatgctgaggtggctagggggagcacgccatagtggctggcgcccctcccccccgaattttttttatttttcttttatttttttttcacgcttagggacacataagaaccaaccatagaaaaaatgaactcaaatggacataatatgtgacttgtagaattttttttctcctctcatctctctccgaactagtacagaggagagagatgtgcaaatttttttattattatttttttgatatttttttcacacttagaaactcacaagaaccaaccatataaaaaataaacttaaacggacgaaatatgtggcctgtggaattttcgaaagctttaccgaaaaacttctctcctcaaaaacacaatcttgcaagcggaattcagaggttttaatatcgccaaacccggcgaagccatggagaatcggatgtaactttttctgtagatgtccgtgaatatattatttgcctgattccgagtccatatgagaaagttacgcctattttaataaatgacatattttgtctgttccggtagagttttggaaaattctacaagtcacatattttgtccatttgagtttattttttatatggttggttcctatgttctcctaagtgtgaaaaaatatcaaataaatgaaataaaaataaaaaaaattgtatctttttgtactgtttaacttatggctatcatttcatttggctatattttgaattagattaagtaatttcatatagtgatagagtgcattatgtgtaacatgctgatcaaaggatattactaaaggagttatgcaaagggttttactaaaggagttatagtctaattttagtgaaggtgcaaagtagactaagtggtatgctagctattttcagacttagctaagtggtagttcgagtttatattttttttatggttggttgtatcatgatcctaagtgtgaaaaaatatccgaaaaaataaaacaaaaatgacactgttgcaactacatacagagaaacagggatggaggcgaggggttggggggggggcggcgccagcatggctggcgccctcttcctgccacgtcggttcgcgagtgccacggtggcaggaggacggcgccagccactctggcgtcccaaaaaggaccatttgtggaataagttttttcagaggtctatttgtgaaataagtttttcaaaagggggacggcgccaaccactctggcgtcccaaaaaggaccatttctagaataagttttttcagaggtctatttgtgaaataagtttttcaaaagagggacggcgccaaccactctggcgtcccaaaaaggaccatttctggaataagttttttcagaggtctatttgcgaaataagtttttcaaaaggaccaaaatgtgaaaaatccagttctaaagttacttgctggtgatattttgttatgtacttaaaaaatggttttatttgttagatgtgatgggactaactatttatggaagagttatgataacgcttgtatgtaagaggacgttagagttatgataacgcttgtatgtaagaggatgttttctaaatggttggatcaactttatgcttacatgtgttgaggagccatatcattgtagaatgtaatagcatgatttttcatgcaccttgtttcaagtaaacaaaccaatcaatgaaatctaaaccccaaatccttaatagcgggagaataatgtcgttctctgtagtaccgtgtctataatagctattgctgatatttaagacctacccgcaggtgtagttgatgtttgatttactgttatcgagatttggcattagaaattttgataagtttttatagtcacccctaaaatattatatctattttttctatgaaaaacgtacaagcgctaggaacccataacatagtagtaaaggcatgtcacaaagttgtaaaaacctattcgtactaatgaagataaagattaaataaggccatacatgataagaaagttattagtgtatgattaattaagttttaattattataaacttaaaaattaaatttatttaatattttagagtaacttcaatatagaaaatttttgcacggaacatatcgctcagcaattagaaaagcttggtaatagaaagcatgcatctctgttagaaaagaacacggcctaaatccagtccaatttttcatcccactatcataggatagtggcccaataggtccactttggcagtaaaaacgtcccaggctcccagcccatcacggcctagtatcatgcccgaagggagaaggaaaaaagttcacctcaggttcctcagtttactgccgagttacaaaatcatccctaaaagaaaaaaaaaagaaagatataacgccttccttgccttacaaaatcagatcattttgagttctaagacagtattgcttccatttttaggtgacatggtggctgaatcagtatggtacccatatgtcatactcacaaaaaaaaatcctcttcatgagtccccaatctctcccgctccacccaccatccacagcatgagtccgcacaagcgggcatgctcggcactggccctgtcggtgttgcgggagacgaggcgccatggagaagataacgccaacagcgggtggaggcggcgaagcccgtcttctgagaagctatgtcgagctccattagtatatgttgtgtctagctcatggtgtcgttctattgcgcactcagcctggtgccgcccgacagcgatgccggcaccaggtgacagctcgccgatgcgtcaacctcacagccagcgatcttgaggtctctatagcacgagacgaacatatggtagcagtagtcggacttgaagcgctcgccgtcagtggcccaatcagaggcatctcacatctagcggtcggggaagatctggccaccttgggtgacgagtgggtagtgatggacggcaatacaaattgacttatgaaatgaatacgaagacgacgagtacttacgtagaaggtggtgttgacgccggtggtgtagctggaggggaccttgattggagaagctcccttcttgttcgccttgccgatgccgttgttgggttcgtgggggcaaggaggggccctcgctgctcctcctcaagatgggtgccactctgcactggagctcgacagagcttctccgaagacgggcttcgccgcctccgtggctccgcctgcccctggccttctcctctcgatggcgccttgtatctcatgacaccaatggggctggcgccaagcacacccgtcctctcgcttcaccttgccaccctgagcctcgcctaccatcttgtctgccttgttgacgttgtcgttagggtccgtgggggtagggagggcactcgtcgacggttgtggcccgctcgtccaagtctagtgccccaacaacaagcacgattgcgactgctatgtcacctactgtgacatcactacccaacagagcgccctatttgtgcctggagcctggtacagcttcctcaccgcgccgccagcgctcctcggccacctcattggcaaccactcccggccctctcaggagattacctactgcgccatccactcgctcatcatgtttgcgtcggagccgacgtggcgacacctgttgctggttgtgcgtggggacggcgatggctacgacaagcgccatgtgttcctcctcgccatggcacctaatctcccgcaacatcgactgggccggcgccaaggacacccgttgagtgagggagagagtgaggagaaaaggcaatgattttttgtgagtatgataggtgggtttcacattgactcagccaccacgtcacctaaaatcgggaacagtactaatttaggacccaaagtgatccggttttataagataagggatatgttatagagtattttttgggttcaaggatgattttgtagctcgtccacagaatgaggggccttaagtgcaccttttccaagggaaaaccccttccagcgcgaagaaaccaaccaattcaatccaggcccatcaaagcccaaatccatcaaccctaactccttcaagcacaacctccaccgtcacagaccgccggcgccgttcgactcttcgacctccacgccgacgtcgcgctgcgcctgccacctttatcttgaaccgcgacgtcgttgtccgcccctcccgcgccggcgaggcgaccgagccccctcccctccttccctgcctcgtgccactagcgccgcccttcgccgccgccgccgccgccgcccgcgagggagacgcgagaaggatgagggtgaagaggcggtccaagaaccgcaaggtggtcaggttctacgccacctgcttcggcttccgcgagccctacagggtgctcgtcgacggcaccttcgtccaccacctcctcagtcacagcctcctccccgccgacgacgccctccagtccctcctctccgcctccaggccccctcccctcttcacctccaagtgcgtcctcgccgagctcaggcgcctcggcaagtcccacgccgacgccttcgacgccgccgccctgctcgccacggccaagtaagtagtagcacacttctacttctaacgatggtttttttttttctcttatgaggcaatgagggttttgttccattggaaatttttgtttgtgggttcaggtgtgagcatgacaaagtagtcagtgcagtggattgtgttctgtcactgataggtgaaaagaatcccgaacacttctttgttgccacccaggattctgatctccgtgcaaagctacgggaggtatggaaattcactaccctttcgtgctcgtgccaacacgctgtttcagagtaatttaagaattatcaccttaattatgttatgcaaaagcatctggacagggagtcagtggcgggcccaggatttagaacttgtgtattcgaaataggagtagggtaaaaaaatttcctacacccaagagcctaataaatgatgtatataatataacacaccagtaattatataatatatagcatatataacacaaaatacacataagttcgtatattgatataattttataatatatagcacatatgtaagtactaattggatgaagtacacacaaaagaatagaaaatggtaaaatgataagaaatctttcaatttagagatgaacttttcaattcttgatattttgaaaatggtaaaatgatatgtaatcttacaaatcctacttactattcccctacatgcgcctaactagttacttaaatcaagtctgcaagttagcaattatgatgaatcaacttccaagtactcagtgaacaattagtagaatactagaaaagtagaagtgcagaacaaaaaatgaaatcagtgaagtactaacatcccaggctcccaaatcccagcgtccctgcctcttggtccatgcgagctgcgatgctgcctgcctggtgcctacgtcgtcagctcgccaatgcggcaccgacaccacgagcctgttcggttgccccgcgctgccgtcgccgtcttgccgccacgccatgcctacgcttgcgcccgagcatcgccgctgcgtgtttggccacttgcgcgcccgcgccaccgccgtccagccaccggccacccaacgtccgcgaggctgtgcgcctgcgccgaccgcccgtcggctagggttaggggagactgagggaatgggatgtgtgagattgatgggtgaggctggaagtgggtaggggagaggagagctggagagagggagggaagtggggaatttgggcccaatacatttgggctaatgggtgaatgaggagggaggatgaagcaagcccaagaaaactagtttgcttgcttattgggtatttgaggctcttttttatttgtttgaattcatatacgaaatatatagtatatatacctattttttgtgtaaaattcttgggcatacatctgaatacccttgaatcatagctgcgcccgcccctgacagggacagtcagtggcccggtttagttggcaaaaatttttgttttggggtgtcacatcggatatacggacacacatttgaagtattaaacattgtctaatgacaaaacaaattacagattctgccaggaaactgcgagacgaatttattaagcctaattaatctgtcattagcaaatgtttactgtagcaccacattgtcaaatcatggcgcaattaggcttaaaagattcgtctcgcaatttacacgcaaactgtgtaattggttttttttcccacatttaatactccatgcatgtgtccaaacattcgatgtgataggtgaaaattttttgttttgggaactaaacagggccaaacttcatcacgtttgaccaagtttttaaaaaatacatagcaatgtcttcaataccaaattagtttcattaaatccacatttgaatatatattttttgtagtatatctgttttatgttggaagtactgcaacttttttctataaagttgatcaaacataaagaagtttgacttaggacaaacccaaaacgccttacactatggaacggagggtgcacaataatgtacatgttgccattacatattctcttgaatcagtttatgtgttcatgtgtgttttgactggatgcaggttcctggtgttcctgtgatatatggtctgaagagctccttgttcattgaacaaccctctgtgcagcaacgtaaatttgctcagttggacgaggagaagcgtctgcatatgggtaaatcagaatatcagaagctactgaaggttccatcggatggaaaggcggctgccagtgaaaacgcaagtgatgatgaaaagaacagaaggcctatcagttctcttgtagaaaatgcacttggggtggccgacaaaagcaaatttaagaagaaaagaccaaaggttaatattttctgttattttcttctggcttctgatgtattagatgtatacgcaagcgcaacaatacgtatgatctagttggcatcatcagccttactccatagtcaatcctattttcgataggaccgcttgacaattgaatccaatttttcccattatttaactatccataatagtgtggaaagaaagtttgctacaacagttccgcttccgtaagtaatttttattgcttgtcatttctgcagggaccaaacccactctcctgtaagaaaaagaaaccaaagccccaattgtcagctgctcaaaatcaggtaattttcattttatatcactgttgtttttctctcagtagttgtacgtaataatacctaaaactgttactttcagattaacatgcccattattagtatctattatgttgttggaaaagcatgtctagaagagctgtttgctgtcgatgcaacacgaggactgatgagaacatgtgtcctacaggggcccaaagctgatggggaggcaaagcgaaagagagttaggaagcggaagagaagccacaaagatagcaagcaaacggaaacaatgagctaagaaagatgagctgcaaagttaagaaactctcgctgcatatccagaggcagagctaggtggcacaatgttttgaagatagaaatcatactgatctcatggtgtgccactcattgagtcggctgcgttctttgaattgtaatgcttgattgttcacagatatttatgatagatccgtataggatgtatctggatgtcttcttgtagcagttgatgcaacactgtctatcaaatggaattcatggtgctactgctaatctgatagaatttcctattgggttcaaatcctgtgaacttcctccatttttcctttaaaaaattttccaaatgttttcccctgtcacaattctcggctatgcatattacaggccacaggatgagctggcgggctgctctgctcccaggaatagtctaccaaggatgctgctccagcgagtgccatcagttcatcaactcgtcaaattgatgctgatgtctgaacagttgcgaactcctcaagatctgattcgtcagagcgcccttgtccatcggccatcgctcacttcattaagttaattgtcctttctgtggtacagttttgcttgtgaatcgtttaccttgattctttcctctcattttctgtaccgcttgaagagttctttgagctagtagaaaagttgctttggtttgacatccgataatctagatgttccaaaagattagatttctgaatctgatggatgttttgctttcttttctttttttacatctccactgctattttatcaccagaagtcaatctgactctgctgcatcctagccacttcatggaagaactacccacggtccacaagctcaagattcatccaatccaaatgtacatttgagcatagagctgggaagaaaaggtcgtactccctccgtcctaaatataaggaattttgggtggatatgacacatcgaaaatcccttgtattttaggacggagggagtatagcataagctcattagaacgtcttgccagcgatgtattaaccatatcatgatatgaacattggaaaaaaaaaatctttctgtttcaagtcttttctccgcctctgcaatacagttggatggaacttgtttgatcctcaagaagttgaggccaacacaggattcgttgaacttcaaaatgatggcatgtcacatgtgtacttcacctcacattcgtctctgttaaggttaacattgaactccaaacatctgtcttgtgtgatcttggatctataatgcagacattcttctacagaagttaacaactcctcttcgagctatctttttattattatggaattattataccagtagattgggtagaacattagcggtaaattttactccctccgtcccctaatataagggattttgacattctgtttgcactatttaactactcgtcttattttaaaaaattgtgtaaatataaaaaaagaaaagttgtgctgaaagtactttgaataataaagtaagtcacaattaaaataaataataattctaaatttttttaataagacgaatggttaaacaatgcaaaataaaatatcaaaatcctttatattaggggacggagggagtatctttagttagttgccctctaaaattctatggacttctcattggtatgtgttgcttgaaactctattctaaaatataacaacttctgactaatttattcagatagatagctagaaattactatattttgaaaccgatgtatatactactaatgcatacttgcatatagtatccgcgtcccattttacaattagttgcattgaatttgaagaaaaaaatgtacacgatgggacatattagaattagttttcccctgtccagcttccgccaaggccgaggccttttgcaaaccctgcaatctccgcgaggtacaggtcgtccatcccgccgccgtagatcgccgggaagaacagccagaacgccgtgccggcgacgaaacccagtacgagcggcgcggccaccgcgcgaggcagctgcggcctcgcctcgcgcttgtgctggcgcgcgcaccaccaccgctcggcgcagacgcacacgccgtggagcgcgaagaacgccgtgacgcgccccgtgggagcccgggaggtcaggtagagtatcaccacctcgtgcatcagccccgacacgaggaacgcggcgagcacgccggccgccgggtcgccggagcgcgccctgacggggtcgtagacggcggcgcggagcaccgccgacgccacgaggttccaccgccggccccagaagtcccgcagcgaggccgacaggtacggccggtcgaactgcggctccatctccatgcccagcgccacgcccgccgcgccgagggccggcaggacgacgtcgaggaagcagtacatgaagacggcgttgagggagaacgccgcgtagcggtgcatctcctccttggcgtggaggacgcggacgatggccgccatggcgccgaccttgatggcggacgagacgacgaacttgaacgtagctgcaggtgcagctggcggtggcctcgacgccgacgcgcctgctgctgccgcggcggcgtcgacgagcttgacggggagcgcggcagtgaagacgaacgggagagggcggagcgccgggtggagcgggccgtggccgaaggcgaggaggaggagcttgaactcgccgagccagacgaagacgaaggcggagaagccgcggtagctgtagtacgggagggcgagagggaggacggggaggagtgccatcgccgggaggagcgcggcgaggcggcgggggccagggccggtcagggaggcggcgaggcgggcgtacagcatggcgacggtggtcgccagcggcacggcggcggcggcggcgtggcgcatgacggcgtgtcgtgtactcgtgtcgggggcctctgtgcttggatagtcgggtgcgaggttttctgcaggacaaactcgaaataagaacagagcatgcacgcacatgtgtactgttcctagtgcactggagtagtgccattaatttgtcagtacgagggtagagttttcacaattgaagtcttctccaaaatactccatccgcaccgataatacttgtcgttttaaacaaggtgagatcaaactttagaatttttattataaatcatttttaaaatatttatctttcaaatatgataactacatgtatagattagtcttaaaaaatattttaataaaattatatagctgttaacacttttatatatattataataaaaaataatggtcaatgttagttttcaagaccgtctctagtccaaaacgataagtattatcaacccggaagaagtagttttgaagaaattactggcactaattcttccgaacagtgctagtgctacaacatctgtcgttatgtgcatattcattagttcgatccatgccattgcaaatgtggttattaaaaaaaaagtcattacaattcttcaatttctaagcgtgcaacttaaattttacgaaattggaaccatgccatcaccgtcatattttctatcttcttcccgtttacatgtggggtgctgatatttcttaacgacattactataaatatgaatttccagcaatagcgctagaaatggtcctgctatatatacagttacagaaggaatccgcaagcgcacagatatatcattgtagtattttatccgggagtattccaaggtatcgtatttattaggcaaaatttgctacgtgatatccaaattttgtataattggctgagggacaccgtaagatcgtgccattgccaaaagacaccataaaaatgatgtaattgtctgtagaacactagatacattattttataatttttaagaaaaagcggagagagaaatttaaaaaagacaagtttgctcctggcttggcctgagcttaagttgggactttctgcttctgctcaaagaaacaaagctttggtttagtgactcgcatgtattcgatcaacaaaagatgaacaaatacaaatcaatagagtctaacaagaacgtgtcgacatatgtgatgtaccaggaagaccgtgctttgcggatgaacaaatacaaatcaataccggagcttcttgcggatgttgccctacgtagttgttgttgtcttgctcgtccgaccacccgccgacgacaacaactccagcaacatccgctcaccgtagatctcctccacacactccctctttagcaccacgcccacggacaacaatgtgtacacgctatgcgtagggccacggtcgccgtcgcagctgcgtccctcgttttgtcgagcgtgcaacgatggctgcagcgacagcaatacggccaccggtagccaccatggtgtgccgtcgcgttggtcgttcctcctccttggccgctgccaagggacaggcccagcgccaggctagcattgctcaggtggccgacgtccccaaagcgggccgcccatagcagcgggccgctgcctgcttgcacagctactcgccgccgccacctcctcttagctaggggagaaagagcttgtcattttaaaattctctctccactttgtcatggaaattattaaataatgtgtttggtgtcctacagacaattacactattttttatgtcctttagcagtgacacaattttgtggtgtcccacagccaattacacaaattttcaatgtcctgaaacaatttagccttatttatttaatcccaagggaagattgtaaaaaagaactatgctaataatgtatatatgccacttgtatgatcagagtctaaacaggggttaatataatcataagggtagagtggcacaaagcaaagaactcatatctctcattaatcaatcctacgctatgtggaagaagaaataaaaaagcaattaattcctatgcttctagtatacgttccatcaattagtttatatccgctagtatacagttgtatggccaataccctctaacaatgccctcctggtgttttgagagaccatcctgggttgccgagttccttacgacaacttatcatggctgtccaaccgggactaaatacggaggagtaccctccccaggaatttatcttaggaatatatactaacatggaggaatacccgtactaaactttcaccatcagcggcccacctctactgtcccgcagcatatatgcctagataatgatacttaataatctaaacaccacgtctacattattaaatactactctatatcccctaggatgacatagagcaaccgaataatggaacattaaacccacaccattgcacctctctggtaggctagctacacaactataccgatacagatataaagtaaagtcgatacttacataaactaaagcaccaagaatatataaatatatatagaataatattccattaattccaaaagtcttacaaaagaataaagaaaagctactaccgccatactcgaattcccccctaaagactccgaggacttcaagagctattccactctactccacttagcactagaatactaaactaaagtatagatagaaatgttgagctttcttaagtgtgttttgaagtgtgaatgagctcctccttaaataggcaggtatgatggttgtagcctatgcgaaatgtccaatatgccctgaaaccgtcaatccgtcattggggagcgatcaggagcgtccatgtgtaaggccagtcgaagctagcgtcaccagggttcggccatacttgggccggcccaacaggcctccaaactactctagggcactgacaagtgggtccctatgatggttgtggcagttatgacggtttcgaggacagttacacctgacatgtggccccatcttatccttaagcttgcttaaggatgagttctcctccattttatttgcttaatcactgcaaacaaataattattctaaaataaatatgcattgcaagtatagctagctcccctttattttagttatattgatggtcaaaatttatctataacgaccatcaacatgaggcccaccagtcatattcatcttcttcctccattcttccctcctcttttttcccatctctctccagtacttcttcacctcctccccaccaatccatcctctccccgccaccaccggtgccggcaccgcgccagagcgcgcggcccacgttggccgcgcagctgctgcagcagcacagcagtgcagtagcggcagtagcaactacagcagcatagaggagtagcggcagcggagcagcagtgccagcaacagcggagtagcagcagcagccgcgcgcgcggagcgggagcggcgacagcagcggaaccctgcggcagcatccgacgggggcgacggcacgagaacacatttggccaccgacctcgccacctcctagccaccggagcactggcgccccgctcctctcttccctctgctctacctagcaagaaagaaggaaaaaagagaataggggaggatggaggaaaatgaatctgaccggtgggcccacgtatagatggggaggaagatgaaaaatgtgacggcgatggtatggttctaattttgtaaaatttaagtgacacgtttacgaatagacgaattataatggcttttttttaatagccacatttacaatggtatgaatcgaattaactctagatttaaatgggatgtttcacggtgttgctagtccgtacggagtattgtttctcttaaaggatggggatgtttcacggtgttgctagtctgtacggagtattgtttctcttaaaggatgaatggataaatgtttacgttattttatatttctactattataaaaattaaagatttttttgccggtatttcggtacatcatccgtgttttagtcagtttttaagttcgttcgcttttgaaaatgcatatccatgtttgagttggatttaaaactcgtttgcctttgaaaatacaaaagaagtcgtataagaaatctctttaaaaaaatcattctagcttgagatgaaatacggactcctaattgcagtttatgattttctaaaagaaatattcaagcacagtgaattttaccctagctaaaccgtataaaaataataaaattaaaataacatttatcgttgcaacgcacgggcattttcttatatataaatttaatagactattcttttattttttttgaactttataataattaattaattcatttatacccttgattacttgtatcacctcattcaattaaatatttagtcattcagaaaaaaaacacatgcactgggcgaggtagaaagaaatagagggtgccacttacttaatttattctacactttagatcaagtttaaactgatgcgggtatctaagtttgtattagagagtgcacacatggtgaaaatgtatgagatatagctcaattttattttgatcgggttcctgggcactcccctcccatactctacctccgctagtgcatatgaatgcattaaaaccaccctggagttgccgcgctgaaagtgttttggaccgacgtgttcgcacgcggtgctatccacgtcactccagcgcgctgggaggcgggcggatttcgcgtccgcacgcgccgtccgattagcttgagtggacgggcaggatgatgagggtggaagttttgcaaaaaaaaaaaaaaaaaaaacccttcacttctttgtaacttttgttaggttaaatacatacggtcttacgttttaatttttaacgtttagaccctctataaccaggaaaactttatgcaaagaaaagaaaaacatgaaaataggtccgcactctgaaaaacaaaaggaggctcttttgaaaaatataacatccccgatcggccaatcccctccccaccgaaaccctagccagccactgctcccaccaggggcggattcaccattggggcttgttggggcgcaagcccgagcttcagcttccagcctcaagtgttctcccaacaagctcaaagctagtataaatcactgggacagtcagagtatatatattggagcctgcagcgactagagaagaagaaaactcgcctgtagctatgtggtgtgattagtgctttgtctgtcatctagtgtttaataattgctaaatgctataccaagcccaatacaattaccgaaccggtgaggaaaagacaagacagatattaccatctaccaggagctcttggtttgcattgttcagggcacatggatggtctaattcaactgggcatacatgttttttccaaattaatgaaacatggatttctaagttcataattttgaaatatgatttccattactgagctatatatttttagccctatgcattagcaccatcttctatttcaatcttggggcactgctcccacgctgtccccccctctccctgccgccacctcctccacctccttcccccgctgtgatggctcgcggctcgcgcctcgccccgccgcaactccccgccaagcgacgcctctcactgatccgtcccctgccaccttcctcctcgatcccctccctaccacatgcttggtagcttcctcatcagccgccgccatccatctgttgccgctggtggactggcgctcaattcggcgggatttggtggtggctgcctgcattgagtggatttggggaacgacggctcctgtggcggcataagcggcggaaagcaggtgcggtggcatgagctagggctggagtcgatgggccactaatctggtggcagcttaacaccaccccattcacgagatcaaagcggtggttggtctgagggaaatgggcggtccgggcagatgtgcagacatgctctgtgtcgaaacatgaattcggcaataataaaagggggtagcgcacgagacctaaaagtggatggatgtagagacaaggatttagacaggttcaggccctctcaatgagaggtaataccctactcctgtttggggatttgaatccgccgggtgtagtatagatctgacgatctagttgtgtctcatgcccctagagggcctcctgcccaccttatatagggtggggggcaggattacaagatagaaaccttaaccaatacggtatcggtttcctaaatctactttacaatattatcaaaccaggactttaggccgttccataatatacaaggaaacgtaatacctaagtcatgattcgttacatattccatagatataaattatcccttataacccgtcggacaaccatgccgtgtgggtatggggtacccataatctccacagtagcccctgagaccttcacagtcgaaaagataatcttctctcgaaccagattactccaaagccaagtgcttcaatcatctttgccatggtcacccgagtactttaacaaatatgaagactgtggagggctgaaaaataaagtcagatgcattgactagatgcacctaatagatgtagcccccgactacgtggttagctgaacaaactaagcatatagtcaaggaataaataatccaaccaaccgagtggttttgataattgtaatcaaccaagtgacttgatatcaatatatagcatatgcggtgtgaatcccccaaataacatgatccaagtgatataccgactgctttgtaaaaattgatgcgagcaacctaaagttgactacatcattgaaaattcacatagcaaaacagctataaacaagcttgaatgatgtgaataaagaaattttcaaagtattaggcatacgccatgcacacactgctttaataaatgtgcttaagtccctaaaagacacatggtttcaccacacccggaaatatacggcatatgtggtgtaaaatccgagtaaataaactcataaaggatttaccaaccgcctgaaaaatgactaagatatataatcagcctaagccataatattggtcaataaaaatgcacacttacgtggcaaaaagcagtggtattgtatccaatcaattgctttataaacccaaatagcacattgactatataaaaaagtcagtaggacagctatgaaaaacttcactgctgggcaccttttaaaatgcattgtaccaactcctaaaaagttgagtaactgcggtataaaaggattttaaggtattgggcacttgatcacacgcactttggcctaagcaaaaaatgcctaagtccttaaaagaacgtgataggctacacctgaaaatatgggctgcagacatattaggcctaggccaaaaaatatgccttcgacaccctttaaaggatgacgcatgtaacatgctcccgagtaataaatcttccgggtgatatagaccaagtgtagctcatacgaatagcttctgatctgagtgattatcccttatgggatactcccaaatagatataataattgaatcccgactggcgcaagtattcggttgataacccttacggggaataataaatagtccagtctttgagcatagaaaatagacccatgatcatgaattcatgttgcatgtattcggaacaagtccaaattgaaggtatgatacttgtgtttgagctagtaagtccctaagcatatagcttgtccttctgtcgtagtcacaattgtccattgatggtagctgacgtagtgggcatagagacaagatgaccaatatagagataatattgcccaccagaggtggcaaaaatattggtagtagtgaagatagtgataccaatcaaaagtgatgaagttgcacagccgtagaggcgaagaaaccagtcggcagcagtcaggtcagccagcattgaagatgaaagcgcccaacgacagagttgtgcagccatggcagtgaaataatcagtcgataacaaacgaggtgcccggtgaagaagacaaagacgcccattagtagaggcataataagccatccgtgaaagcgaagacatcatgggcggaggcaagccggtggtgaagacgtagacgctcatcaatggcaatggcgaaatccatcaatcatgaagatgaagaaaatagtcagcgacagaaaacgcaaccgatgataatgatgattagcagcaacagagatgatcgaatatgatgacgaagttgcccatcaatagcagtagaataagctatgttgaagaggcttgacatgatgttgatgaagatgacgatgtcggtgatccagtcaatagctgtgtagcagccgatgataatgacgaaagacactcatcaacgtttacgtagtaggtcagccgtgaaggtgaaataataagtcggcaaagacataatcatccattagcaacaatggagatgacagagccgatgaagcagaggtgctggtgatgatgtcagtgacaataatccatcaaactgttgagaagatatcaaaactcgagtagtttccttgatgcgagcgtgtgcataacaaagatgatgcaatgccccttgatttacgaagatgactacagaacttagtgttatatctgttgcagatgcttcacttggaagagagtagatgttgttgtccaacttgttgaatatgagttaattggttgataactccaacctcccgaatatgtagattaaatctcaaacttgatacttgagaaatttgaagtagattgtggcagtatggagcatccaaaattgtcagtgaaataattgaagtagaacgtctgctccgaagcaaaaacgaagataatgactcctggagttgtaaatcctttatgagtttatttactcggattttacaccacatatgccatataatgacccggcaattttgagagtcttgtgtagcccccaactctttgattagttgggaaacaactgaacatagagtcgagaactatagcttcttgtcatcgagtagtcattgcttgagtgaagatatgtgttgaggatgtccgagtagaaatcttgaatattgaaacaccagttgttgtagtaaaataacacggcatcaaatctagtggtgcatgccgagatgtcgaggctcttgtagtcgtcgtggtttgtgaagtagcaaagcttgcgaagtagaggcaatagagtttgctggtgccgaagataataaaaatgaagtcgctccaccatgacgacaaagttgcatagccgtgatgaagtgaacacgagtcggcggcaacagaagcaaaccggtagcgaagatgcgtaattgtgaagataaaaacattagtcggcggcggcataaccagtcggcgatggaagaagtagaatgatgacgaaaacgaagacgtccttgaatggcagcaaaataggccaaccatgaaagtgaagacaccatgggcggtggcaaaggcaaaccggcgatgacgatgacaccagtcaatgttgatgaagacacgcagccgtggaggcgaacaagccagtcagcgtcagacaaggtggccagcaatgaagacgatgacgtccatcagtagtggtagcagcataaaccagtcgtagaggcgaggacaccagtcaacagcagacgacatgaccggcggtgaagatgataaggccaatcaacagtatcagaatcatgcagccatggaagtgaagaatccagtcggtagcagatgtagacagcttgtgttgaagatgatgacgcctattagcggtggcggcgacgcggccagccgtgaaggcgatagcaccagttggcgtcatacaaggcggccggtcagtgatgatgtggacgtccaacaacggcggcataatagaccagccttgcaggcggagacaccagtcggcggcggtgaaggcgagccggtcagtgaagacgtagacgcccaacaacggtggcataataggccagccgtgcaggcgaagacagcagtcggcagcggtaaaggcaagccggtcggtgaaggcatagatgcccaacaacggcggcataataggccagccgtgcaggcggtgacaccagtcggcggcggcgaagacaagccggtcggtgaagacgtagatgcccaacaacggcggcataataggccaaccgtgcaggcgaagacaccagtcggcggcggtgaaggcaagccggtcggtgaagacgtagatgcccaatacggcggcataataggctagtcgtgtaggcgaagacactagtcggtggcggcgaaggcaagccggcggtgaagatgtagatgcccaacaacggcggcataataggccagccgtgtaggcggtgacaacagtcgacggcggtgaagacaagccggcggtgaagatgtagacgcctaacaacggtggtgtgaccaaccaaccatataggcgaagacaccagtcggcggcgacgacggcaagccggtggtgatgttctgactgatccattcctagagcgtaagagataagcttaaagccatgaatcccttttatgcatatttggatctggatcctgcagaacaaacatataggatgagtagtatctgatataaatataatactcgaggaaaattcaagtattttaaaatgtttataaatatgtatttctcctcttgttaattttgatttccccgagcgaatgactccttacgtttaaacactctgcccgactagtcatagcccccaagcaccgggagtcggcctaagcacttccaaaacatgcatatgagtgacatgagttcgtcattaatggaacaaagtttcacgaatcagaatttactactcgggtacttttgcaattgttaagagcagaaaataaatttatcttatctctatgcttttgatttattccgaataatacttagcaccttgcgttactcggtccatccaacgagcccccgggtgataggaatcggcccaaaggcaactatccatcggcaaaccaaatggaaagcataggaagatagaactccataactcgataggcacttttgtactcagattatattgcaagcaatcaagataaatattataaaaattgtttaaaaaatatggtataacatatgtagccccgactcactagtcaacggcgaaccagttgacatagtgaggcagaggaaaaggaaaatatcatgtaaagaatgaaataaatgatgacttatctttgtaatattcccgttggtgatggcagaggtgaccaatgtgggaacaaagtcgtccatcaataacaatgaagacaccagtcggcggcgacgaaggcaagccggtgtagatgacgaggcccatcaacggcggcggagtccaccaaccgtataggcgaaaacactagtcagcgacggaagcaagccggcggtgaagacatagacgcccatcaatagcggcataacaggccaactatgaaggcgaaagcaccagttagcggcagacgtggcggtcgatcggtgaagatgacgatgacgcccatcaacggaggcggagtccaccatccgtatacgtgagaacaccagtcggtggtggcgaaagtgggccaatggtgaagttgtagacgcccaacgacggtggtgtgaccaaccaaccgtgtaggcgagaacaccagtcggcggcgaacgaggcggccggtcggtgaagacatagacgccaatcaacggcggcataataggccagccttgcaggcggaaacaccagtcggtggcggcgaaggcagccgcggccatcggtgaagactgatcccggcgaggtgccctagctgacagccaacatgaataggcagccatgccgaatatatagatgaacatactgtacatggcttgatgtattgcattgttcctaaaaaaattgcatggcatcgggtttggcccaattgatctgaacaaagatgaaaccaccaaagagagcaaaaactccgcctgtgtgtgcgcgtcgtcgaggccatggtaggtgcagatcattatggcaaacaaaaacggcaaaagtccggcggccgtgaccgacgctcggagagttatgcatgtgtgattgttgatgcatgcacgtgagatggaggcgactggcggcgatctgatgcggtggaggtcccctggtcgactcaatgcatgtatgcatcttagatagataaatcatttgactaatcaaattcctttcctggttgctgatgacgtggcagctcctgattgattgaccaaattgccatgcacgtttgcttgcacatgtatcagatggaaacatacacttgcatgattaatgtcttcgagtattgctgatcaaggaaataactcggcgacgaccgctctgatcgattggctccaagttcaggctgactccgatttggattagtaattgagtatcgctaggaaatttcacatcttcttaaaaaaaagctggcggatgagaattgatctgttgcattgatatcgccgaacagattgaaccagatgatgaacacaacatgccaactttcttcaataaaaccggtaaacatggcggcgatccaacgagatgaaagaagtcttaagccttcccgactgattttgcatctgaattacagaagcataaaattccaaactcgtggacgaggaaattgaaactcccgaagtgagaggcttggggtgaataccagggggtcaatctgtaattgaaagttaatctaacaataacattggttagattgaaacggcaaacccgatatcgatttgatcagaagattgcatcaatgacggcataatccatgaaactcgagggaggatgatgccagcgactcaggttgattccatcacacttcttgacagataactcggcgtagccctacctggcgcgccaactgtcgaaacatgaattcggcaataataaaagggggtagcgcacgagacctaaaagtggatggatgcagagacaaggatttagacaggttcaggccctctcaatgagaggtaataacctactcctgtttagggatttgaatccgccgggtgtagtatagatctgacgatctagttgtgtctcatgccccctagagggcctcctgcccaccttatatatggtggggggcaggattacaagatagaaaccttaaccaatacggtatcggtttcctaatctactttacaatattatcaaaccaggactttaggccgttccataatatacaaggaaacgtaatacccaagtcatgattcgttacatattccatagatataagttatcccctataacctgtcggataaccatgccgtgtgggtatggggtacccataatctccacactctgcaatgcttcacccgtgttctagctgttgctgttgcttttcatgttgacatcgttcttgccatcgaagacaacggatctggccaccggttgctgtcccggggagcttgtaatggaattaatgtcaatcagggcaatctaccgttctggcttggccttgtgctgctgtagaagacatggccatatgactggagcaactagagattggctgcctaccactgctgtgctgtttgctgtaacatttaaacaccaaacaagtaataatctactgattttgatttatctctgcatacgatattatttagtagttattgtttcttggatatcaaataggtacattattagcagcgaatagattgttgtgaggtcaaacatattagcaggtgcttggcttactatgcagtgtggcagggggtaatattgcagaggtaatgcacagaagagtaaacaatgatttctatttcttttcatgaaagccacctttggatgagcatagtatagagtatagttgtgtgttggttaccttgcctttaaggtgtttgttattcttcctatgagcacagagtatgaaactatcttgaagttatcaactagatatgcatggcctactgatatgcattggttgggtatgagatatgtggtccctggctttgaactattttactttaataattgtgttctttggctccccatcctgatctattttgctctatgcttctgttgtgcaatgtagctaaaaaaacatccagagaagagctttgcttaagagattctagatttagatactttagttatttaagatgtaagagttacttttattgtgttcttggctcaatgtgcagctatccagctgatcaatttattgtgatttcaagttatatgcaaaaaaaaaaaagaggagacatctgctttacagattctattgtagaaggcacatatatctgtatgggtatttggtgttaaattttattgtagggtactccctccgtttcacaatgtaagactttctagcattgctcacatacatataaatgttaatgaatctaaacacatacatttgtctagattcattaacatcttaatgaatgtggacaatgctagaaagtcttacattgtgaaacggaggaaatagttctcacatagatctgccattgtagtggtattggtccgaccgcaagaaaacaaaactacagatgtgtcgtgtatatgtttgattaatcatccatattctgactaaatttgaatgtagttcagttcttggcaattttcatgattaaagtattaaactggctataaattgcatttctgtgcaaagcatcagctgagtaggctataagaatgctaaggtatgcccatagttgagatattaattaagtcccccccccccccgccttttcatatgtactaacttcccagtttatttcatgtttgtgtatctgatatgatctgtgccataaaaaaaatgtgcattacaatgtccttattcacaatgtatgaaaatacttaccaaatctttgtgtatttattgctgaagtggttttagcacaaaatgtccttattcatacaatgtgttaaagatgcttcattatctaacaaatgcttctttttttcagataatttggtggttaaaacttttggtggaaataggttattaagggcttgtttggtttgataccaacttattgccttaccaaattcttggtaacttgaatagtagcat

SEQ ID NO: 8883 - DNA, 15571 bp, Oryza sativa
aaataacgtatataccctattcaatggagtgatgttcggtgacgtgaatcgatgaattatgatgcatttctgatatgtatttagctccatgataccttcttaggtttcgctcagtaatgttagaccaatcttaagactcatcactgtttttttgagtccatctcctcatttcttatcatgtcagatgcacggcattggcattttaatttgttgcaataattaggttgtagcccgtgcgtttactgtcatcatgacttcttttttttgcccgtgcgtttactgtcatcatgacttttttttttctttttgttgtttgcctgatggtagggcgcgcgaagcacgccttattatctactcccccgttccaaaataagtgtagttttgtactattcatcttcaacgttcgaccgttcgtccatctcaaaataattactatttttattactattagatgataaaacatgaattatactttatgtatgactaatttttaaaaatattttataaattttttaaataaaacgaacggtcaaacgttggacacggattttcacggctgcacttattttgggacggaggtagtagtatgaatgcattcagacccaaaacacacacacacacgtatgaatagctttgtatcgtgcaaaatttcacatctccctgctttcggtctatttttcatataagcacagctagtgtgagtatttgataggttagattgcaaaagttcgtgctgtggtgcatccctagcagaatcaaggccttcctcaatgggtaacttcgactctatatggcatacctttgtacccttggcaaacacacccatcacaactcttcgaaaaaaatggtaattccaaaactttccactctcaaaactcaacaaaagctataaaggtcttaaaccgaacactacccaaacatcttctacggaaccaaagtttgctaagttttctctttttttaaaaaaaaaaccaaacaaacccataattcaaagcgattttgaatttttaaagtttgatttttaagaataatattagctagtctttgaattgttctcctagtgatcatgaaaaagagccagacaccaagacaaaaggagaaagacaatggaactaattctaaaacaaaagcttaaaaagaaaatcaaaactacctctaggagagtccctgttggcatcatactaaaatcaaagcctaaaataaaataaaaaatacctgaagattttagcctttcgatacagcttccatgtgtcaccagccgtctgattctaattgcttctaaactataccataaaggagaaagcaaaagagattgtcccggaataaacatcatactacttagtttcaaataaaaaaaaatcatactacttcgcacccaatggcttaacaatggagtttaagatgcatttcctccgttttcaaacaattcaaagagttctctcggattacacttggtgagttggaatcataccaaaatggttgggtataggcttgcatgtgacatgccactatgaaacttcacttttgtcagctacctcttccatatgtgacttcattttcttacaacagaaaaggcgggaataagaaaaaaaaaatcagtcatctgggaagccaaaaaacttgttaatcagcgatacaactggtttggcatcccctggcacataagggttgagagtctctatgtccatttcctggatcgtctctcctagtgtttgtgggcttgcacagaagaggtgtttccttgtagccagttcctctgctaactcactctgatgattgtccatcaaatcctcatttacaacaacaattagaggtttgccatgtcgcaacgtctcgaatatgcttcctgaacctgctagagctcaatctggttaattgcaatcagcattgacaactactccctcagtttcataatgtaagactttctagcattgcccacatttttatggatgttaatgaatctagaaacatatgaatgtgggcaatgctagaaagtcttacattatgaaatggaggaagtaacaaagatgcaaaattgatgatatacttgctaaaattcacagtatttatccagagcacatatcaaggcagcacagaatttatgtaacatttaatgaaatttgaccataacggcaggtagaaatattacaactctacctaacaatagcaagtatggtcagcttacttaaatattatgcttctttgtacgcgtcagataaatattgtgaagcgaagtaaaaatggcatgtttattagttcaaatgaactcaaatagcagtatgatctagaggtgaaaaaacataaattggttaacaaaaaagtgcttataatatcagaagatgttttgtaaataaaaatcgagcagccaatatggcgttaaaacagtacaagtgtagctattctcttcaggcgtcagccatttaaagacaccaattatgctcaatttgttggcacaaactaccaagtttagaaaggatttcatgtaatgcaccaaagcgttccacacgatataatactccactgcagcacttaagaaaaaaatgagatagcatatgccttaatcaagttcaaactattggcatgaagatctttaaacccagttttgtatataagcttatacggtaagggtgtacactcctcatgtccaacagaatagaattggccatgaagacagactttacacaaggtatgacctataaacaatgagagcatattcatggtgcagtggagtaatccttcaattgagaaaaccattatattgggtaaaaatgttatttgaatgaaatacatttcacctggtatgtcctataaacatgtacaattacctgcatgactgatgaccagggaagcatcccttatataatcagcaatgcttggcgaaaaagtgaaataatcaacttgaagagttccatctcctgagacctgtattcaaatatatcaaagtttctggctggtttcacttcactttcacaaccatcaacatggtgcttacaaatgtttcaggtagaacagaggaatcactagcagagtaaagcaattattatctgctaatataacataaattcatgccacatgttaggaacatcccctaatcattcaatgattggatatagtccctacccattcaacttagaaacattcactcgaaactggttatataaaactgaaaataagaaatgtgcaatccaaacagaactcttcacaagaaatcaaaccgcgcaacttctgttcatctgacaactcatcaagaattaaccccaagaacagaacacgcacacagacaaaaaaaaagcaccaaaagaagaattaacatgcagaacaagctggaattccgtgctggtaaagtggcaatttaaaaggaatgaaagagaaattcattgaccttagatggaacatatgtacctcggcccatttgaattattagatcagtataacctttttccagtagagcttctttgacttgcggggaatctactgccttgacaagagcatcaaaacacgtggtccctactgtgacaaacacagttcgtctttccctatctcccatttattctgaaacgagcactgtctgtacaataatgttttccttaatccgtaaagagaaaacagtattcaagagaaaggtgaaaaaatgcattatgctggcatgctgctatgccaggtgaaatttagagagagacagagagagagtaaatggtgtgccagaaataattaatcccattattccacagatactattatccttgatagttaggggcatctattaaaacaacaatagagagtttgacaaacgaaagggtttctgttccgatgcgaaaattagcacaaaaaatggggtaagaactggtaattctgtactaaaaacaagatgaacaattcagacactagcaggagcggatctagcgtgggaccgacaagggggttcaattgaagccccaaactacttgggggaacaaacaaactgttactagttattcagattaaggcaaatttctagaacagaatctatagggttcaacgcaaattcgagaagaagtgcgtgggaagagaccagagagagatgaggaagagggtgcgcgtagggtaacggatggatgctcaccaggatgcgggcggaagcaacaggacgaacgacggcgccagcgccgggcgcccctgctcgctcgcgggatggagatcggcgcaggcggcgcaggggcgagctcacgaggaggagacgacggaagtctatgccgagctgggggggatacatgggccgcacctttttagatagaatactacatgggcctcacgaacactttggacacatagcagtcccaaaattggaataagttcactgaaggtcctctagttgtcaccgagtctaaaattcgtctctaaaccacaataccagatataacacgtccctcaactcacaaaaccagtgcaaacaaggtcccaaggaagtttggactatggtttcgactgacatggtgtctacgtggtgttcacatagcgcttaaagtaaaaaaaaaacataaacataggacccacatgtcagtgattgtccagttaaaaataaaaaagatacagtgggacccacgccatcacccctctctttaccctcttctctcccttgcggttcaagcacagcgccatttgctgaggagcgcagatgggtgggtcccctctcctcttcctaaatctccccgtctcctcctccgcagttgccactacatgaatcctgtcgctggcctaggaaggtgccgtgccgatgatcttgccgcacttcactcacctacctccccacctccccatagaaaactagcagtattcacccagataggcatagcagaatatacatcaaagattatataatataaatgtgtgcagttatatctagaaatttctaatattaaaactataatttttatagaaaaatattacagaagaaatatcaaatgcatgcgaagttgttgtcgctggtttgtatggagcctgacaccacacgaaacattccctaagagcatcaccaatagttctcataaacatatcctaacaattataggatttcagatgaaaatcatgctccaacaatccatctgatcaattgcctaaaatttgaaaatctcatatctgtttttttttggctatccacaagtcgagaacacgcaaccactcccaatcgatggatcgcgtggataggagggggagcgccgatcatgcacgggaaggggggccaatcatatgaagaagagttcgaggtgagctcactttttttttgttttcgggagttagttctgggcaatctgttggaggtatgttttttttaaaaaaaaatcctaaatccatattagagattcctaaaagaaaattttgaattagaatttgtgggaactgtgttggtgatactctaatgggttatctcccacacaacgttttttacgccaacacggttcccgcaaattctcctgaagatgaaaattaagtttttttttacgcaaaacgaggtagtattaacgtatgattgattgagttttaattattacaaacttgaaaaatagattaatatgatattttagagcaactttcatataaaaaatttttgcacgaaacacaccgtttagcagtttgaaaagcgtgccaaaaaatatttatcttcatccaactgttgttggagaaaagaacggaaccttagagcaagtacaataggaggctgtaagccgactaaatactgatgcggaggatagaagagaggagagagaggggagaagcgggctataaacttataaacttacagacggcttggacacaagagccaagaaactctgtaagatagacaagtgagccctgtattaattgtaaaaagctaactattatatgaatggactgagagaaggctaaaaaaaccttacagccaacaagttggttgtattattagccttgctcttaagactctataaccccatgcatttaaggcagcctcaagtaccacccaatacgttgatgagtaaacaatgagaacatataccgaaccagtcttagcagcttagagcaaggtcaatagtatagccaactactggctccaaaacatctatagccaatctaatagctcattcatacaatagttaactataaaaatatactacaccattaatacccggtcccacctctcatacacatataacatcttggagtccgtgttgcaaccagctacaaatttgtagcccgctttcttctctctcttttcttttcttctcgatatatggttatagccggcttatagcctgctattgtacctgctcttatacataagggtgattgatttttttttcctgaaaaaggtttatacataaggtgttatactctatcctatttatcatcacgcgaaaattgaacttagaataagagtgtatacacataaaatagaaaatattaataggaagtaaagttaaccaattagagaaaatctaataaaatttcaaaaaaaaattgtccgtacttttcactattactagtgcctctacagtactttgcttttacatatcaaagaggtgaaggctttatcaacgaaagtttctttcttttctaaacgaatattcatttagaaaaaacagagacaacgaatattcatttagaaaagaaaatcacctcacttttaatttgagcttccattcttaaacctattctcgaaacaaactaatacgcatacctacacgaatgcgcgggttaccttcctatttagaaagaaattaattaaaatctagaaagtaccaaattggatattggtaatatcaatcatttggcttaaaaccaaaaccatcatgcctaccactttaagcaatcaaaatattggtagggcaacaaagaaaaaaaaaacagtcctttcattttcttatgggcatagttacgctgagaatatgaaggggcatatgaaacattgctaccgttggtaatcactgcgacactgcctataaaaaaactcgaaagatcaataggtaatctctaacaaaaactgactcaggaccatcaccgtcagtcatctgtattctccgatcttagagaaaggataataatggaagagagagaggtaaagaaaagcagaaagtattggctctaatacaagagctagtataaatttatggtgagagaaagagaggatgacaaaaataaaactaacattatagccaatcatattatctctaacattgatttatattagtaagtagtgagcttatattataggccgtctcataatgacctttccatcgattggatggccattctggcgcccagtaatccatccaagcctccaaggtcgcaaaaggaatacatgccgaactaatcagcgtcggctgtgccagcgatatgccggtgatgaagattgaagaagatgacctttgctcttcttcgcacgggcatccgcaagaccgcaacacaggaaaatggataatgttctgaacatacagtcagactacaaaggaagagataacagaacagagcagagcagagcacatttctttttacgcaaagcagagcactttctcacactagttggatgacaattccatttcacttttcaaattacactctttaggaaacaaaactgaaaacatgctgtaagctgtcatttataacctattcttctgcaattttataaacaaacaaaaattttaattggatttatcgactgatggcacgaacttgattcaaagggattcgatgagttcaggcagagatggggtggaaggcgacgacggagtgcttggcgatgtggaggctgaactgcccgcctttctcgctcacgtccagcttctccacgcccggcggcggcaccatctcgaagctcctcaccagcttcccgacgatgagcgccaggatgggcagcgccaggatgatccccgggcagctgcggcggcccacgccgaagggcaggaacctgaagtccaccttcccggcgacggtggcgtccacgccgctctccttctccaagaaccgctcaggccggaactcctcggggttctcccacagcgccgggttgttggccagccaccacgcgttcaccaccaccttggatcccttggggatggtgtacccgccgagcttggcctcctccaggttcatgtgcggcaccagcagcgggatcggggagtgcagccgcagcgtctccttgatcacggcctgcaggtaagtcagcttgtggatgctggactcggtgatgggctcgtcgtcgccgagcacgtcgttgatctcggcgcggaccttgctctgcaccgccgggtggttgacgacctcggccagcgcccactcgatggaccagagcgtcgtctcgatggcggccacgttgatgttctccacgatgtagatcacgttctccgccgtcagctcgccgttcttctccgcctcaaggatatggtcgatcgcgcaccggagcttgttcctgtctcccggagtgtccatcaccttcctgcatttcatatcaagatttttgttgattagacacgaacaaatttaccttgcaatcctcattttttccatgacaagaatggatagggaatgcagtaaagtaagaaaaatggaatgtaccttctcttctcgacgtagttgttgttgaagaaggcgagcctcctgctctggaggtcacggcacttgttgaggtagccccgcaagaagggacggaggatggggatgaagtcgccgtagttgtactcgaagctctgcgcgaggcggctgcgctcggagttgaacctggtggcctcgatgaacatggggtcgtccaccgactcgaaccgcgcgtcgaacatcatccggtacatgatgttgtacagcatgagctgcagcctgcgtcgcaccacgaagccggtgccctgcgccaccgcgtcgccgcgcacgtcgtccacgacggcgtccatctcggcctcccacatggccttgtactgctgcacgacgcgcgccgtgaagaacggcagcgtcatgacgcggcgcatgcgtcgccagtggtcgccgtactcggtgaacaccatgtcggcgccgttggcggtgaagatgtcgaagacgacgttgcgcgggcgggagccgaactccacgccctgcgtgtgcagcacctccgtcgccagcttcgggtccgacaccaccaccaggttgcgcacgcccagccgcagacggaacacgggaccgtaccgtgccgacatcgccgcgaggaaccggtggttcaggtcgttgcccacctgcagccagttgccgaacaccggcacggccgccggccccggcggcgccttcccgtcaccaccgctcccgcccttcgcgcccaccgcaatgccgacaaacacagccactggcagcagcaaggtgagagcaggatgctgcgcctgcacgaacgacttgacgaacaaatgcaccgccaacgacgccccggtggcgatggccaccctcatcgcggaggccgccatgctgctcgaactagacccgctcactggctgtgcgatacgtccctgtgttgtgttttggtggtttgattttagttggtggaattgcaaagcgagctgtggctgctgggtcgggtgccgttggccgtggcgtgcttatatagcgtcaatggattggttggtgtgggtggcagtagcaagtagtagtgagtcagtacgtgggaaacggctcagcacgaagagatgcggcgaatttcgccggtttcgcgcggaaacccgtgtgccacggaaggaaacagggttggcgggccgcgatccatcggctgctcggcctcggcggaatggaggagagacgtggatgcgccgcgcgctcgtgctctctgttgtgctggctggttggtgggcacggccgcatgggcaaattgacaagtcgtatcgtctcgttgggctagtccgccgctctgacctggtcacgggggcaaagcggtggtggggttggtgtggcgcgataggagcgtctggatggccgatggacggccaggatggaggcttagttccggggttgggtttggtggtggtgggaggccagcgacctgtgtgagcttcggtgttggattacaattccctcacattctcattgtgcgttcaaccgttggttgggtcttttttgttttctgagagagagcgtttgttgggattgttgaccactgtcttggagatgagatactgctttaccacgtgattagttcaaagtcatttgaataacctgacgcataagtacatcattgtaacatttaaattcgaacagtttctgtgaaagggttcctcgcggcgatgtctgtgctacagtgatcaaatgcatacaacggtgtgcgattttactgtagttaatatagtactttacttgatgcaaatggggcactttagattagtcctaatgcactgcatgcctaatcgggcactttggatccatttccaacccaggcggccggctagatttcaaggttcaagctattcctatatacgtacagctataatgtgatttgtacgcttattatacgtagaatgtgtaagcttgacttcttcccctctgaaatgatgttgaaatttgttgatctcaaaacaaactaagtagttttcttttaacatcgttctactaaatcatattattgaaatagcgtaaaaaggcatattcataattccatatttacggtttttaccgtccagcaccgtcgcgaggtaccgcgtggtaccaaggtggtaccaaatcgcagccgttggatgtaaacagatctaacggtcaggaatgcacggtaccgcgcggtaccaaatttctcctttgcgcggtaccgcctgaaatcgtagggtggaagggtagcgttgtcttttcacaatatccggatcgatgagtggtgtatcgttgccctaacgaattggtctccatccgcatcgcagagacttgtccgccgctaacccttgtactgcgccgccgcctgctgcactgacctccccgccgtcgtcgcgagccccgcggcttccggctgccgtcgccgcgagccccgtggcttccggctgccgcctcccccagcagtaacctccccgagcgccgaggcttgcggtgctcgcggcgccgccgtcgccccgagcgacagccccccgcgcgcctggtctgctcgcggtcacttagtcgtggaggagcgcgatgcgagggcaaacaggccgtggatactcgcgtcgccgccgtcgacgccgtggccggccccgcgcgcggcaaggagcggtgcatcgctgctgccgggcctatcggcggttggtagagcgctggtggtgggctatcggtgctgccaaatcgccgccgtcgacgccgtcgccggccccgcgcggcaaggagcggtgcatcactgctagcggatctatcggccgttggtagtgcgctcgtggtgggctatcggttttgccaaatcgtgtgtcctcgccgtctcagaccgtggtgggatgtttggaagaaaaaagttgtatcacactggtatgttgtttgaatggaaaatgatggtttatggtttgcaatgaaaaatgcatgattgaatgaagggtcaatatgtttgagtactgcatatatctgaaactgtttgaaagaacgtttacatcactgagttgaccaagataaaaatagagaatttgttatcatcaattataagtacttgacatgttttgctcctgtttgtggcaaatttcttcagattcttccttgtgtagatgcattatgtcttcttggacttgaatcacctcattcatggttgaattgatcaaggtggtggccactttagctctaaaagtagttgtcgtgtgctgaaataataaaacgaggaaaaattagacatgatatacttcttcagcacgtagatcgcatagcagatcttagcagagaatacttgccattgcatcgtactcgggggataggtcttttccattccagtgttcaatgcacttgagcgtaaacaatccacatgaccatctgaaattttcaattatgtttatagtgttacatttagacatcatagtaatttttatttacagatagtagaaatggttacccgtccttctgttgaggcacttgcatcgggcatattggccatttcgtgatgttcgtagaattccatttataagtcttgtgttcatcttgtttggcataacgaagatacttctctattcctttgatctgttatattgcaaagaaatataattagttgtagtgctttcagaagggaagtgtatgaaatgtgttttcattataccgtagtggtaagggttttttctgcatcatagcttgtcctatccatatgcagtgagtccagtatttggattttttcattgacaccatccaggacagctacataccagtgggccgagtttctatttaagggtaggaaaatctacatgcggaatcatgagtaagaaatgcattttcacttatggatataatgtatacgatgtatgtattaccatttcatgctctaaatagctggcagcaactttagatctttgatcacgatatctcttgttgcatgtacctttgtctgtaccattaattttccacagctggcattgtgttgcagtttcaaggagtgcaattccctgtcctcgtggagtgtcggattgcttgtctatgatgatttgtatgtatgcatctatgacctgtccaatagcagtgcatattgtgagtgtttaattattctgttgttggttaaattagaagcaggagatagcagtgcttacagtgccgttcaaccactttgctttggatggagcctgttttggtaggataagtggtttcagatgctgtcgaaaaatcttgattcctgcaattgttgatagcaattttttgtcttcactcttagagatgtaactcaaggttacttcatccagcaggcttagatcatgtggtttcggttccctactagatttaactggctttggaaatgtttttttgtagtagatgaaatcagtttgtgacttgtgtgttggcttgataatccttccctccggtcgtctaagccttccgccaattgttgataactgctgcaatgtacaagcaattagcataatggtcagtgtagcatttgtaatgtagatgtaggtctattatttgaaaaaccagtgttggattttgctggctattgtcatcgctttcgattatgtgtggagaagtagctgttccatttggttgactatcgtagttctgttaagatgcaacaagattagttagtcatttgtaatgctcattggaatatactattttgcttgcaaccttacctttgaatcatcaactaggtcttgtcggcaatctgccctggaatcaattactgtctcttcttgtttggctgctggtttaaatttacggaaagttcgtgaccttgaagttgtacccaacctgtactttattgcctatgcatgttcgaaatcataaatagtacaagtacaatatcattaacttagtacctgaatttgttatgagtacaataactgttaaaattggttctgtacctgaatatctcttctattttgaatgcaagtattctctattgagattagttttgtggatatcttgttgtccagaaactgacaaccttgttgaatctgcatgagttgtgtcataattgcatcgaaattggctgattgatgtgcctacaacagagagatttaataaatgtttgaggtgagtagtttaaacttcatacagtgggtattacctcaggatctttgtaattttcaggacttgatgccttcaacagagagatttaataaaggtttgagttgaactgtttaaacttcatacattggctattacctctggatatttgaaattttcaggacttgatggaacattaacatcgtcttctatgtaaacatggtgtggactctcatcatcatcgcctcttccatgtgagttgaatccgtttgcagccgttctttctttagttgctttgaacatataatccggttcttcattggtgggagtgtcgtctttgatgaaatcaccattattgttttcggcagtggcgccttgacagtcttctgacacattgtcccctttgatctcttcaggctcaggtacgatgtgtatgacatccacagtgttatcttccatgaaaccatcaatttttttttcgtcaatttggccttcacattgtactgggacaatgtcccctttgatctcttcaggatcatctatgacaaccacaacctgtaatgtaatatgaatagtatataatagtaggtaattaacatgttaaaactaatatttaatgttgcaaagagttgtaacttacagtccctgtttcaagaatacatttcttgtcgtactttagccatgtcattacattcatttcattccaataggccattagcggcggtggccttccaacgtatgtcagtgtgcacattggatcgttaatgtgtacatgttcccatgcccaaaactgaaaaaaaaagagagcaagaatcactgaatgtggattgcaaatggagacgtgtaatggatactttcatacctgaagcaatggtacattcccttctagatttctccttcctcccttcaattcattcagacaattgattaagtaatctcttgtgattctagcccagttgatgttcttaatgttgtcaatgtctttcaaaagggctaggtactgagaactaactattggcttggtggtggggcataggatgtacccaatggtgaatagtacaaatcttctaagaaagtgctcatctgggtgttttgcactattgatttgtcttgccaactcatgtagggaaatgttcttccccttatgttgcttgtacattgaataatatttgtagtcttctccattcatgtgaggctttggcttgataatcataccatccgcaggcaaccccatgatacacttcacatcatgggttgttattggtattgctgttccttggatgttaattgtttcagttttactgtcatatctctcagcaatttgcccaatcagtttgcggtgaagggtgatatctggcagggcaagcatccggccaaatccaatcctctcaatttgtgatatcttactcttgtcaaaattagcaactacagcgagaaatctttgtattgaacatgcaatagtcatgtctttcataatgacaggctatgaagttcatgaaaaatagaacagcttcagaagtatggaaacataaggccaataaacaaaaaatgaccgaagctaaccttatgctcagtgaccagtgcttcagttgtgatttcatcaaagcgcggctggaccgaaggttcaaactgtgcttcatttctgacttcgtcgtcttccatttctctggcgatgttgatgcgataagagatcagactgtactttctttgtaaataatctgtaatttatatggggattaggagtgaaagtatgccatcagtcagctatttgttacgcagtaattttcatctcttcgtttactgtgctgacagcaataaatatgtgcattcatatgatgttctgaccaaggactaaatgctattcccaatgcacaacagtacagtgacgcataggtactactgcacgcatggttagatgatggtcatctggttggtgtgtgaatgcaatcgacacgacaaacgatgagccctccatcca

SEQ ID NO: 8884 - DNA, 24079 bp, Oryza sativa
taaactctacagctacagccttccaatagtattctgccttcttatcattaccatttataggatccactgaattattcagccaagagctaaggagtcttatgttttcctcttcagtccagttgactcgtgttcctctcctccctgcctcttgactgttgtcacttgactcttcgatatcaaccacattgttctcttcatatcttgcagggcactgagaggctgattctgatccgtgggaagaagcagacccagtaatttgattaggtgagtacacccaattttccggaggacgaaaaccttgaaaactcactggtgtagagtgtaaccaatgtgcttgctgctgaaaaccgtggaagcttggagtagaattgccatatggttgatagttgtttggagccccaaaaggatggaagttctgaaaagtgggtgttgaggattgagaaaactgggattgggagaatattgaggggaactgtggagaagtggagttttggctaccatttccagaagtttggctttgggagccctagctaagcatgtgcataaaacctctgttgggaggatccatcttatttgatgaaatacagaaaatgactgagttgtgtttgtatttgtagagggatgaggttgtagcgttgttgcaacaagttacaattgctacaaatgtaacggctaactgctactctattattttagtgcaactctctaaaatcactgtacacatgctatattttatttgtctcttgccggcagtaacactactgcctgattcttgctgttatctgcccccacaatggctattacctggttggacgagtgcatttattgtttattacctgctttttaagcacattgtggttgcccttatcgagcggcgcctcccccactcctttttctccgcgtctgccgcccactccgcccacactccgtcgcgcatcgccctgccgccgacgaccgtcgccatcgcgccctgccaccggcgaccgccctgccccgcctgcagcggaatccatgcctcctccgtccgtcgccccacaccccccaacccacggcgccactttcctcgacgccaccgcctccgtccaacactccaactgccacgcgacgccgccgccttctccctctccttcgtggtccatcccatcacggcgattccccgcctcctcgccgccgtcgccgctcccactccccatacccccaccccagtttcctcgacgccaccgcagcgcatagccaacggggccgttctgtccctgctccccagggacgacggtggcgccgccgccgaccgcaaggcgccggatgtcaaggacgcagcctcaaggtcagcctgctcggcgattgctagatcggcaagacctgtttcatggtaaattctcccatctcctcctcctcctcttcttcttcttccaatccattccaatctcttgccatgtcgctttactgcctcgttaactccatcttgataagctttcccactgttatgttggtttcttgtacatgctatttcaagttttcaaccaagaagcaatccgaccctgaaacatgagtcagcaatccaacaaaaaaaaatcattttgaggttcagatttcggaaaactgctacttaatcatttttcattaaagattttgagcttctttccataggccatgcacacgaattttttttagcttgatgacatctacaactaattaagaatacctatgtgaaaacgacaagagagcccaaatcaaacctgaatcgagcacagcatgctaccgataagtttgtgcagaccgtgctgacctgatatcacccctacatcacagctaacagaaaaacaactcctcatgctattgggagagcctcatgcttgaaaatgtagttgcgtttcttttcagccacaatgaatagcaggttactgaaaagttcagatgagttcttcagtactcgaaatttaatgggaagtcaagtttaacccggtttaattctgacgaagaacttgacaacaaaaaaaaaacagatgcctgcatttggtgattcatacagataggctgtcatattgctgatttcacctggaaggagatctccttgccacctcaattaattgcacgttcatttggaggcttaattgtgcagcgatatatatcttgtttgcaaggtgtgtcttctcaatggtcaaacaaattcctgtcacttgttggttaaatatggttattctttatgttcttaacatttttcagtttctccataactgaatttgcatcatcaagaacaagtttcaatcattatatatgtgctgaaattccaaaggtttcttgtttacttaaattagacagaaaaagttgtgaattattcttcgaattcctgacaatgattccaaaggttgggattttttttcttttgttttgttttatgtaagcttagtagaaattgttcgatctgatcggggtatttcggtgctcttaagtttgtttgaatttaccctgtattactgtactgtgcttacattttagatcttatcaatcctgtatttctcctgttggatattctgaattacctaacctgagctcttattaaagccaagccaagtttctggaatgactgccagtctgtcagtcaccaagatatatcttcagatttaccaatacccaaatagaggaaaagttcttttgccactgaaaacagggaaaagtatttcaagtagtatggattaagcctcttgcagggcatttgttcggcagaactcactgcaatatataaagctgtaatcttgaggtgttatagccctaacgaaatattcagggcactgctattatttcaccaagtagaataaagtaaaaaaatattttattatgctattgtgctgcaaattgcaggaagataagctcttttggtgcaaccaattatttttcagcaaacaatgatccttctctaaagttttggttataagctagaactgaatgagttgagaggttcttgtctgttcttgctttcaattgcatctttcggtagataggaatgcatgatttgtaaccctttcagcatatgcttttcgccatgtgtttctcttgacttctgtactccaacatatattgaaaaaacaatatattttgatgactagagtctgtcatctgtatgaaattggaatgcactagaagtgtggtcctcgatttcgccttatggtttgtactggactgcactgaaaattttgaacttgtgcattacagggttccaatggatagcaattttggggcctctagaccaacatcgctgacaagatcaggttagttattcatataatataatataatataggtttatatcttaagctgtaccatatttggtttatttgatctgataaaggatgaaatagagatgggtgcctcaaaaataactttaatggcctcaatagttcaagacatttagacatgtttttcttaattatgattaattatttcacatgcagagcaaccgatgttgttgatagtaatcttaaatgagatggagtagggtgcaatcctaccagctgcacttagactgccctggtgaatgcattttgcaagggaaagtcagtatgagaagactgaagaagtgtttgaagaatgcaacaggctagccacgagaccgaagtgtatgcttatgatgtcctcatggaagataaatggtggtcatcataaatccatggctacacgagcctacgttcctaccgacatctggatggaattttttacttttctttaagtttggagtaatatacattgtatatatcaatgcaccacagccatacaggattgctgcaaggcgcttgagggatctctccttgatgcagcatttggtgaggggtgattgtgacagagcttcatataacatcttggtggatgcatatgaaggtacagatggtggtagataatttgccaattttgtgataaaggaaccaagaacttgagtgccatggtgccactttctaaaactgaaagcttttgaatttgctgctaattttcagattcagaagcaacattcaagcaactgaagcagcaggtgatgacattctcgatgaagacattcttacttctgttgttggcgcgtgcaggtctggcaacgtggtgaggatcaagtggaggtgatggcatggctgcacaaatccggcatgtcataactattgataatgctatgcatatggccacctttatgaaagcttttgattatcttgattatggattatatgcagttgtccaaatatgtacctgctatatttgaatatacggcatgagtgcataatgactagacccccccccccccaaaaaaaaaaaaagtgatgacttgtttggttggccagatatttatgaataattttgttgtttggggataatcagatattagagtaatcataagctgtccgttgctataattggtcccaaagaggacctatgagtctacatccatggcatatttgttcttttggaatttatatcttgtaattgttgatcgacatcctgggagacgtcggagtaacttttttctattcaaatataatattgccttctagcttacttacagtaatgcagacacgtttatatattttcaagttacaccatatcatattacttattcaagatccgtagcaacgcacgggcacccgactagttaaacacaaatttccgtagattgtttacttgaggcaatagtatgacaaggaagaacacttagtgactaatggttgataaggaattccagtgcagatgaatgtactcaaggagccaaattcgacaatattggtatggttcaacaccaataccaagaaaaaagaatgtgtaaatttctgacttatctacatcatgtaatacaatgacttctgaagcagccaacttgcatataattctagatttttcttatcacaacttgtcacagctataactttttagcagctaacttgtcacaactaattttttttggcaactatcgaattaatcaaatactcatggaatttatttggaaacttaatttttgaattttatatgtttgtgtgcaaaagtaatgaaatactatctcaatccacttataaaccattttgctgctagtttgaaacccatttgttgtcatatgcattttgaaatgagtataacatgatatatgaaattcaattgtgcatgtacttcctccgtttcacaattttacaatgtaagtcattctaacatttttcacattcgtattgacggaggggtaattgtttatcattaatgaatttgagccatcaacacatttttctgttgtacaactataatatttattgcttaaaatctttctatgtttgtaggacatgttctttttacagtgaccttaaatgaaatctgcatactaaaaaaattgcaaatacataagtggctttaaacaccccgttttagaacttgttgatcttttttagtccaaacttactatttcagatttagatcttcaagttttttagacataattacatcattaaaaaaataataaataggcgtgtactgattccactttagcagctaggacatgcatgtgctcaacttctcagagttagctgaagacctggtatctgcacatcatacaatgaacactgtcaggagcgagaagttatactcaccattgtagtcaatgttgacttccccaatcgtgcagtttttgggacctttaatctttcccctggcaatcttcaccacagggggacaagaagaactggatcgagccatgctaccgaattagatccctgctattgatggagcgagcccagatcaatgggaagaggcggtgctgttggggatgaggggaaagaagagggggcgtggctagggccgaattttttttatctgaacacatgcaaaccactaattgtaggatcgaatcataagaactaagccaaccagagagggggtgaatggttgatatacctcaaaaccaaaacttttagcggaaataaaagttaccctcaaatcgatggatcgcggtctgaccgaagtagatgcaccggtctgaccgcctgaagaacgtcggtctgaccgatgtagatcgatcggtcgaaccgccgaagtcgctcgtcgcgcctgtcgccgccgtcggtcggaccgcccttacgccgccggtctgaccgccgccttgccgccggtctgaccgccggtgagtcatcggttagaccgttgaaacctggtgaaacacaaatcgaagaactctcaaagttgatgacaactttattgcttctctttgtgtttacaaagtgcaacaatagcactccttacaaaaatctcgactaaactcaaaaccctagctaaactagcaactcaatcgctctccaaagcgatacaaaagcgataccggtaagcctcacgctccccctctatttatacatgaggtaggcagcctaaagccacgaaccaaactcatactaagagttctaaacaccttagaaaaccctctagtacaagacacaaacttaacataaccaatcgtaccaaatttggactccttccaaatttgactccgcatcccatatacacacaatacctccatcgtatgccatatggaatctccatcaaccacgtgcatcaactctagccttagtatcccgcatgatatctgaccaccacggacatcgtcttaccaccaaaccgactcccagtccatcaccgcaaatactctcccgaggcattgagtcacctacacatgaagcaaataaagaaaccatattccgagaccaagctatccccaacttgactcattgttagcaaacaacggtattacatacgtatagtatccatctagaagccataaccatgaaacaagcacggatatccaaagaaacaacccgaaaccgaaaccgacacagcgtcggccggtcagaccgcgggccgggccggtctgaccgcacacatagcgccggtctgaccggcaacctccgcccagtctgaccggtcccgacaaaacaacaaaccttgttcatcacctgtccaaaaccacttcgacgataatctccaaatatcaaaaccaataatcacatatgccaattgttcatcacataataagaatcaaaacacacgttgatcttacactaattacaaatgtgagcacgtaaaagttggaattctaggtctaaacaacctgcccacgtcaccaccgtaaatccagttgacctagtgctgtactgtccatgatatgggctcctcatttcttatcctgttagctttggctcagtgccatgacggtagcctcgacacgatgatggtgtgtgtatgtataaaccatctaatataacctttgacagtgacagtgttagcgtggccatagtgcaactaaaattcttctattctgagcacattgtgatcgactaatcaaacttgctagcatggagcaaacaattgatccactaatatgaatcgctagtattgaaaatttagtagtataataccctaattaaaccctatgattttcatactaccggatgaattagatttgaacaatggagaaaactccccgtaatgatgcaactaaccaattttagaggtgggttgttaggctaacatgattagttcaacggccagtttgttgggctactgattagagggaaacatatcgctgtatatgagcatcttgcctaaataattaaatgtaattgttgtgtgctcacatttgtaattagtggtttgcatgtgtttagataaaaaaaattcggtggctagggggaggcagaggtggaagcggagaagggatggtgagaaggagcgacgggaatgggaggaggcgtcgccgcgacggttgcggcgaggaggagaggaggggaggcggtaaatgcggcaccacaacgcacgggagggaggggaaaaataaaaatgtgcataggcgggaggaccggaagttgagagaagtatctggaagagcattttttttgaaagatttcctgatctgatctaacgctccttgtttaccccatggttgtatcggacggtcgtatgttttcggatgacatggcccaatcacagttcgagaccagcgacaactttataatctccctaacatctcatattacaatcgtacccttatttgtaatattttgttcatacatccacgattccatcatcgtgccacatgctactccgattcaattttattatgacaaactattaaaacattttttttaagacaaggaatggaaatgtgcacactattgctgcaacaaagcaaaaatttgcttccacccttgtggataaagtctcttaccgactcctgccttggaagggacgacttaccactctagctggctattctatgttagtccagtcggttctctcttccatcccggtccatgtatctatgacgattagccttccagtctgggttattaaggccgttgacaagaaacatgacgtcttcttgtggatgggtatggactcggctcattgggggagggggggcagtgtcgggtgtcctggacgaacgtctgtcgtcccgaaacctacgatgggttggggattcctgacctcaggttggcaggatttgccatgcgtgttcgctggctctggcttcagtgctcagggcacccctactggcagggacgaagctagcatcaaaacaaggggggtgcactaccattgagaatctagaaaatttcactacaacactgtacattctagtgttttttagtgagaaattaggaatttggggggagggggggtccctctccaccccccaacataatatagcttcgccacttcctactaggatggcctgaaggccccagttgagcaatccgtctctgacatgttcgcggcatctactttcatcatgctgggaaatggtgagtttatgctcttctgatctaaccaatggatcgacgaccgctcgatggcatccttggttccagatctcttcttcgccgttccctagcatctccgaggtttgagcacggttgcttctggcctggtgaacaacttgtgggtctctgacatccacggtgacctcactgtcctggtcatctcctagtttctccttatttgggatgcggtgcttcacgtacagcactcgccgggtgtcgaggattgtctcgtttggcgttggatgtctgaccagcggtaagcgcgttgggtgtactaggctttcttctatggccagcattactttgcctgtgctaatcatttttggtacgcaaagggtcttgctaaatgtaggttcttcctttggtttacattccagcaatgccgctggacggctgatctcctccagaagcatggcatcgtagtcactcggcctaccccttttgtgctcaggatcttgagacgacaaaccacatcctcctcgactgcgtgtttgctcggcaggtctagctccgtgtgcagctggttctaggaccggtggctgtcctccagggcctgcttacgtgagcatctccgcgccggctttgactctctggtgctcctggtttcttggcagctgtggaaggaatggaattatagggttttcgactctgctttctctacagtctcagtggttctggagtccatccactcggaatgccatctgtggtctttagctggcgttgttgccgcttttgggatctgttgggagtgtagcatggctcggccccttctcgctgcttggagtttgtgtttagccaccgtagttttctaagcttcagctttttattttgccttttctcccttcgcttggcataagccggtctagctgattgcgttatgtaactataactcttttcttctaatatattgacgtgcaatccttctacgcgttaaaaaaaaaagtttgcttccaacactcttagcaacggggaacatcttaatatgggcactagatttgatttcactcgtgttctggatatctcaaactaattgtacttaaattattgctaattaagtaattgactggtataaagctcacataatctcgatatgaaccgaatccagagccagaagttatgatcgtttcagcagcagatgagggctactctacacccttaatttcgtttggtcagacaaaattaagtactctatgttactagtaatatttgcaaaattctgttccgaaatgatttcttagcttaagagatggtgtttttcttttctctgagataatactgttctctccagatatgaatgaattctggacttcagtttatccaatgtctgaaatagcgctgctctgttctgttgcgtgttcaatgtgattccattattgcagcaagatttgaagaaccatgaaagccaagtatgctggatgtttacagtagccactccactacccaagggacagaaatatgaaaaccgttgcataaaaaaaaaaggtttgcattcatcacaaaattatataaactcacaggtttgcaacggggaaacaattacaatactcacgagcaaatgagtatcacagattaatgatactttgagtggtgttagttaaagctcacctgacagcacatagcaaagtcgagtaacaacaagttgatgttaaaaaactactagctggatatgaaatttcgcacatgtatatcgactggcacattgatatagacgcactttgcactagagaatcgagctgtgctagtgcataaaagcatgcaaaaagaatgataagttcaattaaaaaaaaagcaaaagaggatgataggttacttctcagttgtatcccttcaaagttcttttttacagagaatatttaagttaaaagtttgatgcacgcgttgatgactcggatcttcacatgaacatttaacgaatacaatctgttaaatttctcaccatttaaggtaaagggctggatgttgccactaaccttgattacttggatcactagattagactgaacatgtactaataatcttctaaacacacaccgtcctttgaggtttagcttgcacttgtagcatttgcttggcttcattgattattgtttacaaagtataaaatgcacacatgttcaaacgctgggtcgggccgggccgagctgacgggccaacaccgagcctcggagtgctagctaggcctgagctcggccagactccaattctcttagaccgatacccagcccaggctcgagcttgcgggcctccatgtccaggcccgagcccgggcccagctgctcaggaacaggtcttgtgccacggagcatctcaaggaagaaatccgtgagggccgcctcgtagcccggcatcttggcgtagcccgggaagtagttgatgtcgatgatgaagtacctgtcgccgtgctcctcgctcctctcccggatcatgtcgaagttgaacaggtgcaggcccagccctcgccggagcccgcgcgccacctcgtccacgaagccggcggccggcgtgtcgtcgtcggcggcgccgccgtcgtcatcaggtggggggagcggctggttggagatgttggcgaaggggacggagggctcggcgtccaggtcgaggaggcggcgggccggcacgtcggggaggctgctccggcgcacgcaggtggcgcggtcgccgacgacgtagaccttgaagagcaccccgccgtggttgacgaactcctggaggacgagcggcgcgcggaggagggggaggacgccgtcgcggcggtagacgaggcgcatgtcgtgcgactcggcgctgccgtcgacggcgagcggcttggcgatgagcgggaagcggagcgcggcgcgggcgaggagctcgtccgcgtcggcggcggcgtcgctgacgacgacctggggcgggacggagacgggggtgcggaggccggagacgacgtcgagcatggtggcgcggtcgaggaggcggtcgatggcgccgggggagtcgacgacgacggtcaccccggggtggcgcgcggcgagctcctccagctgggcgcgccacccgcggtcgtacatcttgtgcacgaggaggtcgaacgggccctgctcggcgagcggccgcgacacgtcgacggcgacgaggcgcaccccgcggtcggcggccagcgccaccagcgacggccgcacgacgctgctcaccttctccggcagcagcgcgtagccaacggtgtagcgaggtgacgacgacggggaggacagctcgggcgccatggccgcgcgaatcgatggaatcgatgcgatgcgaggtatatatatgtgatgacttgtgtgttgtacttgttggtagtgaccagctgtaacggctgtgatgtgcacctggtggatggatgcgtgcgaggccttatataggcggcgcgaggaggagaacggtgtgtggttgatagtggtggcagtggtgcatgcatggcgcgtggcgaaagcggcacgtacgtacgtatacaggaggagaaagggagaaacgtgcgagtttgggacgtggtggtggtggttgcagggaggaaaagggtcaatattttggtcgtcgtttgccttttcgttggctttcttttcttcgttttctctctcgtgtgtgtgtgtcaagctaggtctcatcgatctcctctcccgtccgggctctactttcctactactatcagacaattggtgtgttttggcagttggtaaccttacatgcaccttgcgtgtcgactttgtggagatcaagtggtgtgttcaggactgaggataagataacccaatcaggccggccgggattttgatctctccgctatggccttccacgaaattaagacagatatgcgacacggaatcaattgtaccttggtcggttgtgggaggagaaaaactatcgggatttcggcacaaaattcgatttttcttttaaaatatattttttagaaggtatgacataaatatactcattttaaactattagcaacattataccgttgtcacatccgcgagatatagaactggtgacacagtgatgatgtgtgcgagttcacactgccaacgcgtgaactcgttaagtcatcggcatggagtcgtgcaagttcgcgagttcaccatgtgaacttgtgcgagtttgccatttcaccgcacaaactaatgacgtcactcgtgcgagttgatagcgcgaactcaggacgtcatcaacacaaactcatgcaagtttacgcatgggtggagatacactggatagtgcagcggtgagtcatgtgtgttcggttttcaacatgctcatattttttttccaattatccgataacaggttatcctcatttttatctttagtttgcaaatggttggtatgaactcgcgcatcccaccgtcatatccagcgtttttgcgtcccccagatacgatgacagtataatgttactaattattttgaaaagagtatatctatgtcatatcgataaaaaatattttctttttattttttaaaattgaccttcttggtcacatggaaaatggaaaatccagctaattatccttgtacgtacgtgcgagggaatgtcccgttacaaccatcacaggtacttgtaaccatggttgggtcgtaataccttggatcgaaatttctaaaattcaggtaaattgtttggccaaagaaattattatttggctaaccaaattaattcaaatttcaatagtggatcgccgggacctttttagccaaggacttactgggcctgttcggctgcgctacagctgcacatataaagtactgtccgtataagctgcaacacagtgcaaataagggcagccgaataggtccactaatgatccttactctagttagcaatattgctaactaataggtgtgtgtgcatgtagtggcatcactactagaattaggatacatgatatatcctatgtcctgtctgggtgaacccacaagaaaatacgacttcacatcagaagttatttttcttgatggttgaccattaatttagcacatggaaaaatatcagaaaaacaatactacgacaatatatcgacataattataatttatagtgctaattcaccctaagtaagaatcttgagaatgttaggttgtacggttagttttccgtgtcgaatgtcttctacataatagtaaaagaaattgaaaaaaaaagacgtcatggaatatgtttgcaccgcgggcttcctttactttttgtcgacatatttaactagtggatacctcgcacggtgcggtaggaagtttagaaatactgggtgaaactccgcgcgttgctgcaggagttcaatacgatatcaataagtaaaaataatgtgtaaaatagctagacaacatgagctcacataagttgatatggtttatgataatttaaatagtatgtagaatgatgatccaaatgtaagagtaaagcgatgtagctttatgagagaaaaaaaggagggaggtaatttggaccatagattaatcatctaaggactaaaaagaattaaggtgatatgacttaatgagagaagaaaataaggtatttgagcaattgtgctcattttgagagaagaaaatgtgctcttttcactttgataggtgttggagtatttgtgctcttttagttttatgtagggtatttgagcatttgtgctcattttggttgtaaacttatgtgtaatgactaagctattacacttggaatttctgtagttgtatgcaccacgttggtgtagaagccgggttttataaactcctattacttaaaaaaaaatctatatctccgacagaagcagcgcgaggctctccaacaacatatcaatcaatgtacgttgtctcccttagtttcatgggcagatggttaggggggttgagctcccttaccccactagatgatcattgagaaaagaagagaggagagggaaaatagggagaggaggaagaaggagatcaacctctccaatctattattggatccgcccctgcttagtttggacttggacttatatgtaggtttacatatgatgtaggagcggccgtgcggcagatgtatcagtggttcgccgtgcttatgtgtaggggtgttttaatgttttctcgatcctcagcaaccacgattcacacacggatgaatgtattggggtaagtacatgttgtgagatcttttaatgtgcttgagaggtacctcaagtacctccacctccaataaaacacacaccgttgatttattaaggataactgggcataaaaatattttaaaaatctctttcttttttcttttctctgggaacactatatgaatctgagcatatagattaactaaaggaaaatatatagttattgattacttacttagttttatcattaattatacattcagtgtattaaatattgctacgttgttgcgaaagggcctgtagcctagtagttacaagagcctcagtagcacctgaggtcctaggttcgactctccatgggagcgaattttccaggatttaacggcgttgtgctttcagtggtaggcgacgtacccgtcgacagcgaggcgcctgtggtgactttgtcaatctctccagaatttgccggcccagtcttcgaagatgctcataggggtagggtttgcgtgcgtgtgtccatagggtattgctacgttgttttgtgcgttacaataataaactacacatcaatcaacttgtccttcccataaaaagttaattaatattatttaaatattgtacattatcaacaggtatttatcgcctgttatataatctatatgttcagctatatatggtttatttgcatagcataagttgtgatcgccctctctttaccatatctaatctgataaaagggacacacactacggagaatcgctttttaatcctggttgagaacccctatagtcctggttttccaaccgagactatgtatccgggactaagatatttttagtcccggttgaaataaccaagactaaaaatagattttctatttaccatatctaatctgataaaagggactcacactactggagaatcgctttttaatcacggttgagaacccctatagtcccagttttacaaccgggactatgtatccgggacttaaaaatatctatttttagtcccgattgaaataaccaagactaagttcgtaacaccagccgggactaaatcttttctggcgccaaatatctccaaatcattaaaaaataataaatcacagattgtgttcacacatcacagatcgttcacacatctcaacatcccaaatcatccacagcaacaacccaatatctcaatatcccaactcatccacaacaataaatcacaaatcattcacacatcattctcaaatcacagatcaaatcaacaaacaattattcacacaacgagaaggaaaaagagaaaaaaaagaaaaaaatccatggagcctgccgccgccgccaccttccgcggcgggccgccgtcgctccgccaccgcctggtcgctgtcactccgccaccgcctccctagcccggcacggcccaaccgccgccttcctcgcccggcacggcccggccgcggctgctgccatccccgcccagcacgggcccggccgccgccgcccccgccctacacgggcctgaccgccgccgccactccctggcacgggcccgaccgctgccggccgcttgtcccgcagatctgaggaagagaagagaggaaaacttaacagaaggtgagatgagaggaaaactcagatgtggaagaagaagggggagaggaagagatgagagtgaaaaaggaaggtgaggaaaagaacggagagataaagagtggaggggaggaagagataagggtgatgaggactcagatcgatgcgcgcggagagaatgatggaagagagagagcgagacgtgggaaactgatttgtagtcccggttggtataaacaaccgggactaaaaatctgatctttagtcccagttattcataccaaccgggattaaaaatattaggagacctgtcacgtcgtgccaataaataaactgggacaaaagatgatctttagtcccggttggtaacactaactgggactaaagattattgcacttttaaacccccggttttttaagcaaccgggagtattgttgtttttggtaaccgaccaaagatgatttctcaagtagtgacaattacatatttaacctttcacctaatctacaaattaactgcctggcccatttttttactaccttttgtaagacatctttgttttattgtttgaaccgttagatttttattgatagacggaccagatatataacatccaagcacgatagaacgcctcacatgttggagctatgaagtgcatggggctctgggaatggaatgtcgtcccttccttctgtttatttgcctgcttttggtgagttcctacaaggaagctaccgacgaaccgttacaatcgcacatgcataacggggtgaattaagttaattaaacccgtttatgctcggcgcacgaacaaaaaagttgcagcaatttcataagaccagaatatatgctgctagctactgcacatatgacattgcttttctgtttattattttgtgcgtacaaagtgctcaatcatatatgcttgggaaatttttttttgtcaaagcatatgtaaccttgtaactttcctattgggaatgaggatgtgctttagttggtagctttgggtgctctttactttttgcatacgtatgggcatatcgtttaatttgtacatgtatatgcatgcgccatgaacattttattttaccgaaagcaagatagcaccggatccgcccgcggcaaaggccctctctgagtttcctcctcgtgttctttcgtttcacaccgaccgagcgggtgagcttagggacgggcaaaataaaacgaaatcaaatgattcggtcactagttcagacaacagtttcaacgactgaatttattccgattaatttggtcatcttcattaataaaccgatataacgaagtgcaggctgggataatggtcgcatgtaaaaattgtatatttttggaggccttaaagtgcggacggggttaatgaccgcctgtaattttttttcccgtttgaaagaatcagttttctagttgtgtaggtgggtgtgccttttaatggatgcttacccgcaaaggagcgggcgacgtgtagtagggaacatttgaaaaacgactccgcttttaaagtagtagagaaatcaaccaacttttatgttgcaaatctcaacgaatgaaaagtgaaacctaagatataaatgtgccacattatccgatgaacattggccatcagattcacaaaatgacaaaagagttggaatcgattttaacaataggatcaaacttaagtagcaataaaaaacatggcaaattttgctacaggacactatgattttgtggttttagtcgtgggacactgcccaaactcacttttgggggaaaacacttcataaacgtggtaatttgccaatagacaccgcttcgattaaaataatgatttctggttggggaggagagagaaatcacgtgaaatatcaaaaatacccttggacccacgtgtcagctctccatctctcttcctctctttctccctccttttctctcttctccccgtcacggcttgctcggtggcggcggcgacgctcggagcgccgacgcctcaacgcatctgagaaactgttccaatctcgccgccgacgacccgcccggcccctcccacgccgctgccattgcgtctgcgatctcctccgccttcctcctcatcgcctcgcccttctccttctcccgcattaccgtctcctcctccccactctccaccaccgagctctccaggctcccacgcgccacctccacgcagacccccccccccccactccaccaccaccatcgcgttgaagaactgctcggcccccaccggccacccgagcagcggcacgccatggcggatgctctcaagaacgcgcccgtggacgagtgcgccaggatccgcgcccacccacccaccactagtcccctgcttgcctacgccatctagtcctcaaatccgacggggagccagccgggatcgaatccgtccttgtggtcgaaccccaccagcggctggacggcccagaggaacggccgtccgctcgtctccagccccagcgccagctccgccatctgatggatgctgatgctgttctgcgacccaaatgagatgtacagcaccgagcgccgcggatgtgcgtctagccactggatgatgctggtgtcgtcatcctgcgattttaacggagccggcgccgcgaggattggcccaatcgcccatgcttggacgtcgattcgtgcttgggtgcttcgtgatcggtgcagtgcgaatggtcgccggagtcccgccgcatctcccttgaccaccgccgagccgcccttgcttcgccccggcatgcccagccgtcatgctccaggcgtcgccgccgctgccgagcaagccgtgacggggagaagagagaaaggagggagaaagaaaggaagagagagggagagttgacatgtggcccaaggacatttttgatatttcacgcgatttctctctcctccttaaccaaaaatcattattttaattggcgcggtatccattggcaaattaccatgtttatggagtgttttctctaaaagtgagtttgggcagtgtcccatggctaaaaccacgaaatcatagtgtcctgtagcaaaatttgcctaaaaaatatatagagttctagatccttctagcatgctacacaagaacctcttacttgagatggtagaaagatattgcataaccatagtacctagacttcattcaagtatgcaaaagaaaaaaaaagtaaatttgctaaaagcaacaatgaaaatggtgtttatgtaaaaagcattaaacaaaaaatggttcgtacatttcaaattaagcttatttaattgagaggaaagtatagttacgtaaacaccatcgtaaaattatttcatagaataattatatgttttatatgttttggacaacaaactatgtaatttcatattatcattaatatatttttcttacatgtacaccattcataaaattatcaagtttagcataattattgtaaattatttattgtcatggtaatatttatttattacagatcaagataaaacaattcgtgttatacatagacttactgctaaatacgttatcttaacatatattcatgtatgcaaaagaatttaaatttgctaaaagcatcaacgaaaatggtgtttatggttggactcactattttgttcagactaaagatgggacacacaattcaaattacaagtctatttacactattactagaaatgaaacatttaaaagttcaacaagagggaggcaatggacacaataatgtatgttaaattatttgttgttatgataatattcttataaagtatgtttgaaaaaaaatgtattgttaattataaaaaattaagctaatcactgtaaataatgtgtaaaatatatttaataaagagggaggttatagtcacgtaaacaccataataaaattatcataaaataactatatgttttatacttttgaacaacaaattataatttttgattaacgttaatatgttttcttacacaccattcataacgtgatggctgtagtcgcgcgaatgcacgacttaatacactagtacatatatattatacaactcacactataaattttaaaacttacattaatttttttaagtacaaaccatattaggataaaataagttattacaacaagggaaaaacaagaaaaacgtatgaataaccaagagcaaggaacatgtgtgcgcgatggaaccggatcctctgatgtgaactgtccctgacgtggtcactgacaggtggccccgcgagcggtgaggcccacatgtcagtcactatgttcctctgacttcacgtcagaggatcccaatccgtgcacaccatgtgaggatgccccaaaatttggctgaaatcaatcgagaaattaatataacgatagttttctagcaaaaccgttaggccattcgttagctgactcaaaaatcctgggccatacatagtttagctagggagcaattcttgcctgggacaagcttaattattggaatatgaagcatgaaataatcaagtccaaaatggttaggctgcattcagttttctcatatcacaatcggacattacgatggaggttctgaactctgaatcacaatcggacattacgatggaagttctgaactcgatctgaagtggccagcccacaacgttcgcacatattgggccgcccaaaagtccaagagaactgttcatcggggaaaagtgtcatctgtgctgtgtagtaccaaaacacacacaagatgagataataaagaatattttttacaaaactatgtatacttcgtccaattattagaaaactacttatattgatttaaaaatatgtaccataaaactatatttagtgtcaattatatatataaaactacatattgacgatatcatatcataaaaaccacggatttaatatcaattatcacaaaactatatgtacgtataaataacttatagtgctatggatctaaactctaaaaatatgtagttatcactaaatttatagttttatgatatgatactttcaatatgtgattgtatgaaaggtttgatgctaaatttttagttttataatcgctaaaagtattttttaaaaagtttacttgaaataaatgataagaagagacatagaagagggggtttttatcaaggacaagtgtttgggaggtggagttggagttgggaacttcacctccctgtgcgcagaaaacggagtgcgcgtgattaattaagtattaactaatttcttttaaatcaatatgatttttaaagcaactttcatatagtaatttttgcatcattatttagcagcttgaaaagcgtgcacgtgtaaaatgaggggagtgagtttgaaactccaagaaaagaactcagcttaaagcagtgtgtacccttaatcaaattctaaggtgtatgtactcaatttcttaaaaaagaatgggacacccaaaagaataaatgaaagaaataagaatagaactgattgtatttttatcattttctttcgcctcattgtccatatgcttagtatatattacattttaatataaaataatgactagtatataaacaatcaagtacgtttagactgtttcctaatgaagccactactttgtgaattcttctactagcaaatatcatgtttttctaatacctagttgtaaacttcatcaattggcaaattctcttcatcccaaaataattaacttaaaatatgatgtgactttgagtacaacgaatctggatacgcttttattcagaatatacaggacgacagcaaaatttgacgtgaccttatggttattatgaggtgttgccatcgataaatatcaccgcagttcacaaaaagcaccgaataaaatttattcgtggtataggataggccgcaggaatatattcgaatatcatgcatgtttgcacgaatagcatattgaactgctctatatctccttaagaaatatcagaatgtgtcgctggatcgtagactagaaaatattgagtttgcaagactgaataaagtaacataaataaaataatacatgtagcaactatatgcgtatcatatttcttctctatatgtcatgccaattcagaatatataggacgacagcaaaatttgacgtgaccttatggtcattattaggtgttcccatcaataaatatcaccgcagttcaaaaaaagcaccacaatttaataacggattacataaggttaatattgatgtagtgaagaattaatccccctcatcagcctaaacatcaatgttattatcacgagtaccgcataaataattaagataaatttaacatgtactagtaggtaagatatatatatatatatatatatatatatatatatatatatatatgcatcacaactagagttttaaataaatcccttaagaaactatattaaataaacataaagatccgcaaagaaaatataaaaagaaatttgctcccacattacaagtgggcaagtacgtcatgatttcagttttaaaaaatacgccacgatttggtaaagaacttaaattttgtgcaatttgatacatttgacttagcaactgggtgcaatttttcccgaagtatatataggcgtattaaaaagcgaccatgtcttccaagctgacttggaacaaatttacaaagtgccctcttgccaacaatgataaccaacctctaaaccatgcgcattgtgtctatcatatatttgaatagattattgatttgcctatgtaagttgaccatattaatggtttgaccctttgaaaaggcctctctctctctctgtgttatgccttatttacccgttttactaatttactgttggattactgttaaatggaacacaaaatgacagatctctcttacttgagagatttcctctcgacctttctcctcatcattttattaaaaaaaaaatctcagaaacaatccccaatacatcgccaaacagataaatttaaagcattgaaccatcttcatctaaaagatggttagctaaactaagaaagcaaacttgctagtgaaaccaaatagcagcagaggaaccaatcgagagggatttgtggtgtggctacgacaactatacccttcttgagcctcttttgatatgaactccgcttgataaaccggtaaatcccgtttggctgtctctacgaaaatagcacaatttaaaggtttgttgactctagattttggtgtgagcttcaccaaactcagcaaagaatatccatgaagttcaccgtcgttgaatttgagaagcttgaactgcatgggcggctaatacttgcactgcacgcatgcttgggcttcatcaaccacgggcataggcacaaccacttggctatgcatctaaaagaagaaaggcaattactacttccttcgtttcacaatataagtcattctagcatttctcatatttatatatatttatattgatgacgaatgaatctagacatatatatctatatagattcattaacatcaatatgaatgtgggaaatgctagaatgacatacattgtgaaacggagggagtaatatataacattctttaaccgtagtttaggccccctttgattcaaaggaaattcataag

SEQ ID NO: 8885 - DNA, 9589 bp, Oryza sativa
agcatgaccagacgtcaagagtaagaaaattgctggatcaataaccacaccacaatggcaatatctaagtgatatttacctgaatcattccaggatggtctctggtattgttaccaggccaaggtgtgccatcttgcataatccatccttcctcaggactttctgtgccttggcgacgagagcattaacacgaactttaaattcttcatattccctctggattttggttttgcaacagacattaatgcgagattacaccaaaaaaaaaacaacaaaaaagtacacacatataaaccaaatttaccttcatggcacgacgatctttaacaaaagaagcctgaactttgtctttcaagtaatcaattttctgtgcaaagtaccactctggagctctgggttctatgctgtactttttacagaacggtacccattttctagcaaattctgaagtctcagcaagcgcatcaaatgttaacattgcagctccatcatcagacacatagcaagataccttatcaacagggtaatccacagcaaggatggagagcacagtattggcagtgacaagaggaggttctttcataggatccacagtactgacaaaaatgtcaacaggagccaattgagatggttcaccttcccggtcatacctgagagtgcaagtgatattttgttattgtcagtaatcagtactacagtgctaacgcaggaatggtgtatcagaggtaaatattgtacatcaccttaaagccagcctatccaggtaagtttcacggttgattggggaccacttggggaactgatccagaatccaggatagagcaaaccaaatctcacatatgacagagagcaaccatagcgggtatgcattacgcacaggatttgtgatacggtagtgcaagaatatacataggacaatcaatcggagcacaataaccatcctgtacggatttattctggatgacgaaattggcacttttctcgatagaggttggcgtgtttcatcattcctgtaatacagatagcacaacatttatagtggcaagctatatgataagtccgcattataaggttcagagatgtacaaccatttagaatctgatccattaaatgtgcatattgccttgcttaatagcaaggtatacttgtaaacacaaaataattatatttcgaattatgcaagaatttttcctatgttcttccaagtacaaactagtgcaagttagtacaccagatacaaggaatattaattactggtagaattcatagatgactaacggtggacaaaagcatatcagaactcacagtaaggcgtcctccatgttatagtcagtagatgcatcaatgtcaccaaccccacgaccttctgaaggagcaatgctagtaccattagccatgggaattgcacctttatccttcattttccagccatctactctctctttccatgcaacattgccaaggctaccagaaaactcccttgatgggtttgctgttgagcaacaaagaataattaaattttcccagtcgatgcaacgaaacatgagatcttgatgatagataaacttacgtgaatggttcacatagggaaatggatgcccacgtctgccaatgttcccaacgggagacatcatatgatcaggggacgctccaggaatttcacctgagatctatagaattaatcgagaggaagaaactaaatattagttcaatctttgcacataccctgaagggttaacgacttcacgctatcaacaaaaattctaacaaacctggctgtgagtgagcgatgggatatatatgcgagggatttcaccactgtcatacttgggatgaccaatctcaccactatcatacttagaatggacaatatcatcattcctcccagagttcatgcgccaggtgagcatcctctcggcaatcttgtgcttatggtcctggttgccggatgttggatagttcacatcactagcatcatccgcatcaacatcatcgctttcatccccaagtatcggcgggctccctgaagcaaagattaaatatcttgttaagctcaacaaattcactcacatttgcttctctcaatggaaataacccatacaggaaagaaattatgttgtcactggtcactaccaacttcgaatacagctcactaaagaacaggactctgtgctattaactcagcatattcactaagcatatatatatcttctctactattattgtctaaatgcaatatgcaacaacctgattgggttcacgagatgttcagtccaatgtagctgttcttaaccaaagatgaagtatttaggtgaaatccaagagaaggatgaatggataatgtgcaacttatacccttgtggcgcttgtacttggtcttgcactgcgggcacgcctggctgccgtccttgcgctcgtactcgtagcatggccggcacaccgggaacccgcagacgtcgcaggcggtgaagagctcgccgtccgccgccgtgcccacgccgtcgccgcagatctggcagacatggcattgcttccccgatttcttcgccgcgcatacaacaacaccaaacgaaacaaacaaacaaaggcaaaagcttcagagctcagaccaacccaaacatccacgcaacaaattaaccaatctttgaatctttccccccgaaaatgcgactcaccgcaccgtccatggcgcacgaaccaagaactcacggccaagaaagtgtctccacgaacggactcccgccaattcaccgcattccgcggccgccccgatgaaaccaagaaaccccaactcccccccaccccaagtgaggcaaatcaatcagtcagacaccaaatcgcctcggattcaaggcgccccccgccaccgccaaagccgacctcgtagctagcagcacaagctggatgaggaggcttgcaagaatcaaacgggacaagaaaaggacgtggcaccagcgaggatgaggaaaccgcaagcgtgagcgtgaagtgaatcgaatccgctcgcgtatcactctactctactccggggtttagcggttgattggtaattaaaacccccgtaaaatttcgagatttttggcgtgcatttgagatgagatggttgggttgttgctggggttttgattactccacggggttcggggagaggagtgaagtgaagtgacggatgaggtgagctgggggtggggcccacctggcagtgacgggcggagtgcgcgtcggctggaccgtggtcgcatgcagacagaaagtgtgaccgggatgggcgtgtggggaccgtggggcctactgtcagtgagaaagggtggacagcttgtgaggttgtgatagacacaaatgccaactgcacgcagcctgtatcgcagtactctgttcttaaaaaggaaaaaacagagcactcctcgcgcatagtaatcccttctaaaaaaacgtttgaacctgaatacaatatagaattgggttttttgacgggtgaagtatatgtatttgtgttttaaaagcaaaattgtgttaaatgtttaaaactttgaccgttagttttgcattaaaacaaatggtttgtaaaatataaggagtttataatgctatgatcgtatttttgaaataaaatttacggcacaccatttttctttcctttaaactataagtattttatatgaaactactccctccgttttaggttataagatatttttgactttgatcaaagtcaaaacgtcttgtaacctgaaacggatggagtatttgtgatcaaaatatcaaaagcttgactaattttatccaaaacataagatatttatgatggaaggaaaaaaatactgtggcaatctgagaagcctaggtgcgagcaatcgttacgctagtgatatgaactcaaccaagaaagtatctcgtaatcacatccatatgaacacatataaacactcgtacttataaacggatccgcgcacaccctatccatatgaacacatttaaaagatggggccccgcatattttaaaatcgataaatatattatctacctcttaaagaataattagccataaatgtaaatgcatgtgtcaaatctataagtttaaatcagataaactgattccaccacggtaatcctaatcagtttacactcagcgatagactgcaaatctgtaacaggagcatcaacaaagtagtgctgaaatgacaatctcatgatcatacaccacatacatatggtacgcaaacaacgatagttgtctcctcgacagtttaggatagtgtcccacgcatgcgtccacgagtcctcgacgcaacgttcccgccatccacgcgaccacgcatgcacggggggcgcgcgcggttgatgcactggacgtcgagcggaaaaacgccctgatcgatctggtgtcctgagcccccgaggattcactagctcttgccaattgtatccatggccgccgccacggcggacggacatggcgggaggcggcggctgagggtgttcttcctcccattcttcgcgcgtggccacctcatccccatgaccgacctcgcgtgcctcatggcggcggcgagcactgatgccgtggaggtggaggcgacgatggcggtgacgccggccaacgccgccgccatcgccgccacggtcgccgggaacgccgccgtgcgcgtcgtctgctacccgttccccgacgtcggcctggcccgcggggtcgagtgcctcggcgccgccgccgcgcacgacacctggagggtgtaccgcgccgtcgacctgtcgcggcccgcccatgagtcgctgctccggcaccaccgccccgacgccatcgtcgccgacgtgccgttctggtgggccaccggcgtcgccgccgagctcggcgtcccgcgcctcacgttcaaccccgtcggcgtgttcccgcagctcgccatgaacaacctcgtcgccgtccgccccgacatcgtccggggaggcgccgacggcccgccggtgaccgtgccggggatgcccggtggcagggagatcaccatcccggtgtccgagctcccggacttcctggtccaggacgaccacctctccatgtcgtgggaccgcatcaaggcgtcccagctcgccggcttcggcgtcgtggtcaacaccttcgccgcgctcgaggcgccctactgcgacgagttcagccgcgtcgacgcgcgccgcgcctacttcgtcggccccgtcagccagccatcgcgcgccgccgccgccgccgtgcgccgcggcggcgacggcgacgtggactgccttaggtggctgtccaccaagccgagccagtccgtggtgtacgtctgcttcgggagctgggcccatttctcagtgacacaaactcgcgaactcgcgctggggctcgaggcctcgaaccagccattcctgtgggtgatccgctccgactccggcgacggcggcggcgagcggtgggagccggagggatgggagcggcgcatggaggggcgcggcatggtggtccgcgggtgggccccgcagctggcggtgctggcccacccgtcggtgggcgcgttcgtgacccactgcgggtggaactcggtgctggaggcggcggcggccggcgtgccggcgctgacatggccgctggtgttcgagcaattcatcaacgagcggctggtcaccgaggtggccgcgttcggcgcgcgcgtctgggaggacggcggcgggaagcgcggcgtgagggcgcgcgaggcggagaccgtgcccgccggcgtgatcgcgcgggcggtggccggattcatggcgggcggcggcgggcggagggagagggcggcggccatggcgacggcgctggcggagagcgcgcgcgtggcggtcggcgagaacgggtcgtcgtggagagatatccgccgcctgatccaggatctgacggacgcgactgcatctcagccttgaccatgacttccattccggctcatttcattatcgtcgcaatcactttttgaaaaattttgtagaaaaaaatcgagtgaaaagctatgatgacctttgtatgcttcttccgttctgtatcatcaacatttgtttgtcccatcactcaactatcttaaacttatcgttacatcaaaatattttctcatttagttctaatatatgctaaattacctagaaaatttctattttagaacaaaggattagtgtgtgtatatataagaaactcttttaattcctcaaaagatattcccttatttcttacacgtcatgattattaaaaaataacacgataaaatgaatgtgaagaaatgtgaacaagtgtggtcatctaaatgcgagattagaaatacatatcggggacattcgagattagacatttcaaaccaagtaacacaagtgtgacaacttttgccgggtccggttggctaatctattttgggccacctcaccggcccatgaaaatattctcatttttatcgggccaagaaattctctgtcggacaacgaggcctagcccacggcccgttcctcaagaatctggataaggacatcaagaaatggcccgtttggtaaaatttcaacttcgaatggtcagtttagattggtgtcattttaaactatacaattgcttgttaaaattgataaatttatcactgtatttagtttgttatcaaatattggtaatacatagaaaattttggcacaacatatttattccgttctaccaaaattttggcgatactgccaacttaccaaaaatttggcaatgccaaattttagaaaatctgattttggtagtaatataaacagaccctaaaaatctgattttggtagtaatataaacagaccctaaatttaactataggagttggatatgaagtaaattataaaacagtctaaactcaactcaacttctctatttaattttgtgagagcgcttcagccagtttccgttctattttaagtgaagctaaaactgtttgattagtagcttcagaaatcaaaataaatggagctaaagctgaagccgtgtcaaactagcccctaaaagtggccgtcgccatcaaatcggtctggactccggcggatatgccagcgagaccgaccccgccgcgtggcacccccgccattgttgatgctgacggccgcggctcgcgaggaagaagaagaagatgccatattccctcgtctactcttgccgacgctaatctcccccggttccgttaattatccccggtcaaatcccaccaatctctttcatgcctcctcctcattccctgtatcgaattcatctttaaaaaaaattcaatggcgttatcatgaggaaaagggcgaaacctactgacgtgtagctcagggcgagtgctccctttctccgtctctctctcgaggttgccgtccaacgtccatcagtcatcgtgatgattgagattgacatccaatgtccacacgtagtactcacagtaatcgaattgatttggtaccattgctttgagaaattgagctagattgatccatggagagctgaagaaaaatgaagtgctagtactagtgtcgaactgaatgtttgcaagatttgagcaaacaaaccatttatgccgtatggataatacaagccaggggaaaaacaagggccactctgtgatcacaagcagcagagggcaacagcagcaacagcaaatatacaacttgttttaaaatcttttttacaattaggttctcggatgcgcacagctaagcaaacatcacacgaagaacggcagctagattaatccagcacacaaaaggcactgaaagaaacagagcagcagcagatcgatcaagatcgaaggtttgcagaggctggctgcaggaagctagaagaaggatcgcttggtaggcaccctcccaacagccttcatgaagttggcgagctcgagcaccttggcgagcttgaggcctctcttcgcctccgccgacgccctcttctcctccgccttgcgccgcgccttcgcgatgtcgttctgcgtcctctccagcgccttggcgcgctgctcgtccagctttctctgcgttagttgttcagtcatcaagaacacctacgtgagtaacattttggagtacatagcagttgctgctaagcactattcagtaatcagatatgctttctaaaagataaaactgcactatgcaaaagcatgatttgcagagcatgtaatggagagagaaaaaaaggcttttaaaagctggattctgacaaagaccgctctcctaacgttgcatgattgagtagtggttaactcatctgatgtcgcatgcctacatccaaaaaggatagatagtactagtgctactctgaacattttcttgcaagaacagataccctgctactctgctttgagttaatcaccaagaacaaagttggattccctttgctcggaatcaaaatctatcagctataatttcagatttttgcaaagcctaaacggacaacaagaattagatgaaaaatctgcaaacttgagagtcataaataaattcataatcagttattgagttacctcgatcttcttgagccatgcggatgctttctcgacctgctcggtctcccacccgttgatgacaacctcctccctcttgaaccggttgttgatcttggccacctccgccgtctgccacgccgacaccttcgtctccacctcctccttcttcacctgcctcgcctccaccggcggcgccggcgatggccctgccgcggggacaacctccagctgggacgccctgctcctggccggcgtggcgatcgggtggctgtccggcacaattgccagcgggttggtctcctccagctcgtcctcgccgatgctggtgagctggtcaccgccgttgttgccgtcgttggggccagtctgcatggtcgtcccggcggcgaccatggccgtgaactcccggctcatcgtcatgaactgctcctcggacgacacggaccggtggctgctggccgtgtcccacgagtacgcggcggacccgagccgcgtgggtggcgtcgtcgtcgtcgtcggcgacggcggcgtcagagggtggatgtcgcggtacgtggtgacgacggtgacctcctcgtcgtcgcctgcagcgacatcgtcggcggcggtggcgggcgccgacagctgtagcgaaacctccggctccggctgcggcggcggcgcgtgctgctcatgcaacatgtgctacccgcgcggcggcgatggcggtggtcgtcgtggaggctccgccgccgtgcatccgaagcgccgccgtggttgctgctggcgagctgaggtggtgcgtcgtgtcatggagtatgtgcgcgcgtattatatggcgggagatgggcatggagggggggaagcgatggggccgggtgtggttttgtccattggcgccaagggggtgacacgtacttgtctcgcggtgcggtgcgttcgccattggcgccaggttaaagctggtgcatgcactgcgcctgcgcgatgtgggctttggtcaaggcgagagcgagtgttttggtgcacctggagatcggcgaatttgcaagttggggcgcttgtttaatccaacaggatgggttggggaatgtttcttttggttgattaattgattggcaaatggcacagcgtggcct

SEQ ID NO: 8886 - DNA, 42755 bp, Oryza sativa
agggtcatgaagtgaacttattccccttgataagggccacacgctgctcacagtcctgttccggcccataaaatgtgggcccagcgcgtctgtcgcattgacgttccggcccagttcgcttgccacataaaatctttcgagtgagatatagcaaaatcgcacgcgaaaaggtgaaaacgtgagagccatgacgtcagcggcagcatggtacgcacatgcagtcagatcaccgatcacgcctgagctgagcagatcatgcctaatcgatcgatctgtccacacgtttccgccctaagattcgtgcttaattaattaattgattgcgtgtgtgtgaccctaatctaactacgcaaaaatcaaacaaatcttatcgtgcacgctgttttttgtattaattaaaaaagaaagtagacgacattcatgaatcctgacaaatctagctataaagcccctaaatctctcttttgtactgttgtatcattgtacctgtggatcaagagcgaacacgtaattacgatacatggattcgtatgtatatatttcggcgcacgttttgatttgaaattcgaaggaaatacatatatttatgcatccggggggcgtttacttgagttgcttgtttggcgatcacaaagttaatgatttcgtccgttcgcaacaaaaactaatgattgctacgtggaatttctcgtgtgtgattaattgctagttaggcgaaacatatacatatataatcaattcagtggttgcagtaactaattaattaattaaagtcctttatgaaatatatttctcgtcaaattccctgtgacaaatttacaaacccaaaacgatcgagacgtacgtacgtatagtactcgagataacccaaagaagtcgtccacgaattaattaatttaactaactaaccaactaaattataatcaccaatcattaacagtgcattgcgtcaattgacagttgacgtgtgccacgtgtctcgatcagtttgatggtttcgttttgacatcgcgatctatgattagttgagggacaaagtgaccaatctatgatgtttttgcttcgaaccaaagcagggaatgtccccttttgtccttaaaaaagggattccgggcccacatgtcagcctctctcggtcctctctatctcaggtcatcaccattcaccagccagccgctagctaggtcatatcgatcgatcgatcaatcatcttccgactactaattaatttcactttttccgtgtgttggaaaaagcgagtgattaatcgacgcaagcagcaggaagagattagctagatcattaattattagattagcttaattaggtcggtgttaaccacgtggtttgtgtacgcttagctagcttgagccgccatccatggatggaacgcacatgcatgatacgtacgtaggcacgcatgaacgtacgtcgacgttaattaattttctcttccgagaaagtaatacacacgcatgaaatgctttcttgtttcttgtttctttttattttcgcggtcaggaagagagatggatcgagtagttgacctgatcagtgatcacatgcaggtaagtgcgtactacactgcatgcatacaaccaagacgtacgacaccggccgctaatgtggattataatttcaggcacattttttgtttgtaggatagagtacagattaatacactcatagtattatatatatatatatatatatatatatcttgtgattggtgaaatcaccacaacagatcttactgtcattcggtatttttcgatggcggagttagaaaaatattaagcccgggtaaacttcattataagtttataaccattatttaatatagaaatttcattatcaattcaattaaaaatattaaaattaaatggagtttctgctagttaacccggacggcggaggctcccccttcagggatgaatccagaacaatatttaaggtgggactcatctccttctttcttcttcagtctccctactctttattttctctatattgttctcctttcatctccctttctatcattagtgatccagcggggtagggggactcgagtccccccagcacccacgctggatccacctctgctccccttgtaccattgtatgaataaaaatagctatagatacacaaaccggatagacaggtttcaccacggaaaattaaacctagctatacgatcacttcataattgcaggcaaaatttgtgacatgtgcacgaagaatctttgtgttctaccaggggtcctgtgtgtgcgtgcatgcatggcgaccgatgatacgtacctacgatgcgtgtgcagccacacacgcttgaaggcatatctagctacgtaccaaacttaattagggctcgagctaattaactaactcagccatgcatctccctcttaattagctgctgcttctttcttcttccggggaagcaaacgcaacatgcacgtactacgtgtgcttgcattgcatgcatgctaactcgatccttcccgcccaatcgcccatgcaaaccccgaatctataaatacctcgccatggctgcaccttcgtctccatcgatcgatcgatccaccataatccaatagcttaattcaaagcctgaaaaccatacagctcgatctgtagtgatcaagttctggctaattaactagctagctcgtgatcgataatatacagtagcagagcgtaagtgatcgagagcgattaattcgagcttttgcgtggaattaattcatggcgtccggtgcgagaaagctcgtgaggtcgtcgttcatggcgtccgtacgcgccctgctcgcgctgacctttctcctgtccggcggcgcagccacggcggcggccgccatggtcagaaatggcggctcgccgagcatctatggcggtggtggtggagagggagctgcagtgatcggtagaggcggcaggtcgctgctgcaggcggcggcggcggcggcggcgacgacgcagagcgcggttttcagcctcgacagctacggcgcgcacggcgacggcgagcgcgacgacacggcggcgctggcgagggcgtggagcgccgcctgcgcctcggcggcgccggccgtcgtgctcgtcccggagagcaggagctacctgctccggcaagtcaccctctccggcccctgcgaatccaccatcaagctcatggtaaaaaaaattcaaacagaatattagttgattaatcttccatatccagctgcaattcagcttggaactgaagctgattaagtgattaacacggccattaatattaatctttctgaaattagtgtaattctgacgtgatttttggataatatgcaggtgaaggggacgctggtggcgtcgccggacatgtcgaactggaacgagagcaacaggaggtactggatcgtcgtccgcggcgtcgacgggctcgccgtcggcggcggcggcaccatcgacggcaacggcgaggggtggtgggagaactcctgcaagatcaacagggcactcgtaagtgtacttacagtactgatcaagaaattaaattcaagttcaaatcgctatgaattggcttttctagcacgtagataggtggttaattaataaattataactagttctagtaggcgccgtttttcttgatgtgatggtttacttatgcatggcggctgcttcaaattttcgtttgcacgtcgcatggtccttgactttctactcgtgcatttcgtattcaaatatatattcaattcaatttataatttagtcaattgtgatggccacggatctctctaacctagttcatttttcctctgtacttttcagccatgcaagggagctccaacggtacgtgcatgcatgcgaaatgcaatattttttttctcttctttttccaaatttcatttactcaatttttgtagtaccttttaatttgattcattttgtttgtaattaatacaggcgctgagtttccacacgtgcgacaacctgagcgtgaatggtctgaagatggtgaacagccagcagatccacatgtcagtggaggattgcaccggggtggagctggcccacctgtcaatctctgcgcccggcacgagccccaacacagatggcatccacatcacccacagcaagaacgtccaagtcagcgactgcaccattaagacaggtaatgcaactactccctctattttatattataaatcgttttatttttttagtcaaactagtttataaaaaaattagtactcaattgccaaatatagcatctaaaccatcaaaattagtttcattaaatatagcatttaacataattttgtaatatactccctccatccacaaaagttatacctattatttttatcactaagactaataagaaattaatttgtcttggatgttacaaaatcaagaagtaatgcaagcatgcaaccaatgagtatttagaagtctccttggattctaatcaaacattttatttatttatttatttaagtcttgaatgcataaagattacaaataggtgcaacttatttggaaaagctcaaatgtggaatatgtgtaacttttatggagggagggagtatttattttatgttgaaaatattactattttttaaaataaatttgattaaatttaaaaaaaattaactagaaaaaataagtaaaaactatttataatattaaactgagcgagtaatcaattgccaaattaagcacagaaacatgatcaggccttgtttggaaggcccaataattccctgcccataagcttgaataagcccaaaagggtatgtttttttttaatcttcaaaaggatatgactctgattaggtttttgttgttgatctctgcaggggatgactgtgtgtcgatcgaggatgggacccacggtttacacgtcacgagactggtgtgtgggcccgggcatgggattagcattgggagcttaggagatgacaactccagagctgaggtgtctgacatcttcatcgacaccgtgcacctctatggcaccaccaatggagctcggatcaagacatggcaggtaaatatcctcctctcatcctgcagagatttgtgtgaacttactacgaaattttcatcaaaccttttgtatttcaagtgaatctgagagagatagatgtggattttgtcaaatgcagggagggagtggatacgccaaggatatcgtattccagaacatggtcatgaacagtgtcaagaacccaataatcattgaccaaaactactgcgactcagctaagaaatgcgagacacaggaggtaacaaaaacatcaactctcaaaaaccaatcctttatttaacaccagtgagtaatgctcaacaaaaatcatccaaatcacacaattattgcaaatttgccatgaacatggatctcagggatcagcagtggagattagcaatgtggtcttcaagaacatcgcagggacaacaatttccaagagtgccatcactctgaactgcagcaagaactacccatgctatgacatttccttacaggacatcaacctggaaatggtggatgacaatggtgccacaggaagtacttgccagaatgcaaaatggaggaaatctggaacagttgttccacaaccatgcaccagcacaaattaggaggaactgggcctgataaagttcattactgtataaagtgtgtataaaaaaattcagaaggaatcagtcatatttatgcatacattgtgcatacactcattggggtttctaccaggaacctgcaatgcagtgtgcctacaaggctacagagtgtatttgttaaattgattcaagttatatacatgtaaattctttcatacagagcaacattgatttcatattcccattaagtgcagcagaatgccgtcaggcatttttcagcaaagtagttctactaacttaattatcaacagatgaacagcaaggtaccacttactactccttaatacataacaagcattccggcagctaagatcttacagtagactatatagagtcatccactaataacttacacaacagaatggatagcaaactggcgattctttgcctactatcttgctcactcctagcagttgataccacatttttgggtatcagggcctgtgacacgggtggtgaatggatcgatacgaacccacagcaaggagaagatcgatgcaaggaggatggcccaaacaacaacaatggtcggtgtacggttctgccgacccatgagacccttaaggaaggggtacaggtggacaatcacccagaaggcaaagaagagcttcccaaagagcggaccccatgactggtagccactgttgatagcgtaggagataccagcaacaacaccgaccaggttgatgatcaaaatagtggtcggtgggatcagaagggttgtccacttgaacatgtagagctcagcgaaatcgccttcttcatcagaggcctttgaggtgacagtgaagctggtatcaattccagcaagcaccttcagcagaccctggaagaccgcaaatagatgagcggaaatacctccaataacccaaaactgctcattcctccaccattcatcgatgccaacaccactccacctcatctcaaggataccagtagcaaagattgacagaaagagagagataaaccaaatactcgcaaagttgctaatctgcagtccaaaataagtcagtcagcgcatgctgttctgcgatttcgtctgcagaagaggaaaaacaattctacatatttacctctggtatgatgaacttcccagtgagaagacagatagctggcaatatgcagtacaagaggagtggaatcgatgtgagtggataaatagtggtgttgatgtaagcaaatctctccaggaacttaagccgtcctccgtacccataccatatgggacaatgcctgctaaaaagaatttccacagaaccaagagcccaccgaagcacctggttcagacgatccgaaagattaattggggcagaccccttgaatgctggtcgcttaggcatgcagtagattgaccgccagccacgtgcatgcatcttgaatccagtgagaatatcttctgtaacagaaccatagatccatccaatctgcaagtcacatagcatcataaacaaagttataatggcaactgagaggagatgccaatttagtcaagtttcttcgcatgaactcagaagtacttgtgcgaatcagaacagaaatcaaattgcgtccttaattttgtacaagaaagaccacttgatatctcgacattttctgttacattgtataatttgtactggtaggctagtagcatgtaatgcagagcatgaatgccatagctttattacctcagttccccagtcacttttgtcttcatagccacagctgataacatgtatggcctctttcagaagagattctggagttgcggattgaggaacaccaccatattccatcagagtggaggctacaaaaacactagattgaccaaatcttttctctaagctcatttgagacatcagtagtgatttctcatcatcaaatccagaacctgccacaaaaatgatgtgccaggtcaaatatatagtgtaagagaaaagttaagcctagtgtccctcccttcctaagcatatacagaaatactgcgaaaaaagttgtggggtgcaatgcaatggtggtggccaaatatcactaaaaatctaagagcaaaaacatgtaattgaacaaaaaccagactcgatggtaccttcaatcccttcctctatatcttcaagattaaaaactggcacagaactgtccacatgtttgtgtgactttttcttttccgtgctcttctccttcgacttttttgtcttctttcgtcccccacaaagcgaagagaagtaacctggcctcttctgcttaatggggggttcataaccataaagagctgttctgttgaacacacaaccggttcccacataaactggtccttggagaccatcgagacctctcaaattaatctgcagcaagcagaaatgcagataagttacttgacaaactccagaaatgttcaaatccatcacatagaaacataaatattgctgatccatcaacagttattgatgtttgctaaagcgtgaagtgaagcatccaagaatcttaaagggaaccaagcttacatcgaaaaacacggtgttcctgtttgcatatcgatcatttctatcgataccgtcaaacctctgagggaattggacataacagacacgccttcctaggtttggatccataaggaagcacatagcctctcggagagctttgctattgttgatgtagtgatcacagtcaagattcaacaagtattgtccattagtaaggacagctgatacacgaacctgcagtttcaaattccacatatcaagtaaatgaattaaacaagatacttctcacttaagcaacaccactctagctgctactcacaagtgcattcatagcaccagcctttttatggtgttggaatccaggacgtttctcacgagacacatagactaaacgaggaagctcattgccttcggtatcaaggcctccactatgaccaaggaaaacctgagcatgaccagacgtcaagagtaagaaaattgctggatcaataaccacaccacaatggcaatatctaagtgatatttacctgaatcattccaggatggtctctggtattgttaccaggccaaggtgtgccatcttgcataatccatccttcctcaggaactttctgtgccttggcgacgagagcattaacacgaactttaaattcttcatattccctctggattttggttttgcaacagacattaatgcgagattacaccaaaaaaaaaacaacaaaaaagtacacacatataaaccaaatttaccttcatggcacgacgatctttaacaaaagaagcctgaactttgtctttcaagtaatcaattttctgtgcaaagtaccactctggagctctgggttctatgctgtactttttacagaacggtacccattttctagcaaattctgaagtctcagcaagcgcatcaaatgttaacattgcagctccatcatcagacacatagcaagataccttatcaacagggtaatccacagcaaggatggagagcacagtattggcagtgacaagaggaggttctttcataggatccacagtactgacaaaaatgtcaacaggagccaattgagatggttcaccttcccggtcatacctgagagtgcaagtgatattttgttattgtcagtaatcagtactacagtgctaacgcaggaatggtgtatcagaggtaaatattgtacatcaccttaaagccagcctatccaggtaagtttcacggttgattggggaccacttggggaactgatccagaatccaggatagagcaaaccaaatctcacatatgacagagagcaaccatagcgggtatgcattacgcacaggatttgtgatacggtagtgcaagaatatacataggacaatcaatcggagcacaataaccatcctgtacggatttattctggatgacgaaattggcacttttctcgatagaggttggcgtgtttcatcattcctgtaatacagatagcacaacatttatagtggcaagctatatgataagtccgcattataaggttcagagatgtacaaccatttagaatctgatccattaaatgtgcatattgccttgcttaatagcaaggtatacttgtaaacacaaaataattatatttcgaattatgcaagaatttttcctatgttcttccaagtacaaactagtgcaagttagtacaccagatacaaggaatattaattactggtagaattcatagatgactaacggtggacaaaagcatatcagaactcacagtaaggcgtcctccatgttatagtcagtagatgcatcaatgtcaccaaccccacgaccttctgaaggagcaatgctagtaccattagccatgggaattgcacctttatccttcattttccagccatctactctctctttccatgcaacattgccaaggctaccagaaaactcccttgatgggtttgctgttgagcaacaaagaataattaaattttcccagtcgatgcaacgaaacatgagatcttgatgatagataaacttacgtgaatggttcacatagggaaatggatgcccacgtctgccaatgttcccaacgggagacatcatatgatcaggggacgctccaggaatttcacctgagatctatagaattaatcgagaggaagaaactaaatattagttcaatctttgcacataccctgaagggttaacgacttcacgctatcaacaaaaattctaacaaacctggctgtgagtgagcgatgggatatatatgcgagggatttcaccactgtcatacttgggatgaccaatctcaccactatcatacttagaatggacaatatcatcattcctcccagagttcatgcgccaggtgagcatcctctcggcaatcttgtgcttatggtcctggttgccggatgttggatagttcacatcactagcatcatccgcatcaacatcatcgctttcatccccaagtatcggcgggctccctgaagcaaagattaaatatcttgttaagctcaacaaattcactcacatttgcttctctcaatggaaataacccatacaggaaagaaattatgttgtcactggtcactaccaacttcgaatacagctcactaaagaacaggactctgtgctattaactcagcatattcactaagcatatatatatcttctctactattattgtctaaatgcaatatgcaacaacctgattgggttcacgagatgttcagtccaatgtagctgttcttaaccaaagatgaagtatttaggtgaaatccaagagaaggatgaatggataatgtgcaacttatacccttgtggcgcttgtacttggtcttgcactgcgggcacgcctggctgccgtccttgcgctcgtactcgtagcatggccggcacaccgggaacccgcagacgtcgcaggcggtgaagagctcgccgtccgccgccgtgcccacgccgtcgccgcagatctggcagacatggcattgcttccccgatttcttcgccgcgcatacaacaacaccaaacgaaacaaacaaacaaaggcaaaagcttcagagctcagaccaacccaaacatccacgcaacaaattaaccaatctttgaatctttccccccgaaaatgcgactcaccgcaccgtccatggcgcacgaaccaagaactcacggccaagaaagtgtctccacgaacggactcccgccaattcaccgcattccgcggccgccccgatgaaaccaagaaaccccaactcccccccaccccaagtgaggcaaatcaatcagtcagacaccaaatcgcctcggattcaaggcgccccccgccaccgccaaagccgacctcgtagctagcagcacaagctggatgaggaggcttgcaagaatcaaacgggacaagaaaaggacgtggcaccagcgaggatgaggaaaccgcaagcgtgagcgtgaagtgaatcgaatccgctcgcgtatcactctactctactccggggtttagcggttgattggtaattaaaacccccgtaaaatttcgagatttttggcgtgcatttgagatgagatggttgggttgttgctggggttttgattactccacggggttcggggagaggagtgaagtgaagtgacggatgaggtgagctgggggtggggcccacctggcagtgacgggcggagtgcgcgtcggctggaccgtggtcgcatgcagacagaaagtgtgaccgggatgggcgtgtggggaccgtggggcctactgtcagtgagaaagggtggacagcttgtgaggttgtgatagacacaaatgccaactgcacgcagcctgtatcgcagtactctgttcttaaaaaggaaaaaacagagcactcctcgcgcatagtaatcccttctaaaaaaacgtttgaacctgaatacaatatagaattgggttttttgacgggtgaagtatatgtatttgtgttttaaaagcaaaattgtgttaaatgtttaaaactttgaccgttagttttgcattaaaacaaatggtttgtaaaatataaggagtttataatgctatgatcgtatttttgaaataaaatttacggcacaccatttttctttcctttaaactataagtattttatatgaaactactccctccgttttaggttataagatatttttgactttggtcaaagtcaaactgttttaagtttgactaagttcatgacaaatatagtaatatttataatactaaattagttctatcaaatcaataattgaatatattatcataataaatttgttttgggttgaaaatgttactatttttttctacaaacttggtcaaacttaaaacagtttgactttgatcaaagtcaaaacgtcttgtaacctgaaacggatggagtatttgtgatcaaaatatcaaaagcttgactaattttatccaaaacataagatatttatgatggaaggaaaaaaatactgtggcaatctgagaagcctaggtgcgagcaatcgttacgctagtgatatgaactcaaccaagaaagtatctcgtaatcacatccatatgaacacatataaacactcgtacttataaacggatccgcgcacaccctatccatatgaacacatttaaaagatggggccccgcatattttaaaatcgataaatatattatctacctcttaaagaataattagccataaatgtaaatgcatgtgtcaaatctataagtttaaatcagataaactgattccaccacggtaatcctaatcagtttacactcagcgatagactgcaaatctgtaacaggagcatcaacaaagtagtgctgaaatgacaatctcatgatcatacaccacatacatatggtacgcaaacaacgatagttgtctcctcgacagtttaggatagtgtcccacgcatgcgtccacgagtcctcgacgcaacgttcccgccatccacgcgaccacgcatgcacggggggcgcgcgcggttgatgcactggacgtcgagcggaaaaacgccctgatcgatctggtgtcctgagcccccgaggattcactagctcttgccaattgtatccatggccgccgccacggcggacggacatggcgggaggcggcggctgagggtgttcttcctcccattcttcgcgcgtggccacctcatccccatgaccgacctcgcgtgcctcatggcggcggcgagcactgatgccgtggaggtggaggcgacgatggcggtgacgccggccaacgccgccggcatcgccgccacggtcgccgggaacgccgccgtgcgcgtcgtctgctacccgttccccgacgtcggcctggcccgcggggtcgagtgcctcggcgccgccgccgcgcacgacacctggagggtgtaccgcgccgtcgacctgtcgcggcccgcccatgagtcgctgctccggcaccaccgccccgacgccatcgtcgccgacgtgccgttctggtgggccaccggcgtcgccgccgagctcggcgtcccgcgcctcacgttcaaccccgtcggcgtgttcccgcagctcgccatgaacaacctcgtcgccgtccgccccgacatcgtccggggaggcgccgacggcccgccggtgaccgtgccggggatgcccggtggcagggagatcaccatcccggtgtccgagctcccggacttcctggtccaggacgaccacctctccatgtcgtgggaccgcatcaaggcgtcccagctcgccggcttcggcgtcgtggtcaacaccttcgccgcgctcgaggcgccctactgcgacgagttcagccgcgtcgacgcgcgccgcgcctacttcgtcggccccgtcagccagccatcgcgcgccgccgccgccgccgtgcgccgcggcggcgacggcgacgtggactgccttaggtggctgtccaccaagccgagccagtccgtggtgtacgtctgcttcgggagctgggcccatttctcagtgacacaaactcgcgaactcgcgctggggctcgaggcctcgaaccagccattcctgtgggtgatccgctccgactccggcgacggcggcggcgagcggtgggagccggagggatgggagcggcgcatggaggggcgcggcatggtggtccgcgggtgggccccgcagctggcggtgctggcccacccgtcggtgggcgcgttcgtgacccactgcgggtggaactcggtgctggaggcggcggcggccggcgtgccggcgctaacatggccgctggtgttcgagcaattcatcaacgagcggctggtcaccgaggtgaccgcgttcggcgcgcgcgtctgggagaacggcggcggaaagcgcggcgtgagggcgcgcgaggcggagaccgtgcccgccggcgtgatcgcgcgggcggtggccggattcatggcgggcggcggcgggcggagggagagggcggcggccatggcgacggcgctgccggagagcgcgcgcgtggcggtcggcgagaacgggtcgtcgtggagagatatccgccgcctgatccaggatctgacggacgcgactgcatctcagccttgaccatgacttccattccggctcatttcattatcgtcgcaatcactttttgaaaaattttgtagaaaaaaatcgagtgaaaagctatgatgacctttgtatgcttcttccgttctgtatcatcaacatttgtttgtcccatcactcaactatcttaaacttatcgttacatcaaaatattttctcatttagttctaatatatgctaaattacctagaaaatttctattttagaacaaaggattagtgtgtgtatatataagaaactcttttaattcctcaaaagatattcccttatttcttacacgtcatgattattaaaaaataacacgataaaatgaatgtgaagaaatgtgaacaagtgtggtcatctaaatgcgagattagaaatacatatcggggacattcgagattagacatttcaaaccaagtaacacaagtgtgacaacttttgccgggtccggttggctaatctattttgggccacctcaccggcccatgaaaatattctcatttttatcgggccaagaaattctctgtcggacaacgaggcctagcccacggcccgttcctcaagaatctggataaggacatcaagaaatggcccgtttggtaaaatttcaacttcgaatggtcagtttagattggtgtcattttaaactatacaattgcttgttaaaattgataaatttatcactgtatttagtttgttatcaaatattggtaatacatagaaaattttggcacaacatatttattccgttctaccaaaattttggcgatactgccaacttaccaaaaatttggcaatgccaaattttagaaaatctgattttggtagtaatataaacagaccctaaaaatctgattttggtagtaatataaacagaccctaaatttaactataggagttggatatgaagtaaattataaaacagtctaaactcaactcaacttctctatttaattttgtgagagcgcttcagccagtttccgttctattttaagtgaagctaaaactgtttgattagtagcttcagaaatcaaaataaatggagctaaagctgaagccgtgtcaaactagcccctaaaagtggccgtcgccatcaaatcggtctggactccggcggatatgccagcgagaccgaccccgccgcgtggcacccccgccattgttgatgctgacggccgcggctcgcgaggaagaagaagaagatgccatattccctcgtctactcttgccgacgctaatctcccccggttccgttaattatccccggtcaaatcccaccaatctctttcatgcctcctcctcattccctgtatcgaattcatctttaaaaaaaattcaatggcgttatcatgaggaaaagggcgaaacctactgacgtgtagctcagggcgagtgctccctttctccgtctctctctcgaggttgccgtccaacgtccatcagtcatcgtgatgattgagattgacatccaatgtccacacgtagtactcacagtaatcgaattgatttggtaccattgctttgagaaattgagctagattgatccatggagagctgaagaaaaatgaagtgctagtactagtgtcgaactgaatgtttgcaagatttgagcaaacaaaccatttatgccgtatggataatacaagccaggggaaaaacaagggccactctgtgatcacaagcagcagagggcaacagcagcaacagcaaatatacaacttgttttaaaatcttttttacaattaggttctcggatgcgcacagctaagcaaacatcacacgaagaacggcagctagattaatccagcacacaaaaggcactgaaagaaacagagcagcagcagatcgatcaagatcgaaggtttgcagaggctggctgcaggaagctagaagaaggatcgcttggtaggcaccctcccaacagccttcatgaagttggcgagctcgagcaccttggcgagcttgaggcctctcttcgcctccgccgacgccctcttctcctccgccttgcgccgcgccttcgcgatgtcgttctgcgtcctctccagcgccttggcgcgctgctcgtccagctttctctgcgttagttgttcagtcatcaagaacacctacgtgagtaacattttggagtacatagcagttgctgctaagcactattcagtaatcagatatgctttctaaaagataaaactgcactatgcaaaagcatgatttgcagagcatgtaatggagagagaaaaaaaggcttttaaaagctggattctgacaaagaccgctctcctaacgttgcatgattgagtagtggttaactcatctgatgtcgcatgcctacatccaaaaaggatagatagtactagtgctactctgaacattttcttgcaagaacagataccctgctactctgctttgagttaatcaccaagaacaaagttggattccctttgctcggaatcaaaatctatcagctataatttcagatttttgcaaagcctaaacggacaacaagaattagatgaaaaatctgcaaacttgagagtcataaataaattcataatcagttattgagttacctcgatcttcttgagccatgcggatgctttctcgacctgctcggtctcccacccgttgatgacaacctcctccctcttgaaccggttgttgatcttggccacctccgccgtctgccacgccgacaccttcgtctccacctcctccttcttcacctgcctcgcctccaccggcggcgccggcgatggccctgccgcggggacaaccttcagctgggacgccctgctcctggccggcgtggcgatcgggtggctgtccggcacaattgccagcgggttggtctcctccagctcgtcctcgccgatgctggtgagctggtcaccgtcgttgttgccgtcgttggggccagtctgcatggtcgtcccggcggcgaccatggccgtgaactcccggctcatcgtcatgaactgctcctcggacgacacggaccggtggctgctggccgtgtcccacgagtacgcggcggacccgagccgcgtgggtggcgtcgtcgtcgtcgtcggcgacggcggcgtcagagggtggatgtcgcggtacgtggtgacgacggtgacctcctcgtcgtcgcctgcagcgacatcgtcggcggcggtggcgggcgccgacagctgtagcgaaacctccggctccggctgcggcggcggcgcgtgctgctcatgcaacatgtgctacccgcgcggcggcgatggcggtggtcgtcgtggaggctccgccgccgtgcatccgaagcgccgccgtggttgctgctggcgagctgaggtggtgcgtcgtgtcatggagtatgtgcgcgcgtattatatggcgggagatgggcatggagggggggaagcgatggggccgggtgtggttttgtccattggcgccaagggggtgacacgtacttgtctcgcggtgcggtgcgttcgccattggcgccaggttaaagctggtgcatgcactgcgcctgcgcgatgtgggctttggtcaaggcgagagcgagtgttttggtgcacctggagatcggcgaatttgcaagttggggcgcttgtttaatccaacaggatgggttggggaatgtttcttttggttgattaattgattggcaaatggcacagcgtggcctcgtaaatggagtacgttgtattagtgttttattagtgtgtgtagtcttcagaaaaaaaagcagcagttagtaacttatgtagtactactcgtgtagctcagcaaaaagatggttttgatctgtgcttgatcagctcgagcctgaaggtctagttgttatcccttataaaaagttttttcgtagcatttcacatgcattacgccagtgcaaatcatcttatcacgttacgcggagagctagcaagctttgcaaaggcagtttagtacatgttcagatgagtgcttccatacgcaaaagatactactactactggacaacacaaaatcccagtatacgtccaatccgaagactccaaacacgtacgaaggcaagggtttgtgaaccaaactaccaatgaccacaggttgcgatcgattgcgccctcaataatctcaaatccaatatcctcacgtcttaacctctaccggtctctttacggtcgaacgggtcatccagtgcagtacaggacaattgccagaagtcgacacgacgaattactacctgtacagtagttcgtcatctgaactggcgatgttactattggctggtcatcggtttaattcgcgagcaagtatgctctgctcatcgtcgacgtgttcatcgtgcaggacgtggaagtcccgggttggggatggacagctaagagtgggtggtggtggcgacgcgtcgctttcacccggataagagcctgtccgcttcctccgcctcaagctgatcaagctagcacacatcagcaaaagaaaagaggagtacatgcaatccgcgcccaaacccaacccgcgccgcgcacctgtccccgcctgccgctttcgcccacgtcttctcttccccccctccatatttcatatcgtctcattcccctcgcgcgcgcggacgggcagcgcggcgcatacacagacacaatacagggcgcgaggccgagtcgcgcggcgacgtgacgtgcctttcgttgcgtggctttgcgcaccgttatctgcgcggcacgtgtgcgcggcgtcggattcacggcttctggagtacgatcttttttctttttcctacccgcaggcgcaggcggcgacgggggcgcagcggggcaaatttgcggcacgggtggatgactggatggtgaacaagaatactaaaaggcacgcgaggagatgggccgtggaatgcgttatgcgtagcgcgttgaggtgaagagtatcgccagcggaacgtgattcaatctatgttattacaatacaacttccaaatctagataagtcttacaatatgaaacagaagaattagctactttagaatgaaatagaagggttctatttacttaatttattatattttggatcgagtttaaattttatgtaagtgtttaaatttatacggagagatacacactaacacacgtagtgaaaataaaaggctatagctaaagttttatttttaccggttcctagacaccaccctcgtacgtatacgctctccgtccgtccgatgtgttgcgctccaagaaagtgacccctcctttcgccatcgatcgatcgatagaattgtttacgttaaaggttggtttcaaccagcctgttccaaagaaatttactactccttgtaacttggaagcaagagattatatagtagtatatcttttggtaggctttgtaatcacgcttgatgggtttgtcaaaatcaaactcaaatcctatttatgttgtgtggaggaaataaaatcttatcccttctcgtacatgcatgttagtaatatgtatgagtggctagtgcagaggatcagagtccacgttatataagtttatacctcacagtcagctaaccagcatgggtctgagaaaccgatgttacatacacagccaccttcattttcctctctagcaagtcataccagctcacttgtaggtcctaatcatgcacgtcgtcttggagctactgatgaggtagcatgtttacaactaacccgactcccaactattgtactactcaattagctaattaattcattctagaaacttggggtcattagtactagtacccatcaattaactttatcaatactcttttttttgtgtgtggtttgtgatctatatatatagtggctgactagggagcgccactaattaggagaaagaaaactaaattaaaaaataaacaagattgatggggatgaagatgcatggccattggaagtgcaaccatgcatggcaaatcagacagccggttagtgctaggcagctactatatcacttcactttgtagctttcccggattttagcaagataatcaactctggccacctactagaaaaataaagaaggttagttaagcactgtgtgtgtgcttgctcaactcaattaatcgctgggatggtatgagtggatttgcagaatcctcgctatcacgatgtgcttcgctttctcttttctttttttcttttcttctttgtcataatacactttctttagctttatgtctccatctctctggctggaccaagtattgttattttactcattttcgtccatgtcataccgaacttgacaaaattgttttgttaatttggtcctacagagacacgcgtgattggaacaactggagctaatataattaattaactagcaccagaactctcatgtgtacagtagtgttatcttttccatttctcccaagatgatatagtaccagttttaaccatatacatgaggtgtccgtgtcccctccgattgcggatcgctgcctccgtcggtcggacaaatcgccgtacgttgaagcaaacgagccaaccggtgagcccctttataggcaaaattcctctgttaattcctccgttctcaaataattcagtgtaggttatctgagatcggaggcagctcagcattaggcttattagtttgattgttttgcttcgatattcagggaaactattctaactttcatgaacattcactagttatttacatatcaactaaatgatttatactacctccttttttaatagataacgctattgactttttctcacatgtttgaccattcgtcttattcaaaaaatttacgtaattataatttattttgttatgagttgttttatcactcatattactttaagtgtgatttatatcttatacatttacataaaattttttaataagacgaatggtcaaacatgtgagaaaaaatcaacggcgtcatctattaaaaaacggaggtagtaattttttttaacaagatagattaatactcctatgtgataaattaaatcattccacaaacttgtaaagttttaacgaaaaaaaaaatcaaggattctgaaattttcagggctgcagagattcgtgtcaatagatcgatagagaggatttggaaatttttcaaggctgcagattttcgcatagccagaatgggcaaatgcaaagatggcccaggagaactagggctgatgccatatggatttggaatttattcgggccttcaatcacacacaagcttctactaatgtcagtccgattagtagcatttagccaattcaaaaacagcagagcaccctttacaagcgactgaagatgcgttgcttcagctcagagagtcgtgtctccaactactgtaagatctcaattgaatgctctaaaactaaccaacaatttcgtgcgcctcgatcaaattgagacaaatattgcagaaatttaaactatctacagcttgaatcgcagcctaaaattccgcagcagcttcctcaggcaactcctcgccttcgtctcgcggcacttggctcctcctccgccgccgccgccgccgtcgccggagaagattgctcggagccggcccagatgccgcgggctcctcccctcgtacgccgccgcctccggattctcctgaaaccgccaaaacaaacgatcgaggtaagaacagctcaccgagaagaagacattcgcgattcggaaggatgcagcaatggcggcgcaccagtatgtagttcttccagtcggcctgcttggcgacgaccacgcggcggcgagggtcgtagctgaaccgggggtggttcttgatccggctcgccgcctcgaactcccgccggaactcgcccagccgccgctggagctcctccacggggaagccggacccggtggcggcgttcagctcggcgcggatggatgaccagtcctcgccggtgagctcgcccacgttcctcgcgccgccgccgccgcccgtgtggcgcagcagcaggtcgaggaacttggcgtcgtgctggctcgtccacgcgtccacctgcagccgcgacaggatcttgcggagcgcgcgccgcgacaccggcttcctcttgatcgccttctcctcgtcgtcggcggcgacatggacatgcaactgctgctgctgctgctgatgcatttcttgcttcgccgtcgccgtctccggctgcatcaaccgcacattatgcatctccgtcctgccatagatcgatcgatcgatcggttcgtcaaaacaaaatcgtaagaatgctcgccgtcgtcgttgtgaaatttgcacgtactgataggcgtcggtggcgaggcggaggctgaggaagacgacggagtcgtgacgcacgccgtagtccgcgagcgtgcggtggtcgtcgtcgaggcaccggccggcgaagaacagccgctgcatggccaccgcgatgcgctcccgggccatgaccatgcccttgacctgcgccaccgtcgtcgtggcgccgtccacgtcgagcgccacccggtccccgcgcagcgtgcgcaccatgatcctcatcgtccccgacaacgtacacaccgagctcaccctcagctcaggcgacaggtctcatccggattcccgtgcgagaaaagatagcgaggaagaggaagaagttgttaggttgagatgagaaaaataatggagatctagcgcgaagaagaagggattggctggcatggcaatggcatgcatgcacgatggctacgagagggaataaagcggtttggatcgatgatgatgacgacctttgggcgccaacgtgaaggaaagtattttcttcttcggagcgctgacctgtgtacccaactgtccatgcagttcaggcgttggaagatctgggccgagacagctaatgggctgcttgtgggcaatgtcagaacctggcctggcccagggatggcctgtgcaacccaatggaaaagaacaaaagttttaatcagctttcaacaattcgtagggttaaaatgatctttttatagcactgaacggagtgctgttaatgaaaatctaatgacgatgatatttatggaacaaagacgattgtacaatgacatttttaggaatatatgttcatcgatggcatttcttgaatttggatgtttatcggtggtattttctggattttctcatatgataaagttgtgtttttgagcttttgactctcaaattattctctaggttgtacaactatagattcacaaactatgggcaggaatttataatgtttaaaatagttggagatcattcaaaaagggcatgcggactagtatagttgttggaaaaaaaatgcagatgacaaaaaattgtggcaaggggcattatggtttgatattcccttttggatatacggattgaatgcaacataaagatcaagtgaactgaatgcacaatcacatggacctcgcaggcgacgcatggcgtttagccgctcgccatccggtcgattcaatacgcgcctgcagagttgttcagcttgccggaaatggcgacgagcatggtaaagtcgcgggaaagcattcaggcgcatcaccaacctccttgacctcccccacctacaaaaatggccgccattgccaacctcgagctcagcactcacacacacactcacacgcaacgcgtttgttcaatcgatcggccgtcaccgcgagcgcacgatggcgagcgctcgtcgcagccgcggcgtggcggcggtggggatcgcggtgtttgtggctgtcgtggtggtggcggcgggcgccgggggcgcggcggcggtgtcgtgcggcgacgcggtgagcgcgctggcgccgtgcgggccgttcctgctgggcggcgcggcgcggccgggcgatcggtgctgcggcggcgcgagggcgctgcgcgggatggcgggcacggcggaggcgcggcgcgcgctgtgcaggtgcctggagcagtccgggccgtcgttcggcgtgctccccgaccgcgcgcggcgcctcccggcgctctgcaagctcggactcgccatccccgtcggcgccgccaccgactgcagcaagtaataattaaaaaaaagttgattagattggtctcatggcgcattagtttgcatttactgaattgtttgttcatctcggttcgatccattgcaggatatcctaagtggcagcggcggcgacgacgacgccgctacatggcgtgagttcgtcgcgatcggtgcatgatcgaacatgcatggtgttgacgcgggagaagagtgatttggcttttgcgcatggtgtaatctgatctgatctaatccgtgcatgaataagtactagacatgcttgtaataactcatgagctaaatatcactcagatgagatctcagatttgagattttcttagccactgtttaactgttacagagttactcctacatacataacatccactgagcagagctgatgcaagtttggatcgcaaacttgggccttcatgggccgctcgaacatttcacggttggatcatcaatgcgcggcccagatagcaatttatctgatcattttgcacatcttggagataaactggttcagatatttcatctagaacagcgaatgagaatcgatagcaaccaccatatatataggtcatcatcaggaattcaggacaagacaaagccaaagccaaggaggcgcatcagcagtggaaatttcttggtttgttctcttcagaggtcagagatctgacctcacctgagactcctgtggctctgagctagtatatcgtcttcttctagagtgaacagttcatgaaccaatggatgcatgcatgcatcagcatcttaatttgtatagtttcaccatcctgtggtctagaagattgaaaatgcagctaacatgtttgtattcctgcgcccttcaattttctcctgggagaagaatatgcaacctgcacgccggtttcagtttgccgtcagagaatataatggtgacaccgccaacaacaaaaaaaaagaaaagaaagaaaaactggtttcagtgctagtagagctggtacaatagcagactattagccaactataaatatattttaatgagataaaagatgagagagaagagcagcgggctgcaacacggactctaagacgcaatgtgtgtataacaggtgggaccatatattaatagtatagtaagcaactattgtatgaattggctattagatcggctatagatgaattggagctagtagtgggctgtactattaaacttgctcgtagtagaaaagagggaaaaaaagattcttatgaattttatgcgatgtgtcttatgatttatggtagaacccaattttttttaaaaaaaaataaaaggagggattaggagattaaaattccgacccccttcacctgtttttttccttcactacttcagtgcatgtttctctctcagccacatccacacatctctcttctcattctcatgcattcacaacgaacctaacatgggcacacatgctgaactaatcgattgattgttcagaacagtccttttcattttccatgttcattctctgaaatctcaacatgtttctgctaacgaagtgcaaacagtttatgagccatttggtacatgcagcaccaccatttttcggtttagaagattgaaatgcagcatgctggtatgccggtttcagttttgccgtcaaaagatagaacggtgacacctccaagaaaaatataaaatggaagttccagttttagctgctaggtacttctctttccgatcggcacctcttcttttggggggataatttgatcgataaccaccttagaaacaaaagttcagtcctttttccttgttcattctcggagatctcaacattttctttccaatcaagcataattaggattaccatgcatgcgtgcaaacattcatttctgaagccgaagccggagagcagagctctggtcatatccaaagggggtcggagttttgaactccgatccccttcgacctctttctttctcacgctcctgtgatctagaagcttaaaatgcagcatgttggtaatgcctgcgcctgtgctttactgcttttcttctgaaagaggaatatatgaatcagttttcagtttgccgacagaaaacataacaatgacaccgccaacaaaaggaaaaacaatagtttcagacttttaagtgctagtagaaaggataaaaggaacatttgtatgaattttatataacattcttatgatttatttattcctttatggcagtagaacccagcatacaaaaaagaaaaagtaaacttcagagaggggttcggagagttaaatttcggtgcatgtctctcgctcagccacacccacacacctctctctgtctcttctcctttgtcgtgcatgctttgatgcacacacggtgaactactcgatcgatcaacagttgagcttcaggaccttaagaagaaaaatgcagtccttgattccctgaaatgtcaacatttttctgccgacgaagcgtaaaaaaacatgcaatgcttgcgaggcaaacatcgtttttctgaaggcgaagacagagagcagccgagccgttgtcagatgcagaaggggtcggaaattaacccctttgatttcgtttttgctcgctttctgctcaatctgcatggttatcttattctccacaaggtttaggacgtaagtggcgtcgaagctgctgtgtcacttgggtggcaagcttgataacgataacatatgtaggctgttgtgttgtctcaaatggcaagcttggccgatgccttgtgtcgggctccgtcgtggtagcttaggataggttagttgttggtgtgatgttgtagttgtggttttcgctcagttgtccctaattaactgagcactgtgaggtttgatctcgttttctctttaaaataggatatcttcttcttaatataaaacatcggcaacggcctgaccgttcgaaaaaaaaaacgtaagtggcatatctagaattttcaaaatgggtgatccaacttatatgtttttttaaatattctaaatataagtataaattgttcaaatttacatcttaatatactaataagggagttattttttccaaaaaaaatcttttcacatatgtatatctgtattgggctaatgcttttttgggtggtcccaataccacctctagatccgcctcgtaaggttgagatcgtctacatgctcatgcccgctcgccggccggccacatttaattgttcttgaccctctttacttctttagttgttgtcaagcaaatactaattaattaaaggaaaacgaagtccccttcttttcaactgaatatcagaacatatttatgaattattattattgttgttgttgttgttgttgttgttgttgttgttgttgttgttgttgtgataatatcggacggtgcaaaagaacgagttcattgttacaaattttattagttgtttttagaaagtgttctaagaatcttatatacacatagaaagggttttgcaaacgtttagaagcttacaacataatccgcaagatggaaagaacagggcaagagccaagaaggcaaacaattccatgaacccattgggtacatgcatcttcagcagcttgaaaaagaacatatattatttgatcgccttaatttgttcttcaatcttgacgtctttgtggtctagaataactgaaagtcgcatgctttatacctgcgcctactcttttcttctggaagagggatacgcaattggtttcagtttccagtcataaaatataatactctctccgtttcacaatgtaagtcattctagcatttctcacattagattcattaacatcaatatgaatgtgggaaatactagaataacttacattgtgaaatggaggaagtagcaatagcgccaagacaaagaaaagaaaagtggaaatttcagtggtgatagaaaagaaaaagaaacattccatggattttatgcacgtgcttttgatttatggtagaacccaaaaacacagaattagatgaataaattgatccttgagtagtactctcttcgtctaaaaaaacctaacctaggattaggatgatacataggctgagttcggtactcatggttcccaactcacttccctctttttctgcgtgcacgcttttcaaattgctaaatggtacgttttttaaaaaagtttttatacgaaagttgcttaaaaattatattgatctatttttagaaaaaaagctaatacttaattaatcacgcgctaatggaccttttttgtgctaagggaatgagttcccaaccgagagaatcgcaaccatagtctaatataacgaatctagtcagaagcatgtccagattcatcgtattatgtcctatcccaatcctaaattgagtttttttgggagagtaggaagtacactactactagtagggattgagatcatgtttggagttcaataagctctttgcaaaagaatagttcctgctagtgaagtacctaaatagtgcaatctcttgcatcgagaatcatcctactggataacctgctgcagtggtaactacgactgcaacttaggactgcacgtatcttcagccgttcattttgatgatcaacggtccagttttgccgctacagttatcaaactacataatcatagtaatattttattctacagtacttttgctacagtgctctacctaatcagtgccatctgattcagatcaaacggtagctgctatgactgcataagttgcagtcagtactactactgcagctgatccaaatcctactagtagatactaattttaccctataaacattttaaagctggataaattctttcttttttcttgatgaggacttgctactgaatctgaaaattgaagttttggtctgaattctgaaggcttaaagccttaaaccccacagtgaactcttagagttttcaagtcttctcattgtaagagtaaaccctgaactatttgatcgccttcgttcttcaatcttgacgtcttgtggttgtggtgtagaggattgaaagcagcatgtgttgataggcctgagcctgcacctctcttctggaagagggatacgcaattggtttcagtttcctgtcagaaaaatagaatagcaatagcgccaacaaaaaagaaaagaaaagaggttccagtgctgctgatagaaaataaaaaagaaacattccatggattccatgcacgtgcttacgatttatggtagattccaaaacacaaaaaatattatgaataaactcatccttgatctatactactactcgtacaaacataagatgaatacattctctcctctttttttctctgcggatttgctactgaacctgatgaaatttgaagttctggactggtctgaactatgaaggcttaaaccccacagaaacgaaaaaaaaagaaaatacagtaataaactcttcagttctcaagtcttctcattgaaagagtaaaccctgaagtctgaactgaacatgcaatttccttctagttagttgatcctgacaggtcaagtctgaaccgaagcttcagtttctatcatcctcttcttccccaggttgctgatcctgtcaagcaacgccacgagctagtcaatcaatggccagggattagaataatcgatgactaggttccagtactgtaccaatcaattctctactgaattccaaattctcaatacaggacgcttagggtgtgtttagttgacgttaaaattggaagtttggttgaaattggaacgatgtgatgaaaagattagaagtttatgtgtaggaaagttttgatgtaatgaaaaagttgaaagtttgaagaaaaaatttggaactaaactcggcctaaactgtaatttttttctctccatttgtaatttactggggtgtcattgtcctgcttaccaaaccaactttccaagctggtgtgttttttttttctttgccgcttgtcgccgtcgcatttgagctccacaagtcgtccgtgcgaggtttcaaacgtcaaagtcctcttcacattgtcctgcatatatcttttatattccaagaaatctaaactcaatcaagaaccgaattttaaaacccctttatctttttcggggaaagaaaacctttaattctttacttctaaaaccctgttcagccccaccgtttagcctttacattaccaacataagctaaactttaaaattaaatttaaacttagagttaattttaggttttttctcatgtttatttttaagtatttgcttttgtatcactaagaaaatataactaattatttaatcgttaataagctgttccgctaatacccaaacactaaaatcaaattggcaacttggcatgtactccttaaaaagtagaaattgatatttgtgaaaattatataatctgaaattatagtattatgtgaaaaaagaccggacaccatactccttagacaataactgtccaacggcatctgctctcactgactcactcatctctagaagaagcaaacaaacaccaactactcctccatctatctgtaccggattatcctaatcgcgtttactaaactccgctaaaatctcttgtattcccacaaaatttccccaaaattttttactaaaacttttttctcaagatagaaaaaactatatatccttttggtttgcaaaggttttactaggttatttgcccccctcttctagaacgcatccagaattcgtggactctgcgacccaactcacacggcgaagcacacagaattttttttcccaaatccatttattttcctctcttctctctctcgaatcgaatcgaatcgcctcgcctcctttgttgaattgaatccaagctcgattcgccgccgccgcacgccgccatgggcaactgctgcggcacgccggcgacggcggaggagggcgggaagaggaggaggagggggaagcagaagaaggcgaaccccttcaccgtcgcgtacaaccgcgcgccgtcgtcggcgggggcggcggcggggaggcccgggctgatggtgctgcgggacccgacggggcgggacctcggcgcgcggtacgagctcggcggcgagctggggcgcggcgagttcgggatcacgtacctgtgcacggaggcggagacgggggacaggtacgcgtgcaagtcgatatcgaagcggaagctgcggacgccggtggacgtggaggacgtgcggcgcgaggtggagatcatgcgccacatgccgtcgcatccgaacatcgtcagcctccgcgccgcctacgaggacgaggacaacgtgcacctcgtcatggagctctgcgagggcggcgagctcttcgacaggatcgtcgcgcggggccactacaccgagcgcgccgccgccgccgtcacgcgcaccatcgtcgaggtggttcaggtgaacgcgtgtctccgtgtggactgtggactggacagagtcctgttctatttttttttaccttgttatttgcttaattaatttctagcatctgttgttatgttcgtaaataaatttggttcagatgagagaaattggtggttatgcctcaaataggataattgctactactagctgttatgttcatgaattggccatgatctggtcttttatgtagtgaggaattagaaatcatggtagcatccaactgggtatctggtaagattctgagcaaaatttaattgttgaatttgctagggttcaacagtctgttaaaccttggtgcttgttagagtcacccatcattgtttagccagagtgataatgtattgacaaaggagtccatgtactagtgaagcgcattttgtactgcgagtatggtatattttggcagcagttctatttgtaaacgtataatcacgctgattctagaatgtatgctagcagttcttcatcatgtgcttttcatattaagttcttgctatattggacttgcttttgtgacatctgacatgtattgttgtcctctctactgaacagatgtgccacaggcatggtgtcatgcaccgcgaccttaaaccagaaaacttcctatatgctaacaagaaggatagttctcctctgaaggcaattgattttgggctatctgtgttcttcaggcctggtatgctctgcagactgatgctcaagtacataactttagaataaatggaactgaatctattgtacttggacaaaacaagtagaagaagagcaaatgggattgccccattgtactttgcttcaattcactgcaaatggagcttacttcataggcacatgcagcattcttttcagcaaaactgaatgcttgttgatttctaatgatggattcaatatgcaggtgagcggttcactgaaattgtaggcagtccatattacatggctccagaggttttaaagcgacactatggccctgaagttgatgtctggagtgcaggagtgatactttacatacttctttgcggtgtaccaccattttgggcaggtgtgttctttctcttgactagactgcatgtgttgcggggaagttatagaacaccattcttatcatattattgtggtgccatgcagaaaccgagcagggagtagcgcaggcaattatacgctctgtggtagatttcaaaagagaaccatggcccagggtatctgagccagctaaagatcttgttaagcggatgttggacccaaatcccatgacaaggcttactgcagaacaagtacttggtaagcatcgccaatcacctgtcctaacgcgtagcagcatacataatgctatctcactcctactttagtggaatatatgaaggatatgtctgtactatatattatctatgatgtgattgatgagtaatgaactcacattattataagaagatataaaattagcccagggctatttattattcagggaccatcatgcagggctaatctcagaaaagttctccgaaaaatggctagctgtacccttttttttactgtgtttttatccagaatgttttttaatggcaccatgattaacatttttcatggctcagacatttttttctcattgtttttctctgattttcgttgcatgtacagaacatccatggttacatgattctaaaaagatgcctgacattcctcttggtgatgctgtccgagctagactgcagcaatttgctgcgatgaacaagttaaagaagaaagcccttaaggtagcatttataatatgttagcaccaaaatagattattattcttattgaataaaaacttctacatagagatcacatataatttgcttcctaaattctaaacacgagatgtgcataaggatttttctccttttcttgtagttagcttatttgtgcttaattgcaggtcattgctgagcatttgtctgcagaggaagcagctgacataaaggacatgtttgataaaatggatgtgagcaagaatggccagctgacctttgaggatttcaaggctggcatacgtaaacttgggaatcagatgcctgattcagatcttaagatattgatggatgctgtgagttatcattaaaaatggtctaaactagaataaaaaggactggttctggttcttggcgatacatattgatgttcgctcattgctttgcaggctgatattgacaaaaatgggatcctggactatcaagaatttgttgctgtgtctatccatgtgaggaaaataggcaatgatgaacatatccagaaggctttctcatattttgaccaaaataagagtggttacatagaaattgaagagcttagagaggccttggttgatgaaatagatggcaatgatgaagacattattaatagcatcatccgtgatgtagatacagacaaggtcagcttaatctttccttagcaggccattatattgcatgacattgttcttggtatctatgcaatgacttcaattatataaaagttataagcccacagctagtgaaatctatgaatatcatttgctagaagctgaatagtgccacatacttgattacctggtagccagggttcaaatgtttctacctttggctgcaaggcagggtttatttaattaaagggttggtgaatgttatcattgacctatactatcatataataagttgtaaccggatggacaaggatagtctaattagacgacataaaacaaatgacataacaaacaaacaactggggtaggcttactggagatgattctagtgcaattgttagttgaaagtaacattagcaaagtatgacctgttcaaattccgtgtgattgaacttgtcgatatggtcatcctaacaacaatgcaatgttttcttttcatttattcttttctcaggatgggaaaataagctacgacgagtttgccgtcatgatgaaggccggcactgactggaggaaggcatctaggcagtactcaagacaaaggttcagtaacctcagtctgaagcttcaaaaggacggatccatcagtgacgacacgcaatagactggacagagaaaaaaactacgcttacgttttttctttgctgtgtgctggctgttacattattttttcacacagtaacttagtggctttgtatagatagcatttgtggttttgtgcttaccagcagcgattatatttgtcagtcaggcggcagatatgtatgtacccaaaagagggcgggatggggaagcagatggtgtgcttacagtttactagaccagaattattggtacaattgtttgtagttttgtacgtaccataatacaagcggcgtgaaattctcaactcgttcatcctgttgtcatccagtgtatctgaatctgaaattctgtgtatctgaatctgaactctggaagttgtgacctgttacggtagtagcttgcattgaacttgtttggtttgataccaatatataccaaaacaacaaaatgtcttagaaaattttgtttggtttgataccttaccagtatataccaaaacaggtctactaactccatttcaaaatgtaagaagttttagggctgtacattgatattaagaaacaaatgattggattaaatgagggaatattgtgattgattaagaaaaggaaatatgtatggaatttgaatgatggaagtctatgattagttgataaaagaatgtagatggagacgtttttatattttaagataaaatttaaatgctagaagttattatattttaaaatggagggagtatcaaatttaatagggtatatcaactactggtacaactatttagaactaatgtgagcaaaatttaacaccactaatggtattaatggggaaaaaatcagacaccaatccaaacatcaagatggtactatgctgtttaagtaaatactccctccatctacttttgatagtcatatttccaaatctgaaaaatttatttttgataggcatatttcaatccaataacctatcatcttaatgaatttctcggatttaatgcgtgactccattcttccacacaagattggctacatggacatcgagaaatgtaaatattaatgaatcgtttgtttacgaggaatgactagtagcatgtttaaatagatgataagtagaattacttatccttggtccatgtgccaagatgaaatatgactatcaaactagatggagggagtatatcaaaactttgctggataaaatttggctcgaatccaaatctgcccgtagtcccaagaaaattggctcctctttctcatcatttcggctgacatgagtcaagtgaagatgggcttgatttgggccagtcggaagtggagactccgagaggagtcctagggtgcggcccggcatggaggaggttgggaactgaggaacagaagaaggaataagttcaccagaggtccctcaacttaacagcgagattttctaagttcccttaaccacaaaaccagaaatcttcacccctaaactatacaaaaccgtctaatttgggtcccaagacagtatagatggctggttttgatgacgtggcatcctagtcagcaaaaataataaaataaatatgtgagggcccatatctcactgagagaaaatgatgtgggccccacatctcttttttcttttctttttctctgctcttctcaacttctcagttcgcacgcgcaggcgagcaaatggcggccgacggcggagcgggagctgcggcgcgctgggaagaagcgggagagggggagaggaggcggccggcgccagagaaggggagagaggcgcccggcccgatcgcccatgaggccgcaacggcaggagcggcggccggcgccgcctctccccattcggaggcgggagcgggtggagcaggcgggcggcgcgcggccggagcaggcggagcatcggcgtcagcgcgcggcgttagcgggcgagcgcggccgcggcggtgggcgagcaacggctctgggcgcaggcggcgcgcggccggagtaggcggagcggcggcgtcagcggtcaagcgcggctgcagcggcgagcgagcaccgactccgggcgcggccggagcagtgcggcgggcgagcggccgacgaggtagtcggtgacggagaagaatacttcaataagcttcactagccgccgcctccggagacggagagctcctcgtcggagttctaatccaacgtagctactgcctcacaatttcaagcatatatataactacttgtctaaacgattgattatgttgtgtttgagaattaagatggcggatccagtgagtagcatgaagcatatcacggagatggctctgaagatcaagcatgcggtggagacggtccagagaaacaaggaggactgcctccagatcagaagacgagtgatgagagtgagtatactgtcgctgctgcaggaaacggagaacatcttgagcaacccggcaataagcgccgcgttggaggatctcgccgacacaaatttctcactgtactcttaccttttttgcctctgtaacagcagggagaatgggcaaaagtgggagcggcggcgatggcatcggcatgcggtaggagcatcggcggtcgtggcggcgcgtggtgggagcggcggctccagggggggaggggaacggcggccgtggcaacgtgcggtgggagaagcagtggcctaggcgacgacggggaacatgggtgacggtaggagcgggggaggagtcggcccgcggcgggagcagcggcggcgtgcggcgggagcagcggtggtcgtggcggcgcgtggcaggagtggcggccgccgccgcgacggcgggagcggtagaggcgtcagcgcgcggttggagcaggggaggccgcggcggcgtgcggcaacgaaactgacatgtgggccccacctacttttttatttatttttgggacccaaattaaacggttttttttatagtttaggggtgaagatttctggttttgtggttaagggactaaaaaaatatcgctgttaagttgagggacctccgatgaacttattccacagaagaaaggagattggaacagaggaagaaggtgtgctgtggtgtggctagtgacatgtgggcttcacaagttttctaaaaatatttttgactaatatgccacatcagcaaaaatagctctccatactgctatgagatctaacttaggttgggattaagattttcggtattacgatggagggatatgatttaaactaattatttctctcctctcccgtcttcctcatccatctccccccatgcccgcgggagcatcggggccgaaatgaaaccataagctagcgttggcataaaaacattataaactagtttcatattaatctatttgatttaaaatgggctggttcaattcagctctaatccaaagatcaaacaacaggtagaccccttgttagcaacaggacccgggatttggccctggactagctaggagacaactgaatgtggcccgaatctagacacgtctacgttgttccattaatgtcggggtagggatatatcatgccaaaaaggtaaatcacagcgcaacaagctttcaagttaagtacactagagtagtaatttagacgagcttaattaggttggtagatttctcgaagcagcacgagcagagagcatgtacagtttgctcgtctttttcttcactaatcatcctactagaacatgtgcaatgatactctactacactccttaacatagagatggtaatgctaatatgttcaactgcgaaaattaacaccggacgaataatacactgcattaccgttattgacattataagtaaattcagtatttctatcaattaacggcatcttaattataagttggccctgaataatcacgcagctatgaagcaatcaaccatggcgtgcacgacacgagcaagatctgtagatgtcctgagtagtactactagttctgaattcaaatctttatatgagtgaattttagattaggtcatttttgataagctagtcctgacctgagtttaaatcttcgtaagaacgagatcgggtaaaaaacacccttatataaaaaaaaaacccaaagtgttcagctgatcagctgtgtgtttcatcacaactacttttgctgggatggaaccgattcaggcccatcctgtgcccagcctgacgtggatccggcacaccgttggattcttgaacacgggcccaactcgtgcctggcccggtcacgcttggttaatccaacctcactttccagtttccacgtgttgctaactttgctatgctcacatgcaaaaataatactcgttccgtttcaaaatgttttataccattgactttttagtacatgtttgaccgttcgtcttatttaaaaaagaatgtgaaatatgtaaaactatatgtgtacatgacaatatatttaacaatgaatcaaatgatatgaaaagaacaaataattacttaaattttttgaataagacgaatggtcaaacacgtactaaaaagtcaacggtatcaaacattttaaaacggagggggtataaatggctttgttttggaaggatttttttttaaccacagctcaatagcagtagtatttcttcagttgcagtaaacagcaacattacttatctgcaacattgccctcaatcatggattcatggtgttgagctgacagagaatcagagatggacaatgatttaacttagcaaagctcaaaccttgaagccaatcatggagtgctactggtaacgtccactaacctatttgcatgtgtccatttagcttgtcttgtttcatcgtttgtctgacatagcataaccatgcacttcagtggtgtctgacataactcttgtctagatgaatagatcgaatttgcttttgtataccagttatgagttggatgtgctagcgtatcttcaactgtaaaatcgataggccggtttaagctcttggcacttgcatacaactcagactgtgtttagaccaggggtaaaaagttttgatgtgtcatctcagatatacgggtacatttaaaatattaaatatagactaataacaaaataaattacagattccgcttgtaaactgcgacataaatttataaagcctaattatcattagcaaatgtttactatagtatcacattgtcagatcatgtaacaattaggcttaaaatattcgtctcgcaatttacacgcaatctacataattatttttttcctatattaaatactccatgcatatgtccaaacattcaatgtgagatggtgaaaaattttgtcaaggatctaaacagaccctcaataggtgaagaaaagttgaattcttttcacgagcaaatgtatgattgcagcattctagaagctgccaattctcactcctggaagcataagataagcacttcgagataagctaacaaacaaaaaggcaattaattttgatatatgaggaaatacagacataaagtatcatattcttcaaagtatttgtctaaagatattcttgaaattaaaggtgcgacggactgttatgcatggatggaattcgattccagctttccaggaaacaaattaaaggatcggtttgtaactaaagttaattagctgaaattagaggatcaatgaactgtaacactccgaacatgatgtttaagatcttagaagtacactatacgtcagtaatacaagttatatttttcttccatttctacgagaactcttaccaatttgagtgatattcgtgcattgcaaacggagcttttgacttgttgaactgaaagatgattgattgctgagttcttcaggtgctataatataagagccttgagaaattgagttgatagttgaaagatgcatgattgagtaatatccctccgggaaaagaatgatattagtcttactggtgatcaatacagatttcttctactatgtactagtaatttgacttctaaatatgctagtctgttaatctgtttaagttgtccgttcatcttgtttcatgtaaaatcccccatgcttcacactccagaaattcagataacactcccactactttttaacacacaataaatcaataattagtgccataggtgacaaaatacataaagcaaaaacacagaagcaaatcaacaaacacagacaagagacctagaattctcaaaaatctggaacagatcacaccctggaatgctggaacattcacctctggaatctggatccttcaagagacaccaacaactagtctaccagtatcctagatgatcacctacacgtgaacctactcctctccgggcccacaagtcatccacacacaatctcctactctccaaccatctcctgaaatcccccattttcttcatcatcaatcaaggctgatcagatcagaaatgaagatatttttcgtccagaaacctcaaagctggagtgactagtgagcactttaggccctgtttaaatcccacccaaaactttacacattatcccatcaaatatttgaacacctgtatgaagtattaaatatagtctcaaaaataactaattgtatagattgcaacttgtcggtgacatgggaccgggagtatcatgacttagagacttgaggcagacacgatcacccacgtggcctaaccccctcgggggggggggggggggtcgggcccgagggtgatacggccgcccttctctttgtctccccgaggggtcggaccgctcccgtctcggccccgagggccgaggcgccccgaccccttgtgggttttgcgccgcgtatatggggtaggtgagcatagcggggctcacctaaccacatttattgcggtttggacgagcgcgtcacgccgcatgtaacgcagtgcagcgcgctcgtttatccggtctgtgaccagtcacagaccgatcagatcgtgggttaggtggcgacaggcggtctgacgcacgcctcgccccatcccgtcaggatgagagcctccaagcactcgtccctagccggagccggcgtgttagctcctggagatggcacgttggtcccggtcagatatataccaggcttcatcctaaccattacaagcaagacattgtatgaagaggggcgaacatgcagattgataaactgacgcgtggtggacaagaatgaccgatttgtgaccggtctgacactgatcatgtcgtcagcagacagccatgttcccacgtcgcgcctgcttccggcggaagtggaggtaggtatgggctgtcccatcagaaggtcattcggacggcaaccatacaagtctccgtctgtttatgaaaagagaggataagtccccacaaaaaagagagagatggtgcatgtggtatccccttgaggtataaaaggaggaccttgcccacttagaagggggaggattgattttcggatccagaacgatcagagagggagagagtaagagctctctggttctccagctcttttgtagcttcttcatacatagatccacaaaaacacaggagtagggtattacgcttctcagcggcccgaacctgtatacatcgcccgtgtcttgtgtgtttccattctcgcgaaccttccacacacagactaggagcttagaatctcacccagggcccccggccgaaccggcaaaggggggcctgcgcggtctcccggtgaggagccccacgctccgtcatctggcgcgccaggtaggggcttctgcgtgtgttcttctaagctctcgcactctttcgtgtgcgc

SEQ ID NO: 8887 - DNA, 32349 bp, Oryza sativa
tgagatagaacaatcccctttgatgaacgagcaatttcaattccaaggaagtagcgaagaggaccaagatccttcacctcaaatgcctttcccagcctttcctttagacacctgatttcttctacatcatcaccagtgatcactatatcatcaacatacacagccaagatggtgatgtgtgtccccctatgtttgtaaaagacagtgtgatctccattacactgagaataccccatatcacacactgcatgcctgaacctatcaaaccatgcacgtggagactgcttcaacccatacaaggatttcttgagtttacatacttttccaactgtctggctattcccaaatcctggagggatctccatgtagacctcctcatgtaaatcaccatggagaaatgcatttttcacatcaagctgatgaaggggccacccaaagttcaccgcacaagataccaaagctctcactgtacccatttttgccaccggtgcaaatgtctcatcatagtcaattccatatgtttgactatagccttttgcgactaaccttgctttatacctatccaccttcccttcaggggtttgcttcactgtaaagacccacttacatcccactgcccttttttctggtggaagttttacaagctcccaagtcttattcttcacaagggcattcaactcttctttcattgcatctttccactttggatcctgctttgcacacttccaatcctttggtataggcattgtctgtaatgatgcaataaatgttttgtatgctggtgaaacatgagaatatgtgatatagtttgcaatgtcatgcataaaactaagatgctcaaaaccaagacgtataggaggtctaccagcattggatctagtctctctacgttgtacaagaggtaattctacatgttcaagagttggagaagtattaccaattgtctcaagagaagccaaggaggctggaggagagagactctgggaggattcagggactggacattttgggtgtggtaactcttcaatttgactttgcactaacccttttcttttctccccctgactatcaaaccgcctcctttggtaaaccagcacatccttttgtttcaccctttcggctccctccataggacatggaattgtcccaacaactacttctccttcttctccatcctcttcatgagggaccatttctctatcctcatcttgtgtatcttcaatgacttccactactttactcgcatcatcaatagagcatggtattgatccaatcactactgcctctccattcttgtcaccaacatttttttcatgtatgtcacctctctctctctccccctctcgactatcaacctccatgacagtcgagaattcctcaagaaattgatcaagatctcctttacttttataatagggctcaaactcacgaaatgtcacatccatactcacaaacagtcttctcccaatgggatcccaacatttataccccttctgactcgaagcatagccaacaaacacacactttactgcatgaggatctaacttgccaacagaaggtcggtgatctcgcacaaaacaaacacagccaaacacctttggaggaaccttgaactctcgcttacccaataacagttcggcaggagacttcataccaagtattctggaaggcatgcgattgataagatatgctgctgtcatcacagcctcactccatagatactttggtacattcatctggaacatcagagatcttgccacttctagcaaatgccgattctttctctcagctacaccattttgaggaggggtgccaggacaagtagtctggtgaataatcccctcatctgagacatatgacacaaattcattattgatatattctgttccattatcagtccgaataatcttaacttttgcatcaaattgagttttcactaatttatgaaagtcttggaagcaacgaaggacctcacttttgtgtttaagcatataaatcccagtcatacgagtgtgacaatcaataaaggtgacaaaccacttgaaaccactcacagaagtaactgggcatggtccccaaacatcagaatgtattaatatgaagggctcacagttacgaagaccaattccaacatatgtagagcgagtatgtttgccaagctcacaagcatctcacaccaatctatgcttatccactctactaaagaggtctggatacaacttactcaaaatctcaaaagatggatgtcctaactaacagtgaagcaaactgatctccttctcaacatctccaaccaccgcagctagtcccagttcctcatgattgatgtaccacaacccatcacgcctgactccagtcccaatcctcctcccagtccccttctcctggaacagacaagaattctcatcaaatacaacaatgcacttgagttgatcaatagccgagctaattgagagaaggttaactggaaaggaaggaacatgcagaacagaagacaagttcattgatgatgtgcactctaccgaccctataccatgaataggcttggatgtaccatcagcgatttggatagtttcagagtggatataaggggtgtatgatgtgaaagtattatgcaatcctgtgacatgctttgatgctcctgagtctatgatccaatctataggatgtctatatgtagatgcaagtgcctgtgcctgagtaccttcgcccacttgggcgtagttggcgaagttaccaaagtgagtggtggtgttagagctctcattggtcttgttcttctgccattcctcccattgtgtcacttgttcacctattagggtaacagctttcccatcctccttaactgcattggcctgaggaacacctctgcccctaccacgacctccaacacgacctccacgatcacctcctctaccaccacgatttcccccaaaaacaccacggtctcctctaaatccaccacgagttccaccatgccctcctcgaatcgatcccctaccaccaatgttccgggaagtgggacaattgtagctcacatgacccacttgcccacaattgtagcattccctattatcagctgcaatgtatgctgatcttataggatttgtacctctcatcaacctcaatctcatctcttcttgcaccattgctgaaatggcctcttccatagtgggcaatgtagcttggtggaacatagctgctctcctatcctcaaactccttgttcaaccccttcaagaaatgaatgactcttcgcctctgcagccatttatttccaatcacaatgtcatcctcatgtttcaattgtaggggatcatagtgatcaagatctgcccataactgttgcagctcgctagcgtactcttggactgttctcccctcttgcttcaaattctccactttgttctgagcctcaaccatcatcattacatttccctctcctgaatacatgttgctcagcgtcttccatacaactgcagcattctggatagcttctatcatcctgccaatagaaggagccaccgaggtcatcagccaagataccacagtggaatttgtagtattccacgtcctccatgcttggctctccttatcagaaggttcttcacaactctctagtaaaaaatgatccaccccttttgctctcaacatcagttgggctctcctacaccaactcaaataatttttgctcccctccaacctcaactcatttggcatcaattctagtttcacttcgaatccccctgctacactcttcggacctatcatgcccatcttcaacaaattctctagcaaatctttcatatcacccttagtaaccaccgaggaggcatctacaacctcctttccaacccctgaagacatttcccctccccctttctaagcttccttagtcctcacctgctactgctctctgctcctgtaatttttcagcacacaagacactaccaacagcaagcaacagcggccagccggctcacctggtcgcagctccgccaccactcctgcgccgtcgcccccacgccacggtcgcgcgaccggccgaccaccccggcacgccgctcagcagctgtcgccgtaggtcgcgccgccacctcgcgagtcccagcggtcgcctccacaccgtcttccacttcgtcctgctccggcacgagcgccgccgccggctagggttttgccgccgctggtcgccaggagctcggctctgataccatattgttcaatttggggaatttttctagggttagcctactcagctcaccccttcctcatgtattctattagcataacactttacagataggtccttggtacaatacatatttacaccaacaaacaccaatttagctaacgggcccacactgttagttagtctctgtttgtcactgagatgcaattgatagtacagtggcaaggtctgtgtgattttaactctgaaatccaatgttcagtcctcaacacgttcataatttttacttaaaaacaatatttggccgacgtttccccttcaaatctcttttttttttctttagtctgtctgtcactggcacaggcactcacacgcacacggcgtgaacagctttcacctcatcatgcaaactcatgcaatgcaggaggagcaggacgaagacgaccagagctttgcttgatctgcacttatcctccaatgccctttttctctcatcagtactaggctgaagattatgctccagctgcatgcctgcctgcatctgcatggcatcataaagcagagctactagctgtagcaacactgagtatccagcccaggggacaaaatgcttggcactgtcatgctctgtcagaatcccaatgtgagacacttgcttgtgctggacttaacctcgtagtgatgcttgttttggcctggctttagcttgtggaatattatatgcagagcaaaagttgaatgacacctaatcaacagcttgtttcaggttctttcaggagatcaaaaccagttagtttgcagttcaagggggttctcacttctgaacttgcaatgtcttcttttcacttcttatttttcttcatttcatttcatatctagtgttaagtgttaacgatggttggttctattctacaactcaattacatcaaaaaaaaaaaagttcacactactgtaaggacaatttcattatctctgtggccaaaagttacaagatacgcgcccgaatcaaaatttccatcgcaacacacggacacaatgcttgcaatcaagaaaatacgtcgatttgacgtgagaaaaaggtgtcttcagaaatgatgcggccttgcaacactatcatagagcatgagaagatgaaattttcacttttcaagcatctagtaaaggagctctttcggctcagttgcttggtctctcctttacctggcttctctactcactcctatcatcctatcagcatatatagcgcataccttactgcacaggtcttttctgctatggatggctcacttgcattcaatctcaagtgccaatacctactccaatccgggtgcatatcacatagccctttttttttatcacccttgggctcgtgcaattgtgcggtctttcaggaagtaccacatactagagattatttcaggaagccaaacttagtcacttcccttgtttaaaaaaactgtatatatccggttggatgtaaaggctgagtaaaaatacccttctctaaaaaaaaaaggagatactatcgggaggtatcaaaatttataatactccctttgtttcaaattacttgttattatagatttgtcctaagtcaaacacatttatctctaaccatcaattttttgaaatattgtcttataacgtcaagtgaattattgtaaaagtatttcttatggtgaatctaaaagcataaattttattatgacaaactatataaatttctagaagttgatcattatgttaacatttcatacaagtcaagtccatggatcaccaacctacccacctctctgcatttcatgtcattgcgttgtgcatgtgcattcaaaggatccagatacgattaggtgataacatcttggacagcttctgtgtaccaaattcaattccactccccatgaatgaacccatgatgatcaagacaagagcaatgcagctagtgctttctaggtaagctgtactgcaggtgacaaccctgctgatggttacttaaccaaaaacatgcagcacatcaattatctgatgtcctaaattaacaaatttcgttagatggagctttctccttcgatcggatcgaccaaaccgaaaggaataatcaatcacccgtgcgtggacaggcacacgtggatggtggcttcaatcagatgatttctttttgcacgctttggattttgatttgtctctctcatatggaagcaaacgatgcatggtggattccttgttcgtacgtagtggtcttcttgtgcatcatgaaaggggaggactagctaactgatgcataaatttggtgaaaataattcaattttttttctccatttgtcctttcttttggaaaaacaaatcgtttcagcactggtgaagtataagtgaattgtccgtcttttctcattagtttaagcttctgggttaaattgattagtagtttaagctttttggcaactcaatagacgcaacatttgaaatacaattttgataattaattctcttgatatgagaatatgtataccatgatatgatatcatgttcagtacggtgcattgaaaaccagtgctaagtcctgtctctgtcagcaaaattatttttctgctctaactgaatttcagagaattcaggtcgacattcattgctggagcgaagatgtgagtaactcctgatctccgattcgatcgggcgaacgccattgcagtcttgcattgaaggagaagtcctttcagtctgttgagccgccatgacaacttgacgagcgatcttaagtatgcactggacgcgagctgttcctccccctttgttcaggtttgccaaaaaaaatgtaacagacttgccaacgttacttagttacttttttttaacttagctacagatttgctattttgaagaacagaacaccccccccccctcctctctctctctctcaagcaacctgttgattgcttttttttaaacaagtacaaaagaaattgaaagaaggattgctgatttttagccaggacagatgagcttggtttgcactttgtagttttcattgtaattctcccatttgcatgttctgttttttctgaacaacaattgtatcttgtgttagttttgtgttgaactgaaatcttcagtttgcgacctgaatcaattagaaaaattatggaagtgaagtcgaaaatgcctatatggaccatcccatacaagcccaaggccatctagcagaacatcagagtgccacattgtgaaaatctgctaaaatatttggcccatttggaagaaaggaaatttcacctgaaactattcatgtaaaaaaaaacgagaaaaaaaatctctgaactttcaaaatccttttagccttctcctccttccactccagtgtgtcagcgtcagtaaaaagcatagtgaaagtcatcttcctggattgatccccggccattgctgtcatagaacactggttacagatggtctcttctgacaatctgatatggttgtactgtaagatttgttctctttttttcttcttcactcggctattaatttgtcattttatttggaatttggatcaaggaaaggaggaggaagaaatcactgtcggtttcaaggtgctgtgtcgtgtactaatcgacaaatgaacagtcgcaaatgctggccagattcagtcaggcacagccaagcgatggaatcctaaaacaaaattctgcatctagtagtatctattcatttctgcaatttgatcaaccaaaatatgcacatctagtagatctgaaaatatacaggaggttggttgaatgatattgtacatgaagaacacttggaccaaaccaatataaagaatatgagaatatagatggctatcatagagaacacctggatctaatacttgactatgaaaagaaatattctatcaaggtttctaacacattaaaatccatcgtagtagccaccaaatgatatgcttgcccttgtggatgcacctcccattactgttgacacagcttgattcagtctcgaggcttgctgcacaacctgctgaattctctgcagttcagacaggcaaaatcgtcaggagcagttggaattttcccctaccgactggtgatttagcctacacattatcatcattccacttgatctaatccaatcaaaatattgtgaaattttataatttttaattggcagagtgatgcaatttcgccgaactatttcaactactaacttgcagacacaaggacagcggccagctcaagtcttactctaaaacatgctcttgagacagtgcatggattaagaaatttgagcaaaaggaaatagccaccaacctcattatcagcatacatctggaacggggtcttctgattctgcgtcttgtgcagctgctgctgcctgccaccaagcagaaagatgcacaaggtggcagccgcaaccccaaatgagcagagtgccccaacaccattcactctcagcttccccacactgaaaccattgtgttccttgtctttctgggcaccttcttcctcttcaacacattgatcaggtgcaaccatagccatcacctcatcatcatcgtcgacatcaacttcctctgcactgacgggactcttgatcatctctgcctcctcttctgcatcaaatatctcagtcaccttaggcacgaactcttctcggtacgattcaatcttcacgacatcgatgtccttgaacttgatgacaggatcacccacatagacctcttctgatagatggataggcagaaatatattcttggtctcatcatctaggatacaatcatagggagaagggtgagatgcaggggtgaaatggtccatgttgatcatgatcaaactggcaccaaacaagaactgatcatccttaccaacaacagtgccatggtcactggtgaactcctccatgaagtaggaactcttgttgtcaggcaggagctcccactcatctaggctgattgcatccatggaagcagtacctctgctcatgtcaaactagttcagaagcgagcttggatcacagagagatatatagctgcccaaatgcttttaattttgatactcccttgatactgtggaagtggtcaagaatggatgctcaccaagaatcaataccagcagtgctgaggaaggatactttctttttttctggaggagaataaatggaacaagagggtacacttcttgcaccaggggagatgggtggcaatccaacttgaggggtttgtgtgtgtgtattggcttagtctttctgctaagtgacaaaggtgaaaatgttacctggggcctaccagtgatgactcctcctttcctagtttccttcctttctactcaattctttctaggtttgtgcaagaatcaagattagcagacggcaaacaattaattattcagcaaacatgattagagattgatttctataaagataggatatagtgtcggtgcagaactgtgaactagtctgaagtcagctggagcctcacattcagacatctcgtgtgtaaagagcattcagattaattaattcctctaatgaacatctgatgataataactcaaaatattcctacgaaccagcagtatgttactcagtaatcttacctggacggcagacaaaccttcattaaatatcttgacagtagctgtcgaaggattagggtgccacctaatctgaaaaggcttggaatgtcaatccttttcagtcgacttacgaaaaatgtttccaaaatacaggtccaatatacaagtcaatttgacacagcactggttagtagactggtaacactgtgtagatgataagaaaaggacttgataaacgaaataaacaggaactgatgaaggatagtgacacacaccacttaaacacggcaggcataggataatcagacacatgttcagaaacttctacagaaattttactctggaaagctcagatgagaccatagatagaacccacaattttatagaagcagatttatgaacagggcacgcactcacaaatctccagtaaacaatagattcacatacaaaaggagcatcttccagaaacattttgttagcttcttataaacggtgatgtacatataacaatcacagtaaataaggcatgagtcggcggccccagcttcaggctggtgcagacaacgaccaagttaagagttcttcaaaggttaacactgtaatgattcatacagcagcaggagcaacaaaaattcatctaaaggctactcaaactggcaccacacatctcaaatttacagtagttatcttgacaacaagattaggcattgcatccgcaacgcaaaaggtattcctagtatacaacaaggtgaggccctcagaatttacatgaccatgaggttcccacatgcctgaatggcgcaacaaagcaactatcatatatagctggatgcggaagcaagattaaataactttggatcacatgtgcagctacactaaacaaacagccccgaaaaggttaagcacttaagcttgccgtgaggatgatgattcacccagtgaaacagaagtaaacgaggaagcccaagctcgagcattgcttgcgcctttcctaaggtcccttgtcttattgctcagtctaagcttgctacaaagcctcttcacatcaagtacattcagcgctcgttccaacagttggcttgatcccctacggatccctaagttcaagttctgaacacgcacgaccaagaacgttttcagatgggagacgacgatggggacgaaatgcgctgcaaccttcaggatgataaaaagcaccgcaagcaacacaaatggctcatcttttgcaattttacgcagagatcggtcccctggtgtgactggtctgaaatctccagtactgtcttgatgatcgacatcaaaatatgcaattggatcgaagcctgcaatataaataatttacttcaagaaatgctctgaagcaacaaaggcaacccaaaaaaatctaatcatcaatagcatatccctgtttagttgattggacaatggaatcgattctatacaattaatggttgtctgcattcacaagcatcaatatttcatactaaaaaggttcgaaagattaaaacattatagtaagatggagatcctggtgtgtaatatcgagaaagcatcatggcaatcctaacaggtgcagctaattaccagcgagggaactgtatagtttccaaactaaatagcacccaaaggctatgttctcatttctgggtttaatatatttgaaagttgttacgattcttgtatgcaggaaaagaagagcaatgcttgtacctgtagtttctttatagaagtccaccagagagctgagatcttttgggccccagtatcgtaccattgtagtctcatttacaagaagaatggccgggaatccacggacaccatatcttgaaaacaaactacaataagcagaaacagcataataagcagacgagtcgacttaaaagggggcatgatgcctcacttaaagagacatatagacaacataggagtcaacatttacatacctaggcattgcagatgattcttcaacagtaaagtgatatatctgagggaacatagtgctgagagcttcaaatattggccggaacttgcttgaaaatggacaccaagcagcatagaagagaacggagtacgtaacacctctgtggcgaaggttcaactctttagcaatagcctctcctctcaccttcagtaagaaaaatgcataagttatttacagataaacaataactacaatccagaggtttgcaaactttgcaatacggactatcgagcattatttacagtgccagcctggaagggtatttaattaccattgctagataatcaaatggggacaaactcttcagttaagaaaaaaaaatatcaatagtgactgacattaaagttggtttagagatatcctgaggaacattaatatggtcaacacacattgcacaattcatcaattttaaagactacccataagaaatttggaaatgcaggataatgccaaatttgccctagactgcatattgaaaagcaacaaatctacaagatatccttcaaacacgttgaggaagcgccttcacaagaaatacagcacatagcaacactccaacaagatatttaacattttctaagctttggggcatccagtcagcctaatgttattcacccggaacatgaaatgacaccacataacttggcccgggatcgtcgtctccgtcccaggaacaattgttaaaacctttcaaagtagcatacaatattccttgatctcattcctcaacccatcgatctgggaactttagtgaatttatatttcgtaactatgttaacatcatcatctcaatagctacttcctcctatgtctgcctttccaatcttacataagacactgaaaatccctcctgagtcctgcccgcccgtttcacctatgatgtagtccctccctaccgctagcacctgggcgccttgaatgtcgtttgcgctgccaatcattgttttgttaccttccctcaatcaattcccccgttaatcagctaattgttggcaacaaacaaacgcacatatgcacaaattaatggtgcaatatatttctaaccacaaatcgcacatctatccggtggtttgataacggatacacacaatacgccactgtcgtttgcccgcattttgacaagtagatattccacacgaagaggaacacgcgcagatactcgctgcttctagaacaacatgggataattgaattgacaagctatctgccggagaggaggtggggattggggaacacctacctctacaggcggggatggctcgatccggatgcaggggcagcgcgacgcgagcgcgtcgacgaaacccgggcccctccgcgcgcaggtcgacggggcctcctcctcctccccaccccccgccgccgccgcgccggcgacgaggagcacggccgcgacggcggcgacgacggcgcagcgcgtcatagcctctctctctctcctcgggaagggtgggtggtggtggatttggatttggatttgctcgtttttcttttttccctttttttctccttttttttgcgagatgagctaattttgggaggccgtgcgggtctatagtggttagtggttgtggtgggccacgtgtggcgcgacggttcgcctggctggcatcgtcgcgtgccgaccggggggtggcggggcccgcatgtcagtggctgtaggtcggtttgttacggtggatatggacgaccgacgggcgttctaatcttggtttgtgatctgttgtaatcatcctacgtggctgtatttggaaaaaatctgataccgtgggctgatttttcgcttgtttcggttcttgtttctgcatgggcctgttgttatcattgtactgttttttttttcagttcttttcattgtgtttttttttattggatgggatttaggagagagcttaacaaatgggatagatattcaaaatttcaaaagaaaagggagagatattcaaagtgtaaaatgagataacacacaatagtgttaataacgatatattgagcgtagcacaatatgttaaatttatagtgatacagcctgttcacggattagttttaaacttgacacgcgtgtgctcgtatttactgctaattattctttcagtaataaacgatgtatctatcaatagcaaaaatccttctgataaattcgtgaattttgaaaagaaaaaaaaaggtaatcacatgtgcctcaacgtgggcctaaagtaagtccacacagaatacatgggcctaaattaagcccatattctaggagcggcccagtccacgcccacagcccaacctgcacatgcagctcaccattctcctccgcctcctcgccgccagcccgccacctgcgaactcccccactcccggctgcccgccgccgcgatgcagatcctccggcggaaacttctggaagcttcccgccgcctccccttctacttcccctccgcgcccaccgcccactaccgcggccacgcccatgccgtcgccaccctcgccgccgtcctgcgggaccagaccgccggctccctcgccgccgccccgtgggccgccatccagcgccgcggcgcgaagatgctcggctccgaagtaattccctatctccttggatctgtttacgtatacctgtctccagggtttatttagggttctaagctagttgcaaatatctgctctggttgccccgttacggttagctcgtttcaaatttgtgggaggaactggtttggtaacgtagtagttcattgttgatgtgtttttggataatcaactcagttgaggccactagaaactcttttttaacgattatgcaggatgtaatttggtctagcatctgttggtttcctctaaacttcttgttaggctttttaaatgtgttaatggtatgtgcttttaacaaattcgtcgacgcagtcatgcattcactatgtttacactaagtggtactgttgcagtgttgctgagtatgtgcttttaacaaattcgtcgacgcagtcatgcattcactatgtttacactaagtggtactgttgcagtgttgctgccgttggtgcaggacttggacataattatgcataattcatgaattatctctctctctctctccctctctcacgcataatgatgcttacattaattaattcagggctttcttcatttgtaggtgaagcttggaaacgtaatacagagaagaggtgtgtgtgtttacatgtagttatgttttatttttgccttcaagtattgtggattactacttatcccatccctttggtcaaccttcaaggtcgcatttatcaggtatgcccatttgctatttgggttctgcatgagttttgtggtttatactttatgctcatgtatcttataagaacaagcaatctattatttcttttcttaacttgcttgtgctttggcaggtgataaaagcacaacattcacatcaaggtagaggaggagccactatacaggttttcatctcgttttgttcttttagttttttgcagcacacaacaccgtatagttcagcatcaaaataataagtaacaagtaacaagtaacagccaaaatagttaattttagagcacccctttttttaataacagaatattgcaaagctaatcaaataacaaaatatggatatcttattatactcccgatcatattttttcttcaattctttgatgctgcaggtggaattgagggatgttgacactggcaacaaaataactgaaagatttcgtaccgatgaggctcttgagagtatgaacatctttaaaaccaagacatatatgccttctatttttcagactaattttccttttacgatcatatcatatattacctgttcttgagatattctagcgtgattttaaacgttaatctctttatatttctatctacagatctaactatcaaagcaatacattcttctgaagtgttattacattacattcatgtgtcaagctaattttaggcagtcacagctcatttagagtgttaaacatataaattgtaatcatgctttttttgataggcattacatattttttctccaaaacattcaggagtttttgttgaggagaagtcattcacatatctttatcaggaaggagacaatgtgactcttatggagtacgtttatttcctgttatcctatcattaaacagttgacatgctatacagtgattatctgagtatttactttacttcatttaaccatgatttcacctgaaacctttgttgtcaggcctgaaacgtttgagcaacttgaggtctcaaaggaactgtttggcaaaactgcagcatatctgaaaggtaaagattaacaatattaatctacgacaagcaggaacactggttgtcacaagtctaaatgctaaaatatgcttatggtttcgcttctgtatggcgaggttgtatttttcacttttatcgaaggcatcacctaggggatgccttggtgcagcaaggtcatgatgaccatattaccttgttttatgaggcagacctagtgtgagaaagcggcagtttcgtgacaagtagtccttgtttgttgtgactgtcgttgctcctcgccgcactgcttttggcatttactgttgtcataaactcataatcaaccagactgggcatgagggagcgatggaaagaggtagagatggaagggttgagacttgagaggagggagggggttagctgccttgtatcacaaggtttcgtaatttatctttgtcagtggtggttcacgatgcgttttgtcatgtcatgacatcatacccaatttcctcacttacaacagatgaaatgaaggtgactctgcagtactttgatggccgacctatgtctgcatcagtgcctccacgcgtgacttgcacggttgttgaagcacaacctcattcaaaagggataactgcacagcctcagtgagtctcacatgatcattttcgtttctatttttactgtaatgtttgtttctaatgttcttatgacttttgggttaactgttgctcttactaccttttacgactttgatactagattgttttgatatgctgatgctggtcactgttcacagtttgtggatcaaaatagccattttgcgaaattcagagataaggctagtattatatactaaaaggtttttctttgctattcacagtttatgcctgatggattaggtcattagggtgttaagacttaatttggcatggcttgaggcctattgtttatgagctgcgcaatgaatactgatatcatggggtaggcctttggcattttagtaggcctttttatataaccgacgagctatttgctgttacatgtatatgtatagctttgtagttaccttctagcattgatccattagattgcaaggtccatttgtccaatacttgtgagctgtctcattaagggacgggcttaggtccatttgtccaatacttgtgagctgtctcattaagggacgggctttgaaggaggcttggcttagctcagctcatttaacaactgagccaagctggttcacagcttgtaaggctcaggcttgtttccccagcactatctgtgacatgcgaggctgcggaactgtatctgtcattctatgcactacacacaaagactttttttttttgctattatgagcttcataatctttcgtcaccagatgtttgaggctatgttatgcgggtaactaagctcattttgcactgcagatataaaagggtattgctggataatggtcttacagtgcttgtaagttgatgcgccatttcctagattttattgacctatccttttatataaatgttgaagtacatctaagaatggttgctgtatgtgctatcactttgatatccttttatttgtggcaatgtgtggaaaatggcatttgcagcatacatatgtctctgattgagttactgaaaatcaactctgttttgttctacatctgacttactcaaaagttgggatacacgtgccactactgaaatcaaccttgcttttgccgtgaaataatttactggttacatatagattagtactgaaaattagaaaacattgatgagtctgctgctttgaaatagttcttacttcctgttgcccttctgcgattatcttaggtaccaccctttgtagaagccggtgagaaaattgttgttagtactgcagatgattcatatatgacgaggtaagttctgagagcatcatttgcatattttggcatttcagttacataaactatatacttcggtatttgtttttttttatgaatcttgcattgatgactttgatggccatgtgcatactggtagttaaattcttgacaactttattgaaacaattttgcatttcagggcctgagggcaatacctggtagatggtgttattactccaaatttggttctcagcttgcattttcttgggtaaattttcaaccgccttgttgtagaaagacatcacctagcttcattaataattcagtattcaacaagttctgttctcatagattcttcttttcaattagtcattttgagttttgtttcccaccataaacgcaatcccaccatggtaccccatgaaatttttgtgggaactctgatatatatgctattggtattgagtacttggttgtgtcgtgctgtctatacatttctaagctgctaaacttaagctaggaattctgtcacgaacccacttgattctcaatcatacagcaaccagcgtaagagagaaatccaactccaatgcaaaatacaagagtatttggggatacaaattgagataatagaagtatagacttgaagaagcactttttttagataatgagacttgaagaagcatgggtttgggggctagagaattagagttttcagtgggaggtagaatggatgatgggattaggctgatgcagtctcttcatggatgcctttggctgttgcttgacttcttttatttttagacaaggaaaatgattgtatccccggcctggcctctgcatgtataacgcacacacatggccataaagtttcgagttttggctgctgatttatagctgcatccctgaaccaactaggccaagagacagccaaacggtgcagtctaaagcccctcctgagcccaggttcatgacaaattcctagcaacagcaacacatcacagatttcctggatggacgcatcatttgtcagcatggacataatcctggaaatagaaggtcttctcgatgaagttggcgagccagcgggaggcggcgaagctctctggacacccgacatcaccgccgtctccttgccggcggcgaggaacccgacgacggcgaccgccgccacctgcaaggtgatctccagagccctcatccccttcagtgcagctctacaactggtgcactgcatgacatgcgaccaatacctgttgtttgtggtatccaaacaagtattcatgttagatgatcactgagagttctctccaagagctgaagattgattgcgtgaagatcagtagacagcttgtttacctctccaagagctgatctctggtaggagtttgtggcagctgctgtttaactgttggatttgggtttgcccagccaatctgatggttgcagtactttctaaaccagtttctgtaggcgatgaccaagttgtcagatgatgttggcacatagcaagctttgtgccagttatcaagcccaactgttgtgatattgcggtcctgggaaaatgattaattaattattcgtgttaagaatgacaaaaggagagaatgggctaattaattaattgcacctgttaaatcagcctacagatagcctgaaaaaaatcatttggtttgagcagaagagaccaaatatttcacctcaacatggaggtacgtatccgaatccaagatggtattcgacgtcatatggtagaaccaacgtggtaggatcttgtcgagccatcctccgactttatacctggatgcccagatgaacctgctccttcccggagccaccgggacggtgaacaacaccaccctcacctcgggcttcttcttcttcttcttcttcacctcgtcagcctgcatcatcagagtataaacctcttaacaagttcaggaatataacgcacatctaagttagctttcaatactccctctatcccaaaatataatagattttagagaaatgcgacgcatcataatactatgaatctatgaatctggacagtctactatgatgcctcacatttctgagcatgtccaaatttatggtactagaatgcgtcacatactcacatccctccaaaatcacttgtattataggacggaaagagtatagaacaatttagtgcgatcatagatgtgccgttgatttctatttatttgagctagcgtgtgctaaggaatgtattcgccggtgccttgagtgtattataagcctatgttctttgtcctgggttcccaacctctctccctcattttccgcgcgcacgctttttaaactgctaaacggtgcgtattttgtaaaaagtttctatacgaaagttgtttaaaacaatcaaattaatctattttttttaaaaattagctaatacttaattaatcacgtgctaatggatggttccgttttccgtgtggaggaaataggttcccaacccccattagcgaacacgcctaaccaaaaatctgcaatggcaaagtgaagagaggctgatcgatatatacctctaggtcggtccggaacggcgtgccgtagagcgtgcacggcgccacgaacttgaagtagccccaatcaccgtccaggttcgaatggaacccatcgatgctggcctcttctatcctcatcttcatcgggctgccgtgttccagatcaaactcaactgtggagatttttttttatagataagggaagtttttattaaactcagtcaattacatcaaggtgatacaattatcctgagaacacttccggtctatacataactaagatatacacagccgaacaaacaaaaccacactcgaaagaaaaaaagaatgacatggagtattgaggaccatcaatctaacgactaaattgccactcatgaacaactccttggccatttcctccaaaagcacagagttttaaggaccaccaattctaagactagatcgccacccatatccctgggtaaaaaactccttgaccaccttctccaaatgttgacatgccgcaactaccatatcccgcgaatcaggcttctgtaggatagcccatatacaaagccaatggataagagaatatataacctgcaaaggtgaagatatgacttttttttatcaaaaaccacattattcctgcatagccaaagcgaccaacaagtagcagctgctcctaacagaacatgtgatttcacattattatgaattccatcaagccagctcccaaacatatgcgctacacaatgtggtggaggaagtccagatgttgcttggatgatggaccaaacagaaagggcaaaacggcattcgaagaaaagatgtctaattgtctcgtcattgcaacaaaaacaacagttcttattgccttgccattttctttttatcaaattgtccttcgttaacaccactccacggcgcaagtaccaaagaaaaatcttaacttttaggggtatctttaatttccaaagacggttattaatgttgggaacattgctgtgaattagagctagataatgagacttcaccgagaactccccatttgaggttaagttccaatgaatctcatcttgctcctgagttaaatgaaaaccagtgatgcgcggtgataaattattccacgccgctagttttgatcctataaggtctcttcgccatgaaaaagatgaaggattgttttcgaagacttgtgcaactgtagcgtgcttatgtctaactatgttgtaaaggcaaggatactgttctcaactgtggagatagaagctaagatgaatgtctgaaccagtaaaacgcagttgatcattgcaagatgaaagtttggggagaaaactgaacatatatatcacgacagatgaggaacatatctggctggatcttctctctttgggagctcaccaaaaagccccttgtgtgcgtaggggacgtgagcagggtccatgaggttctccaccaacaactcatacctgcaaacccatggtagtactattgatcgtcaaatttagaacaacagtagttaggcatgaatatgggatgagtctacgttccgatgatgcgggggaaaaatgggacgctgatgtcagcatccgcgtctaatttacgtgcaaaattattttaaactgatttttctcttaaattacctatccaaatcatgatccgattgcaccattaaattcattacaattaaatcttcaaaacaagaccacacattgatatattccgacgaaaaaaattattattgaattatttttaaatgttgcacgatgttccactaggtatatcggaattgtttcactaagtagatcgaaaatgtttcactcgtttaaatcgggtgttgtttcaccttatataaaaacaatgtttcagcaaatagcgaaaaaaatgtttcagttcactgtaacatttgatctatacatagtgaaacattataagtacaataggtgaaatatttttcggtggaacaaaaaataaaacgaattcccttaatagggggtttccaaaatatgtgggttttttgtggcaatggaatatttcagttcactgcaacattagatctatacatagtgaaacattgtgagtatactaggtgaaacatttttttggaacaaaaaataaaccaaattcacttaatagagggtttccaaaatatgtggatgatttgttgcaatggtagatgagaacagagaacgcggtggggcctatggcctacatgtatgcacgtggggggaggggcgtgcgggggagcgcccgatccggctcccccgcgccggtcgcccggattgaatcattctcgatgaatatgtgcttgataaccagttagccgtcagattagttttttttaccattaattaatctggttattaggagctgattgggatagggtgagtggctaatgtggtgcttcagcttttaatttagtccctaacattttaaacaagctggcttaatatagattttagactagccaaaaatgcctaccatttccctatatttttattttcaaaaaacaaaccatttaacaatttggaaaacataaacgtgaaaaataagtggggtgaagttaggaataacacaacctaattcagtcgtgtacatccatcaacgaatttgaggattctttgttgttttgctcagaagaaaaaattctcgcgtgtcggaacgaaattgagatagttatcgattcaccggccaggttcttggcaactaggacgtacgcgttgatgtgcgcttgtgcgttgtactctcttcatccataaaagtatttttgacaccaagactaaaaagaaattaaatcatcttaaatattaaaaaatcaagaagtgaatacaagcatgcaatcaataagtatttagatgactccttagattttaataaaacatttaatttatctcttcatttaaatcttgagtgtataaaaactacaaatagtaacaacttatttgaaaaaaactcaaatgtgaaataggtgtaacttttgtggatggatggagtaatatattttcatggagcaacaagcagtcaagcacatctcaatggcgcgacaagaaatactccctccgtttctaaatgtttgacaccattgactttttagcacatatttaaccgttcgtcttatttaaaaaattttgtgaaatatgtaaaactatatgtatacatgaaagtatatttaacaatgaatcaaataataggaaaaaaaattaatagttacttattttttttaataagacgaatggtcaaacatatttaaaaaaatcaacggcgtcaaatatttgggaacggatggagtatttcagagaagagaataatggatttgtttttttctcttctttttacccgtataagaggtccctgacaccgtagaccataaaatgggacgggtcatcgtcgtcgatctccggaacgtagggtggccgcttcctcttcagcacgtcgcagtactccggctccgacctcgggtagaaccacaagatgttgttctgcaccacgctcgggtacgacgccacgcacgccttgctattcttgtgcacctgccataaattgatccaagaactcaattaatcctaagaaaatcttgatatattttttgtttcactttgctgattgatcgaggagaggaagaaaaaaagtacaggagggccgagggcgggagcctgggggatgaactggcaggagccgtggccgtcgaagcaccagccatggtaggcgcactggaggcggcccttgccgtcgacgcgtccctccgacagcggcgcgaggcgatgcgggcacgcgtcgtccaccacgcgccactcgccgccgccgtcgagccacgccacgacgctgaggcccatcaccatcttcccgtgcggcctgcgcgggtcgaggtcgcacaccggagccacgggatgttagaataattgggctaggcccaacttataatattaaatctcaaaggcccataataaatgttgaggataataataccacctctggatttaagcgagaaatatctcaacctaaatagggagttattagaggctccctgttgaccagttgaggtgggggtcggaatgccacacgcgcgcgcgcgccgggccgtggctggcagcgtgcgtcacgtcgctatccttttgcagccactaacccacgttcccacgattccctccgcaacagcgcgtccacgttctttctcctgatagataaggaggccgcgagtccgatccgagttcctcgcttctttccaggtcttctttccaggtgttagtttctccttctccgcttccccgcttctgatctcttgcgcgcacgagagattggaagaagcagtgcctccgaaaccacaccttcgcctgagatctgcaccgggtaggcgggtgatcaggtttttggggagtgcctcctgcacgactgctcatcgccatgtctggagttgctgccgccgctattggcggaggtggtacgccgccgccgacaggagctgcgccgccgccgacgccgacaggagctggatccggagctggtgcgccaggaggaggtgccgtgaacgactacaacaacggaggcaattctgcctcaccatccagcggagggccattctcggggtataatcttctccttctactgctgttagcgctactcctgttcccattgttagcgctatactgtgtgcgctatgttcttgttcctgttctacatgatgcctctagcatgttatcgcattactggtatgttcctgtttctgacattcatgatgcgcatagtatgctactggttatgttaagatcaccctacactgcttatgccatgatcatagtttcaatttcttggattaaaatatgccgaataatgactatatttccaacacgggataccactggtccagccactcgaaccgctcctccgcccctaccaccggcggcgccgccaccgtctcggtctcggccgacggcgccggcattgacgacagccatcccgtgctggtgcatctcggctgccggagccgccgccgtggcgctagactggctgcgcgtggcctagggacgccatggcggagaggaagcgaagtgcgcgcccggaagagcaggtggagggagaagggagccatggcttccgggtgcgaagctcaagcgtggcaaccaacttattatatctgcagtgggccgaagatggagcctatacagacactgtccgtattgctgacagcatcaaaacatgccgtagtgtgtaatccacaagaggaatcattttattgctagtactattttcatctactggaagcttaatagaaaccactctccgtccaaatataaaggagtaacaacttctagcctttaaaaattaacgtaaaatataataatttcttcaccaacattctctttccaaccaattacaatcatcttccattcaattcagtattcaacaagaagttctagaattattttcagagctgttgctaggtgtgaagtgatttcggacatcttgttctgggatacctttggaatgggtctattggaagccaaacacatccagaattatgtgctcactctttagacagaagcatctctgtaaccaagttatgctataacggccccatcgtttggcttatttatgaaataaaccaaacgatatatttgcaaataaaaagtattttgtgaataaaaaatttatatacgcattcttagcgatctataagcaaaggctaaaactaaactttgatgaaacaaaaaatctcaaaatcaacttcaaatttaaggttaaaattcgaattttagcagataagcatgagcttaagtgaaaacatgaggccataagcctgtagaggattgcttcaggctacctcttaatgagaaaacatatgtccagtttcaggctcttcagatagaggttaatgatttacaattactggatgtaaacgaggataaatggagctatatttggaactctccgaattatacttcacagaaattttacaaaatgaactttctaggaactacccctcccaggctatacatttggttgtggaaaacaaatgtcatgaaaaccaaaagtttttatacggcttatgtttactgataggtaaacaccaaagacatgtttgatagacgatattgtgcagtggggattgtctgcagtactgcagctgcagtagcagtggctgataggctgcagtactgcagaggatccatgtccgatattgtgtcctaaaagatgttggtctatcatgtttactctgtcctttggggatcagagagacattaatccatctcttttttcaatgcccttttagtgtaatgtgttgggagagaattgggatcaaatggaacacaaatatgaactttgtaaaaatccccctggcgcatgggtttcatgttctttccctgtgttaacgccaaaatttggtaagcccgaagttatcatcggcctagagtcagtatcggcttcagagtcttagaatcagctgatgggagtcgtcaaatcgccaacagttgtatttttggtagagttggatcaattaaaggaaatttatccagaagagtccgagttcaagaaggatatggcatggcggtttatctattaattaggaagtatttgctagtttccttttatctttaggaaagtgtgtttagtgtccgataaggactttatgttttccttttatctttaggaaagtttctttcttgtcctacaaggactagtatctctccatgggtataaatatgtacacccggggtcattgtaaaatatctctcgatcaatacaattactctcggcgcatcgccaccctctttcctgaggttttacttatcatccggcggaatttggcacctgacgcggggctgcatcggctttcgatctccggtgaaggggtaagtcctacgttccgctggccctggtgaatctgtcggctacgttggtgttgttcaagactgcatcgtttcgatctcttggatcgctctggtttggttgatatatttgcctacctgatatctcaattctatctctaattacattgtgtttagagacacatcggtttagttgggactgtctcggttaggtccgattatctgtcttagctgatatatctctaaaatcacaatgttgttctaaatagatttgttatatccatcacattagatagatctatcagctcatcaagtattagattatcatatacaatctcgtgctgcatcggttaggttcgacctactagattgttgttgataatataagtcttgctaagccgataggttcatgctagtgttttatcggggtgctagccgataagttatctagacgttgcatcggcttataaggattgcatatacatataagttggatttagccgatgacaacaaagacttcactgtttaatctaatcttgtggattttatgacatgggacctccagccgatgtatgctttaaccgtcggatcagtgcttgttctattatatcatattgctatccaattggtttatactggattatattgttattttattacatcatcatcagccgattgactttatatcattatctacattggacatacaaccgattgcttaaaccctatcgctatcggctggtatcgacatcggctattatcagatatcggctggaattactccatcgacttgtcagccgatcggctgtttgatctactgtttgtaggatcaaactgactggtacacccgcatctcatcaatctttggacctgcactggagctaagcagatctcccaggccagtgtgtgtttttcgcatccacaccccctgtaatcacccggtccaccacaaatcttcgtctctcccacaaagacggtaacgcaaagctgctcaacgatggcgatgatgtcaccacacccacaagaaagctgatacgaaacagcgatcgacttaggccatagaaacaatgaatcaagtgctaaataggtatccactttatcattcctaaaattcttctttctcctattcgttctttccaaaacctaaatctttaattccactttgttatatgggaatcatgtgctaggtaagtgctgagtgcacctgatacgttgcccatttgcatattttgacattctagttacataaactatatactttgttattttttggatgaatcttgcattgtgtgtacaggcaattagattctcgacaagtttactgaaacaattttgcatttcagggcctgagggcagtacctggtacatggcgttattacttcaaatttggctctcagcttgcatttgcttgggtaaattttcagccgtcctgttgcagaaagacatcccctagcttcactaatagttcggtcaacaagttctgttctaataggtgcttttcaatttgttgttttgagtttttttttcataaacgcaatcccaacatggtaccccatggtatttttgtgggaaaactctgatatagctattggcattgagtacttggttgtgttgtgttgtctatgtacatttctaagcggctaaatttaagctaggaattctatcacgaagccacttgattctcaatcatacaatgaccagcgtaagagataatcaacctccaatacaaaatacaagagttcgcccagctaatctgaatatctgatggtcacagtaccttctaaacctgtttctatagccatatagctatctagattcataatactatgttgcgtcttgtaatactaagttgctatattttggatgaaaattgatggaccgacaaaacgttctgtagcatgtaactatatactgttctgtaggattaataggaggaaacatatgcttctatcttcaccgaaaaagttgtcacatgaggaaccgtatgcttctaagtgatatggccctgggagtacgcacggtagagggaaataaacttcccatctagccacgtggccgtgcggcctgccttttctccaccccctcgggaggaggttaggtagttattaggtggtcaggggggcctcggggtgccacgtcacacccctcgggcccgtgaggcatgctgccccgaggcccttacccggccaccacgtggcggggtgagtgggcggagcaggaggcgctgttcagcgtcataaatgagcggcaccccaaccgtccctcactgcatttaatgcggtgtgggcggacgtgcggcgccgcctgattgacgcatgtcaatcgaccttgaccagtctgcgaccggtcgtaggcggataggacaggtggtcgtgcccccacgtcccgccctgtgtcaggcggagtgggggcaggtatgccccatcccatcggcacactgccaagtgcaccccctgtacatggtgaatccaccaaagtctccatacatttaagagggaatgacagggatgtcccccgtgtcaggtggaggacggcgctggccccacctaggggcggacaaccactttgcttccggttgaaggcacggatagtgatctgactcaggctatgtgggcccccctcccatggaggggtacgtatgaacggtgcatgtggtatctccttgaactataaaaggaggactttacccacaaaaaaaaacagggacgactcttgatagctgtcacgccccgaactagtaccgaccggaactagcccgtgacgctccaaattaacctgttaaccgataccagtcccaggaaatagtgctggtatcacaggaagacagaatatcacagcaacagaggtctctttattatagagtagaggtacagtcatgttgggctgcggacagatcccgagctcacaactgcattacaaaagggaaacggaagccagggctcggaccaaacatcacaggcgcgacttgggaactaggccgaaaccctaaaactcaacgtagccggcttgctcctggaagaactcctcatcagccggatccgcttcatcttctttagcaactgggggggaattatttatatagagcaagggtgagtacgggagtactcagcaagccaagggaattaagtgtttaatgcaggcttcaagggaaggctgttgtttttgcaattgattttatttgaactcttttctgaaaacaactaagtgagtgcttctcaaacgactcggatgagacagagcgtctcgtccggtcggagtatgtatcagtctttagaattgaaacaaggttggcacccggccaacagcttttcaaacggccacccgggccaacaacttttcaaacggccacccgggcctagctgatcccatcagctgctgaatctttcaaacatcgaacccctttccacaacagcaatttcacaagcagtagtcaaacaaaactacgctaggaatcacctcacatccgcccatgaccgtgggcacggctgttcgaacagtttgttaacctctgcagagggggtacactttacccacacgacattactaacccggatcacccagcccgtggggatcagccacgtcgggagacctccaagctttcatgacaaggcatttccaaagccgacacaggtttaccatatgccgacgagaggggtcccagaccaacaataggttaggtcccagaccatactgtgccaggaagcccaggggtcctccccgacaccaccccgacgaatccacatgtctctcggcatcaaggctcccctgataagctagttactcagccaggggtgtcccattccacccatgtggtcgtacttgtcttatgtttggatgaaattccaaggaaacggtccttaagtgcaagagcgggaaaccgtacacccggtacgttccccggtccgcggttttggaaattcatttagttcgcaagcaccgacccaggtgtcgggttttccaagtctcttgtaaaacccaagttttacccaagttgtttttcagattttaagtttgaaggcgtccgtcgatactcgcactgggtgcacgaatatcgagacgcaactggatggttacaaggggacatggtataacaattaacaattgagggatcagatgcaacaagttaggtaggtccgccaaactgtcatgcggacggaacaagcagattgagtgcgatcctatcaatgcataatatttttcaagcaacataattaaattcaaatataggctcaagatgttcaaaggtggcttgccttgctcgagatctggagcttgatcctcgaaatcctcgcactgcgggtcttcgggctccggaactacacgcgaaacgggacaactcaacaaacagcgaaaataaagccctattaatgacctctaagcgtgccattagatagatctcgagatttgaggaattttggaagttgaacggagtcaaacggacttacggttgggaagatattgaatttctaagattattggatttttggtctaaaggaaaaaggatttaattaaatcctttttggaaaagaaaaagaaaagaaaaggaaagagggagggaaaatagacttttctcgggcggctagggcgcggcccgagaggaagagcggctcggccaagcttaacgggccggccggcccaagaaggcggcccaagtgcgcgcgcgcgggagggaaggagagagagagggccggtggaccgggctcaccgtgcgcggtcccgggtgggacccgcttatcagcggctcggctcaccgtgtggagggagcacgcggcgcggcgctagggtggggaagggacgcggtgcacgcgcgcggttcgcggtggacgcggatgcggcgggcccacgcgcagcctcacggctcgcggtggaacgcgcgcacggggagggactgaccggggtcggctcgacccggtctaggctgagctggcgccgacgtggcgcctacgtggctgccacgcgggccggcgggaggtagacgacgacgccggccggaacggtggtcgacagccgcgagcgacggagcaaaccacggcgatacaggcaaaagcgagcacaccgggtggttgcacgtgacgaggggagacgaggcaacggctcggatttgccgggggttgctcgacggcggctgattgcggcggcggcaa

SEQ ID NO: 8888 - DNA, 68291 bp, Oryza sativa
tcatggattagatttcgatcacagttaagggtcacgaagtgaacttattccttatcaagctgcatgcggcctatactggttgggcctctgggccggatcggtacatcgagctccctgagatcagttactaactctgtttttaaatatacgataccgtttgtttttttataaacatttgaacattttcttaaaaaaacatttgaatatttattttattcaaactttttatatatataaaaataaattcatttttaaaaacaattgaatataaatcaaatcacaataaaatgagtgataattataattttttttcaataagactaatcatacatatcttgcacaacgttgtatattaaaaaacggagggaataatattttacgtagaaacgggaatgtgagcaccgtcatgtatgactaagaaacaatcaaattttacacgccatgaatgtgtcatattccaacatatcaaggggatcctttcgaacaaacgaaaaaagagaggaatttatacaattgaaatcctatgcaaaatttttccaggtgttcctttgaaataatggaatgcgcacttgagattgctacaaaatttctaacatgaggttgtacctcatgggaagctttcgtcgggtctatctctcacccaaaatcctatactttctctatgaagcatccaaacaaaaaaatcacatagttcctacattttaaaattcctaagcatcaacttagatatgccacctcgattaattcctacgtttttttaatgtttgtgttttttattcctgcgtttgaaaagagctctgcttttcttcagtgtagtttattatgaaatttgtgtcgcgcgatcaacagataaaatgagaaaataacaacagacatgccagcagatgacgtgcttgtgttgtaaactttaccagatcctctctagaaccaacagcaagagttgtaactcatgaaataaactgtgtcgacgaacttgacccaaattacaagtattagttgctacgttgtacttgtacactgtcgatgaaatggaccaaacagtttgcagcttcttcacttcactcaccaaatgaccaaactaaaccacacgctatcagctagatcttaatctatacttaaccctgaatgcatcttgaatttgtacccattacactggcttggtacattaattgtacacttaatatacatacatatacatcggactcgatcgagcaggaataatttagaatgctctacctaacgagctaaagtttaattaagttgagcaactcaaaaagaagtgtatgcgtcaggcagacagatcaggcattatttttcagccaatcttctcagtgttggtgtcgtctgttggccagatgaccgtctccatgagccgctctcgcatcaacgccaggttctcgtcagatatcctctcgtacatcatcgcatggtcacatttctgaaagatcaaaaccagaatctcatttggttacaaacttcagagctttgtgatggattatctaagagtaccaaaaaggaatcaccttgatccatttgctgtacaagtgaagcctagttatcatcactcgctctgcaagctcctgcttctcctataaaccaaaatgaacattcatgcgtgtgcaatttttctttagttttcagtttacatttgtatcgttcgaaagtttaaacaactgtggagtagtttatatatttacctttccaagagcacgaaggaacactttgccatcggtaggcttgtttacagcaacgaagctgaaaccaatgagaagcaagaacacaaattcagtaatctgacagggattttgctgattgatttgtggaataaatgggtggcttacttgtataaccatcggtagcttggtgggttcatttcgtagagctgcgtgagcacggtcttgacggctttgtaggtgaacacattaatcagttgctgcgcaaacaagaatgaacaaaaaaccaaatcaatcgatctcctctactcatcccaaccatgaaaatctcatcaaaatcacagcattttatatatcagcagtagaacttcaactctttacgttaggatctgctaacatggattaattaattagattcggcatgtggggaatgattataagccgcaacgcttaatagcgaaaggaataatttttcgataaaactttgttatatacacatatattctttacgacttaaaaaaaaattcaaaatcaactttaagattaaaactaaaattttaaattttagctacgtctgataagttaattaccacgtggatgtcctcgaaaccttcatcgtaggtgccaccgaggttgcagacgacggcgaggccctgctgctgctgctgctgcctcctgcccctgaccctggccgtgcacgccgcccggcgaggccgccgcctccagtctccggcgaacaagctgctcacgccgcggcccctcctctgccccgccgccctgcagctcccttccgccgtcgccaccgcccccaccgccggcatcacctgcaccccggccatcctcaccctgccactctcttcttctccaacgcagcagcagcagcagcagctaagatagtttcgtgatcgagcttggtgtatatagcaaccaagtggcagaagaagaagaagaagcagcaagaagaagaagaggaagaggtgttgaattgtagtttggcctcggcttctcgccgcttcgtcgtcgtggctggccagtggccgggatgcaactctgaccaaccaaattttgtgaggctcaggaggcagctacagcctacacagctcgtcgtcgtcgcggtattttcagcggaatgctggacacgcggcggcgagcgattgggcgcggggaagattccaaagggcgattcggcactgccgggccccacgtgtcatggacggagagaaaccggtcgcgtttccggcaggttcggtgaacctgaagcacaaagttggaacggcgacgttcgccacggcaagcaaaaagcaagaggatgagcgttttcttgcaggaacaggaaccgatttctggcaacttcttgtgtggtgcgatcgctgcacacgactacgagcacgagcacgagcaatgaatgatcatatatacttacagctatacaggacaattagcacattgtctaaacacgttgcgtcctcgtcatcaacagcataagcaaatgaaaactctgattttcgaattttgggggtaagagaaaacgatatcccagtattccgttcatactggtcgcagcagcacgagccagagcgatgaaccgatgaaagtgaaaccaccacaaattcagaaacggcagcagcaaattcagagacggcagcacagcaaattcagagacggcagcatgattaccaacttcaggtcggagcaaaagttaaaatgatgcaacaggaagaaaaacatcaccgcactgaacttaagtggtggtggtagtagtatatggctgtatatcaaaacagccagatcatgatcagaaaattgaaaacaaaatggaaaattaaggatgctctaaaacaaaatgatcaaggctataaagccatatactgaccatgatctataaccgaacacaacgaccctgcacccagtcatcttcagatactttcaggacaaaatggatcgataacataataattatgcagcattcattgataaaagcagtatcacagtaccatgatccaaaacttgacaggaaatagaaacatccagacgcagcacaatccaaggatgacaaccggttcttaactattgtaaaacaaagtgcatcagacaagtccgagctagcaaagactctctttactccgccatcctaagcctctacgttctcgacaggtgcatcaatcataagagccttagtcggcttggccaagaggtcggtgtactcctggaatggagacttgacgaacttggtgtccctccagaagtcaggagtaaggaatccataagtcttcatcaggcagtcaaaggtggcctgcacaaaacagatcatttggttttaatagaggataaacttaccactaagaatacatcaatcaagcaaggcaaactaataagaaggcctcaagccatcacagagtatatataacacaatcaaaccaaagtaaaaacgactgggtgtagaagacatgaaaacatattacatattagatattaacactccctgtttgagtaggacttgatggcatcaatgtgcaaacagggcatacgaaatgtttaaagaaaagtttctattagatgatacaatgtgctgtgtgtataggcacgatatcaagcagacaggatacactaataagcactgtggcataaggtaatgaccaatgcacaaaaagattaaagatcaaacaattacagcagcagcgtaagtgtcaataatcaaatagacccatgaaatggttcattgacagcagacaatagtaaatccatactgatgggcagtaagcctgtaacaaagtaaaatattttgaacccaaccagtttaactgtatcgaattagatgagtagaatactatgaatcaccttcaaagatgcatgtgtatgtacactaagaacagtagtctcattgaacaattgatgctaatatacaaactgtgatatagtgagaaactatagcataatgcagttatattccacccaattcacatcagaaatcaacaatactatgcctacttgccaagcacacataaatctatcattcagtaccaaacactaaatactcatagtcagagaatagtatataaaataacaaaaggagggatgtgttataccttgacgaagttgccaagggtcttggtggatccacgggacgaggtgaagacatcctcaatgccggcgaactgcagcaccttcttgggcacgcgggcggcgacaatacccgaacccctcggggcgggcaccatgcgcacggtgacagagccacactttccggtgaccttgcacggcacggtgtgcggctgcccgatcttgttaccccagtaacccctcctgacgggcaccacggacagcttggccaggatgatggcgccgcggatggcggtggccacctccttggcgcacttgacccccagcccgacgtggccgttgttgtcgccgacgacgacgaacgccttgaaccgggtgcgctgcccggcgcgcgtctgcttctgcacgggtgtgatcttcatcacctcgtccttgagccccggcacgagggtctccacgatctggtgctccttgacggggagggagtggaggtagatctcctcgatcttggagaacctgccttccttcacgaggcggccgagcttggtgacgggcacccacttctcctcctcctggcgcgggccgcggcgcccgccacggcgccctccgcggtcgccgcgaccgccgcgcccgaagccgcggccgaacccgccgcgctcgccgccacgctcgccgccgcgctccgccatggctggcttgagagggtgtggattagggttctctgggggtgggggagtggaggcggctgctgcggcggcgcgaagagtgggagaacgagattggagaagggtatttatacgggagggttagcgcagctagggttttgaggtgaggatgcggcgggccaagtgggctgggcctcttcggcccaatatgtagctatttgagttgtttcaggcccatcaagtgcatgggccatggaattggggacgaatggcctttacctagcctgtaagcccattccgaattgccttcgcctagcggcttcctccaccgcgggatcattgggcctgttcggtagtttgtttttgcagctgttatggctgcactggatagtccagttgttcagctgtctatcaagaatgcatctcagccagctcttccgaacaggcccattaccatttgctgagcttgacaagtagcagcagcgtggctccgcttccactcgtgcggatccccactccctagggggtcggcagctctacttgccttccccggcctggccgagccatcctcctcctccttgttgtcgtcaatgtgcaccgctcatctctccgtcggacaccgtccttctcgccaccagctcctctcctatcggccaccgcccttctcctcgtcatccgctgtgccgtcattcctgtcggccattaccctacaggggattggaaagacaagggagggaggagagagaaaatgttagccacttatatggaggggtagtatgggtcccacgttgattcagcttgtcctgtcaactaaaataggatttcgaataatccaaatttgtaaaatgaggaagcccgttatatatagtatttcaatttagggatgaatttcaaactcgaccatgctagtgatccatctttggtgggccaaatggaggcccaaacctgatcggttgggctttaccttaggctgccgatggaagccttgcttctagcgttgggcttgctaataatacagcgtccggcgttcaatgccaacgagccctgatcccgttcctcacctcaccggcggcggcgaaacgcctccgactccgagcaattccacttcgtcggccggcggccggccgattacccacgcccgtttcagcagcgcagcgaccagaccatgtgcagcatcagcaacgacgccaacagcttcgacctcatcgatggtttcctataataaccttttttgccgacgcttgtgtccgcagaatcatggcttctctgttcgagcgtcgccgagatctcggaggagcccatgttccacacgccggaaaacaccagtgaaaccaactgtaatggtggccaatccggttgataacatcatcaacgatcgatagcgacattacaggcaacaataaccatgacacaatgtttagctagatcacacgaaagttcaatgtccaaaacccaaatcaccaatgcagagttttacagacacgacgtctaagtagagcaattagcaaaccatgatccgaaaggagagctctgaatcgtagggggatcatcacgccttcaatggctggaccttgacctgatccagcacggggccgcacagcgagacgccgtcgctcaccttggtgtggtagtacgagctgtagaaggtcaccctggtgcgcacgccggcggcgacgaaccggaagctcgccggcttgaacccgccgtttccgacggactcgaacggcaccttctgcgtcacgttcccggcgaacgcctccaccagcatcgacccgtggcagccgttcttggcgtcgccgacgacgaacgataggttgtaggcgcggttcgccaccgtgcggatcacctgcgcgatggcgctctccctgccggcgacgagctccacggcgtactgccccgccgggacggagaagtgcgccgcgtcgatgaagcggacggccttgagcgactcgatgatccagcccgggagcggcgacgtcgcgtccttctgcttcggcggaaggaggacgcccaccgtcgagttcttgaacacctgcggcccgatctcgaatccctcgttcttgatcaggttgtctgcagccatttgttcgtcagattaattaccagcagcaatccatcgttcagacaatgatgcggtctctcttacctttggttgggtatggcgttgggagctccttgatggcgacggcgtcgagcagggggccgcacgacgcgtcctcctggacgccggggttggagaaggtgacctgcgcggcggcggaggaggcgcggaagccccacgcccaggtgtcggcggtgtcggcgctgtagagcgtgcggacggcgacgtcggcgggcggcgagagcgacggcgcgacggcgacgcggagcgcctcgtcctgggcgcacgtgcgcgtggcggcgaaggtgagcgcgtagagcgcgccggggcgcacggacacgttctgggacgccgacgcgcggccgcccaggcggagagcgtgcacgccgtgcggcaccgcgaagaacatgccgccgggctgcggcccgccggagacgtactcgacgtgcccccgcagcgtccaccccggcagcgagtggcggccgacgatgagtgtcttgttcaccttcctcggcgccgtctcgaagttgccattgatgaggaggcctgggtcaccattaaaaaaatatatcaaaattcacttgtttgcttcaaatgtctacatgattgttgctttctttaggattcaacagctaaatatagcgctgaagactcttaaccaaaatcttgcaaaatgcaaatgcattacagatttacagtaccacaccattctggggaaatggattgagcaacaacaaaaagtcacaaaaccgatggataaaagtgagatgaatataagtgatgcacaagacacgaaaatgcagtgtgccagacacattcttgggctcttgccaagaacatttccacaggtcgaggtagtaatgtgcttgcatgaatgtgatactgaacttgaaacaaaaatgcagaaatgaaactgtaataactgaatctttctttgcttaaaagaaaactgaatctttcttcttagaacatttacatctgcaagaaaatgggatccaagaaaaaaccaagaagatgtgacagagaagagaacacagtgagctgagacctgagagaagaaccataccttcagcatctttaggttgaggaggtgcatgggcaggggcaggagctggaactggaactggaactggagctttgacggcgagtgtggcaccggcggaggaggcggcggcggcgacggcgagcagcaccagcagcagggcaccccgaggaagctccattggtaagctcactctccagcctccactgagttcagctctctttcgctttcactttggctgcttctcgctgacgctgagagttacaaggaagcaagcagccttctattttttttcctcctttattaccaaaaggagtgggaaattgcatacagaacctcccacgctgtcggaattacacatcagagactcattggatagatataattaatctctaaataaatcgtgaatcaatatttagttgggactttttgcaggcttgatgactgcactgtgagaaacaaaaacaaaactaagaaggattactaatagtgaaaaccgttcactctagggctagtgtgtgaatctcacatttacaagaagggttaagattgttgcattattatatctgactgtcccttctgatgcgaatgaatgtatggggggggggggggtgcccacggtcatggttcccgcgttttgtggtgtagttcccgcgcaatgttactgacgcgctctgcaaactagtacagacttgcataggacatgtactgatttactcctatgtgagtactgagtactatatactactactgctagagtgttagatccaccctaatgaatgactgaaactgtgaaattaacatgctaccgcaagcactactccatcatgcattagcactgttactactctactctactgtgttacatttacagaaggcaacagaggctaccagcagatgtatagtactagcagtaacaaaatatcacctagtacgatttttcatctagcagatgtatttcagtctctgttttctcactgggtcgaggagaaatttgcttgatgcagccctttgtacacttgcacgaagaggagcttctggagaaggcacagacatatcacatggccacatttgttaattagtagtactacactgtacccaggcaaagatacgtgcagtatactagcatcatctacgtatagtacgtgtacaccaagggaagggagacgagagcatccaaagctagaggagccggacgacacagatgttcttttctaccaaaaaaattgaatggtattagtatataattaattaagttttaatcattataaatataaaagtagatttgtttcatataacttatatacagaaagtttcgcagaagatggaccgtttaacattaaaatatgtgctagcacaaatcaacatatatatatatatatatatatatatatatatatatatatatatatatatatatataaaacctatatatatataacctatacttttttcgtcacaataaaaaaacaaacatagtattatctcttttccaaaatttagtgttccttccgatttatgttataagtggtttttacccttttaaagtcaaacttctaaaaagtttgagggaatttatgaaaaatatagtaatatttatagcaccaaatcagtttcattacatcaaacattgaatatattttagtatcttttttgttttgtgttaaaaatattattatatatttttataaatttgatcaaaactaaaatgtttgacttagaaaaaaataaaaataacttataatatgaaacggatgaataaataatttaggattggattaaacacatcactgccaatctagatagacagagtatctatccagagtaattactataaaacgttagattgctgtattccggtgacggaaggagcagccggagggagaggggcgacagtggcggccactgcagcactgggcccggatgataaaagccggttcggcgcatgtcatcggctgggatggggaagaaggccgcgggaacagtggccgcggccggtggtctcctcgtcgtcgtcgtcctcgccattgagccccgcaccctgcacgccctgctgctgcctgctgccgacgcacgcggcccggcgcatgcatggcccccgtcatggcgaccacgcagctgtgccatgtgggcccctccccctgcacattaagggtctgtttggttcaatgcttcaacttgccacaccacactttaggctgccacatctccacacttgtctaacattgtctaaagtgagttatgacaatgttagttaagaaccaaacagcctctaactttgctctacccaactcaacgcgccattgcattttgcaccgcagcgaatcagcgattgccgttgtcccggggatggatggatggacggacggacggacggccaggatgtgctttgcacttgcaacagaggagccgcgctgctgctgcatgctgatagtttaaaatttaaaataaactcggtccaaatttatttccaaatctaatctttttgttcaagcaagtccagattagcgggcctgctgcgcgcagagccggcccattgcgaaattcagggcttatgttagcccaagtgctcaacactctcccagttgttcagtttacagctcgcggtacgtgtatttatcatggaaagcgtatggccgcagtccaaaacgcactggttcgtgtacgtgcatccgatatgtgttaattgtacgtacgtatgcctccgtctaggtacgtactgtagatgaacaatatgcattgattaatacgtatgtgctgactaagatatatgcatgtcaacaatgaccatactgatccattttgtaaactgaacaaccacttctgtttaattagaccggatggttacgtgatcgtttatggctagatcagaagatcaagtattaatcccgtgatgttgtgtttgaactgaagattataggggttttggtttactccctcactttgacaaacgttgccacactttctaggatttttacttgtttcactttcaaagttgcggcattgacaaagtttttctattcaaagacccacatgtcatacacctatcttttatgtcatacaatcatcttttagccaaatcttgtctaagatgtgccatcaatttataagccacacatttggttaggtttggcgatatttggaagtgaatcaaacaacccattttttccactatggtttgaaggttatatcgatgtcgttctaggtggtgtcgagacggggtgtggcaacacgtcatcaccattgcaggaccagacatgccatgccatgagccgactcatcgtgtgggttgtaccggcacagcccggcccggtccatttgtccagtttcctctcccaaactcccctattttttccattgtttttcttttttttttcttattttccttttttaagcaatagaaggagataattaagcaatgtattgattattttcgtcacgacgacacatggcgacagtcatcatgctaatccatttattaattgaaccaaatttatttggacaggaatattttagatactctagccacgcatgagttaagagtgttgaattttactgaaacacggcaccgtgcatttaaatatgcctttaaaacaatattcttaagttaacgttatgtatatactactccctcgtatatactattccctctgtcctaagatataagaaactttagttggataagacacatatccaacctgtctagatttctcgtattaaaatatgtcatatccaactaaactttttatattttataggacggatggagtattggttaggaaactctagatgctgttaagataacattaaactgaatttttatatttctatcttattttatgtttccacgtgctttgctctcctactaatatactccaatactccatactactcaaacgaagagctcagatcggttgaccttgctgttattaatgatttttcattttttgctgttcaatttcataagcacgcgcactttgcgtgtcataggctcatagctgattacttcatggactatgtcggtgcttaagctaaagttgattttgaaattttaaattttaaatttagattattttaatttaggaggttttccattattttattttcagaaatatgtcacgagttattttatattaagatttgaagagagatttaccgtgcaagctacaaaacgacgaaggcatgttcggctgctggagctacgggcacgaacaataccgcactcattatacgcagtcgcagccgaagccattgtagccggcctgcctaataggcccatagtttagcaagggttatatatccatgacatgccttgtgggaccaaattcggcctaagctcagctgatggcaagaggctggtctctcgccatagtgtcgcctccgttaggacggagctcctgacaggtggggtttatctttataggtccacatgtcagtgaccatatccctctaactttacacgagtggagcctcttctcgcctcatccgttgtagaagtagctatgactacttccctctaaatctgggtttgttgattaaacaaacgattgttgtgcttcttttagattgtcaagcaaatatcgtttccattattttatcgactagctttgtaatggataaaccttccattgtatatatctttagaaaatacgcactgattgatttggattgaaacgagaggcgtatccttatgatgacggtacttagatataaaaataaattttttaagataacgtaactaaggattgcttggaagttttctttttataaaaaatatttgtggcttacaagccgaagacacatgtacaaagcaataaaaaaaactttagaatatgactttttatatttatactgcataaatttcacacaaaccctaagttttaggccatgtgtaacacaaaatcctaggtattatgattagctcaaaaaccctatattttgagacagaatatttcaagaaaccttatatttattaaaatactcatttatattattatacatggtattttttacattatatatactcacatataagtaggctcaaaatgcacattcataccacatagttttatcttcttcctcattctcacagagcaagattgcaaaattgttacatataaaaacaagtattgataactcacacatgttgacaatgtcactattgtataactcacgtaagttaatctctcagtactttctaaagaactataaaaagcatattataatttaatagaaatctgtctagatttattatactaggttatgtctgctatcattttatgttagggttttctcggacggccggagtttatgtcaggtagcaactagtaataaatagtagtacacactatcccgtaagtgtatgtgtccatctctaggtatggtcgatgagcggtgcatcattcatcggctgccgacacatctatccatgcaatgcaatgtcaacaacgaccatgaatgctgatccattttataaactgatcgagtcgcttctgttttacacgggtacgccgtgtaaaacaaatactccctccttccctaaatgtttgacaccattgatttttttaaacatgtttgaccgttcgtcttattcaaaaacttttgtaatatgtgtaaaactatatgtatacataaaaatatatttaacaataaatcaaatgatagaaaaagaattaacaattacttaaattttttgaataagacgaacggtcaaatatttttaaaaaagtcaacgacgtcaaacattttgggatggaggtagtactattttagatgctcatgggaaccacgcatctatatatacccgtacatacgctcctgaaaatgctcaaagggcaaccatatataataccttcatcttcaattcctcctgttccaggtattgttctcacctctcttagtcttatgtataacatatatactacgtgtgatgtttagaaactctatgcttttcttacatactagcaaattactcatgccatgtcatgggaaacgaattaagaccgctttgccgtgtttttttaggcaccgttttggttttgtttcctaattttttgtttttttttctaattggctagttttttgagaaaccgttcgttcttttctggaggggacgagggtaggatctgtttctaccactgaattttttgcagacatgtgggaagaacggtgcggagaggaggatgactcctcttttattgtagtagagatattagaaaaaggaatcagtaaatcagctttgattaagttaagacaacttgagttgatatgtatgcttagctttgattagtgtttagcatgcgatatcttgtgcagatcaacacacccacacacatctcaattttctctcagaaggtgtatatatatttgcagctgttgtctaatcgatctgcagactgaactgaagtataatgtcgaagacgagtgccctggatcttgcttcaggattaggagggaagatcagaaaggagcaagtcaaatcggccgtggatcagtactgcacatactttatttacccttctaatacgttaattaattatgcttgaattttatagtgatatagtaacaattaataaatttgagttaagtgcacttacggggcctacaggagattagggggggagagaagaaaatatgttttttttttaattttattatttttatatgaatgacatgtaggctccattaacacgtatgcgtcaacatggcatgtcatatcagtgcacgtagcaggttagactgttagaactcgtttgaatctggatacacctatgataaatttaggaacctatataacatatccatttaagtttagacagaccactggtgtacttcactctaacaggttttgaccaactcgccagtcgtttctcgcttcgtttatgctgcccctttgttcaacaatcacacactaaaatgttcaggtgttccatcgtgtcaggtatgagaattatcatgaaatttatggaggtgaagtggaatcaaggacatccaactacgctgatttggtacctttttagctggagtagttgtttttcataataatttgcatatagctcatgtgaaatcgatcaattgaattagcaacgagaattttggaggttataaccaaactaattagtgccaaatttaatgcatcaggcaaacaagtattatgatcttgtcaccagtttctacgaatacggctggggagaatcattccatttcggcagcaggtcatgccataattttgccacgccataattttgccactaattaagtttgtttggatgggctttaggttattctgattttgtttttcttcgctgattatctttcagatggcaaggagaaactttacgcgaaagccttaagcgtcatgagcattttctggccttgcaactcggcctcaagaagggcatgaaggtcaatgttatactactattaattacagttcaagaaaagagaataatctattaactataaatgtgattgtttctaatcttcatagtggagtcatttttccctgtgcatatattgcaggtcctagacgtggggtgtggcattggaggacccttgagagagattgccagattcaggtgacaatttcctgttgccaatttcacaaattcagagataaaaatcaagcgaactataattattccaatgctactaattatagctcagcatcggtgactggactgaacaacaatgcgtaccagatatcaaggggcaaggtaacgagttctgcattttatttaaccatgtgcatttcttttacagagttagatgtgaattatttgaaatatgttatgcatatattatcaagatgaagacatggatttttcaccatgagctagatcaacacttaaaagttaatttgatcttcattgtgcaggaactcaacttttctgtcggtttgagtgaaacctgcaactttgtcaaggtagagacatatatacatgccctccaatcaccaattcagttttaggtgacaaaagcaagaattgtcatgcaggctgacttcatgaacatgcctatccctgatgccaccttcgacgcagcctacgccatcgaggcgacatgccatgcccctgatgctgtatgcttagctcatttattttcctgtatcatatcactactcatttcgttccaaaaaaaaataaatctaaaaagggatacgatccctcatagtacaagtaacatggacagaattttgtttaagttcgttatacggatcacatctcccgcctaagtttagtattttttaggatagagaaagtatataggtaagtactattacttccgttctaaaatataactatctagataagtctaaaatatacgatattaggttgctatattttggaactgaggtactaggttggtaacatgaaaacttattatcttggtgaattaacttgtacatgtaggttggtgtctacagggagatctgccgagtgctgaaaccagggcagttgttcgcgttggacgagtggtgcatgaccgacaagtatgatccaggcaactcgaggcaccggagcatcaaggccgagatcgagctcggcaatggccttccagacatcagaaccaccaaacagtgcatccaggctctcaaagacgcgggctttgaggtgagctctactccaaatactacacatcacaacattaaaaataggagaaactcttttaatttcttgagggaagagatatctccttgtttgttcgaacaacattcaaataatcataaaaaaaatctaaaaaaatggactaacatttgtacaacatgtaactgtgatcgtttagggctagatcttaaatgagacctgaaaagagacgtccctccaaacatttatcttaaatgagatctgaagagagacgtccctccaaacatttattagtgtgagcgtattgaggattgaacacggaaccttagggttgacaccacacatccgttgtcactgcactatcaagtgcatctctttatagctagatcatcaaagatcaagatttatctttgtgatgatgtgtttgaaggttgtatcggtgaaggatctggcagaggattcgccgttgccatggtacctgcctcttgattccagccagttctcactcaatggcttccgtctcacccgtgtcggccgcttcatcactcacatgctggttcgtaacattttactgatataccatgtactccaatctagatttgtagtattatttgtgtcgaattcagttataagttactactacattttaagacggagcgagtacggaagtaaatgaattgttggtagagtgcaattgacgtcttaatttaccttcaaaaatcttcaggtaaagacgctcgagtgcctccatgttgccccacagggcagcctgagggtctccagctttcttgagaccgcggccgaagggcttgtgaagggcgccaagtaagttgatcggcctcgagcaaatctgaagcaagaaaattttgaatttgtgccgaatttatatcaatctccgaaacagtaatgctgctgaatgaatgctgcatctttttttaaacaacgctgcttaatgaagtgtgattttcatttccagggaagggatcttcacgcccattttcttcgtcttggctcggaaacctctggacaagcagccagagatctgaagaacagagcaaggtgtggtaattatcatcttcataagtgtgcaataaaaagaacaactgtttgatcagtgtgtacttctctgaacccagcgagatgtggtgttttatttggtcaattcgtgtcataaaaaagtagtaagtttgttcagtgtgtacgtaacagtttcgtctgggtatgaattcagtatttgtttttcagtcttatctttcttctctccagatagtctgcaagttcaacttcaacaacagatgggagtgtttgaatcaacactattttaccaaacgatcgagtagtaaaatgcttcaaagaccactagtctgagtacaaaatgtgtccatggttacatcgaagtcaaaaaaacaacaacaacaaaaaaaaaaaaacggttataaacccgcgggaaaacagtagagtgtctgaacacaatccacatatatctgaaatcgatcaagaaatcaaaaatcaacacaaaccacggtgaaagaatcgacaggagatagatgcatcgatcatggcgagagagagagaatcatcaaccggagatagatgcatcgatcaatgcatacgaacactggatcatatatcgaaattgattctactgtagcatcgccgtggcggcgaccagcgccaacgccacggcagcgaaggccgccttagcgccgccgccgccggcggcggcgctggcgttgggcgccggagcggtggtcgtggaggaggacgagctgtccgtggtgggggaggaggactccggcggcgacgacgagacggcgggggacggcgcggcggcggcgccgcgcttggaggcggcgggcgccggggaaggggcgtcagaggaggaggagcgctgtggcttgaggacgcggatgttgaccttctggccggcggcgcagtggccggggacgccgcagatgaagaagcggtggccggcggccttgatggcgatcttgtcgtcgccggaggtgtgcgtggcgatcggcgacgagttggtgcagctgtcgtagtccgccttcttcacctccaccacgttgtgaatcccctgcgggtacttgaactctgcccaaaataataaaattaaattaaaccattttttagaaaaaaaaaagctcccatcggatggcctaataagctaaagaaaaagccaaattttaaattttcaaacttaattttgatattgattttgagatattttcaacatagtttcttttttagcattggcttttaagtcaccaaaaacacatatataaaaattttacctataaatttattttattttctaataaaccgttttggcttattaggggaaaaactaaatgatggggcctaaaatttggcaccatgatcaactcgatgtagatttgctcgaaaagtacttccataatgccggatcgttaatggttactccctccgtttgatattataagttgtttgattttttcttcgtcaaagttcttaaggtttgactaaacttatcggaatatatagtaatatatcgaccacaccaaattagtttaatccaatttaacattaaatatgttttgataatatatttgttttgtattgaaaatgttattatatttttctataaatttggttaaatctaaagaagtttaaatgaaaaaaagtcaaacgaattataatatgaagcggagggagtagaattttataggtttataagaattttgtcctaaactataagcttttataaccggaggaagtactcaatttggtgccaaatcgatgtagatttgctcgaaatactgtcacaatatcgaaacctattagattttataaactcgttctaatataaaattagtagttgagattttaaaagtttgattgaaccttgtccttaacgtcaaatatatgtaaaccggaggaagtgctccatttgacgccatgatcatcacaagtccacaaggacagacgtagtgcaaattttatcttttttcaaacaagatatatcttttgaaattttcatcatcttttggtaccaaattgatcacgcgaaggcggcaggaagagaagtgtgaggaacgaaactaaaaacgtgcaacataaggtactgtatctacctgtcaaaaggattcatacaaagcacctctttttacaccaagagcaagttgtgaacaaagcatgcatttggatgcttctatactactcataggaaaaaagtgtcaaaagtgattagctttacaactaatcagtagttgacaaatagcatactgtcagatgaatagtatattgataagtagattgagctactggccatttgatacataagtataatttatctcctagagttttggatcaaaatttctatggcaactgaaataactacctcaataaaactaaaaaatttcagccggcattgttggatcatgtacaggacatccaggtacacgcaagttcaggatctgcaagatcctgtagccaatgtccaatgagcacaataaatgaaacagccacatatgccatggcctagtaattgtgctcaccaacactaccatttctgaggctttctgaatagcagttcagatggtccatgagaaaaatttatggatcatgctagttctatgcaaaggtagcagcacacggcgcaatattcgtgaaacgccttcaagactagaagtgtgaactgtgaagtgcaagaaagttgagataaattggccttctttttttaacccaaatttcgctgtcaatggcgtggttaaagtgagactcttcatctaaacgcaagacaaaagaggtaaggtgggttgtaaagtacaccggtgagggtgactgttcattaacattccatctctttgcagcagtaagctagcttgggtgaaggaaagaatggacaattactgcttaacatattaatagtccaattttattaattttctcgaacaatgctggcttattcacacatttcaccaacgaaaagaaaatcactgaaatacaaatgctaaactagctagaaactacttgtagtaagctgtagcgaatatatgcaatgaacaaaaggccgaagttactagcactggatctagcactgaaaaatttacacgatcaaaattaactagccttggcactgagcaaacattctacttctacatatacaaagcaaacaaaggttcattattcagatatttcaatgtgtataatccattaagaaccacagattgcatgtatttcaaatgtgtattgacacgcaagccttttgcatgttcgcgaaaaaaaaaaagataaaaactgcttgggaagaactgaaaattagagtgagaaatgagagagcttgcctatggtgtccccaacatggaaggtcttcttgacagcccagtcagtgtaattgacattgccgaggatggtccagccggaggtgtcgccgaccttgtagaccgccgccgacgatgtcgccgccattgcgagcccgagcatcagcaccagcacactgttcatggccattgccattgccgtgctacctagactgtgtggatggaggagatgaacagaggaggaggaagagatgctaagagcagagaagacgaaaagaatttagtactataaccttgcttgattgcttccaacaatgttatgccaatgaggaggattttatagtgccattgctcactttcagaactgaccattttgcccctgtacatttcctgtctgaaactggtatagctaaagtagatgagctatgtattatttttcatcttcttggatgatctatctattggtccttgagtaaagcaaacttaaaagctggccgtgtatccaagtcttgatcatgaggctggctgttcgatgaatggttaggtcagtgcagtgctcttcgccatgagtgagtggactctgctggtacgagatctcacatagactctcatagactcatacttgtttggagatctctttctttttgtcgaagcaaccaattgccaaacatgtgtgtatgtatgcgttgtttgttagtcgagatcgatcttccagttggtacccacttatctttttctttttcagctttgtttgagatgtgatgcacacacacatatagttttcagagtaatggaacttggggttcaataaaatttgagtttctttatctttctcttacccttttcttctcctttaatttaatcattacgatgtgcttgcagaagtctaatcaatagcaagcacctcgccgaacatgttcagaatttctgattggttgggatgctaatcatcagagctgatctactcaagctcagaacttaggatatctaagtatctaacactcatattgagatccattatctaaaaaaaacactcatattgagataatgctatcagtagttgaacagaaaactatttgtatttgcataaaaggttgtttctatttcgataaaaatcaggcacgtttggtaattaatcaaatgatccttgaaatttaatactacaaaattttatattaaaaaaaaaactttcttccatgtacatgtggattttttgactttttcaaatatgaatatgacaaaaaaatcgcatcgcttaaattggtatgagcattttttttccattaaactttgttatgttgtaagatatctaacattcaactgatttgtttatacatatttaattaaacgaaatttaattggtgtttaacaccacttatattttcttataatcagctgagattttcttatatgtctgccaactacctcggccatcaacctcggccatccgactgaaatcaaatggtcatcacattttcagcgtatgcgaaacgagacaagtcattagtgtatgactaggtgagtattaattattactaacttggaaaaatgatttatttgatattttaaaataacttttacgtagaaagttttcgcacgaaacacgtcggatagtagtttgagaaaagtgctagcaaaaccaaagaaaaaaatctacatctcaatcagaaaaaaaaaacaaggctgagcctttggatgaaccacaatcttatctcatcaaactgtcccgacaaacaacaatgtcatgtcgtgcattttgtcatggcttcccaagctaaggtggcaggattatgtcactggtttagggtgagggtggtcaagttagttggtgcagcgggtacgaaggtatgttgtagaggatgcatatcctctacattgctacacgctcactgacacaccagtgagtagtactgcatattgtagaggatctcgacgcatgttataggcaatggtgagagcaatccagtgaggtggaggtagcgccactgtaaccattattcatgaagaaggccagtggtgggtggatagtatcaatgttagggtcaatcgggacaggttacaaggcggcgagaaacaatagtcgatccaatagcgtaagccacaaaaaacggagaggtgaggaagcttattggcttgagcgctcttaaatagagagaaaaaaaaaagaagaaagtttgtcttagagcatgaagaagtttttatgcaccatcaagttgcaaacaaaaccgaccgacaaaagtgaaaatgcatccactatggttcaaatcctagtggttaacaggccatgaatatcacgtacacgtgcacacactttccataaagatttagtggactcggccaagaatatgtcgttagcccccgtcttttcaaacgtgtgttaggggtacactcatattgttatagtgtgatgtccgtgcccgacggtgtgggtacatgtgcgtttcccgtgtaataaaaaaataaaacctaccaagaaaagctaaaattcctataaccatatggcgatttttattacagagcatataggggaaaaaaaatccggatgggcgacgcgtggacgtgccgtggatccaaccgctcgctggcgtcggctccaagcggaagaaaaaccgagaggataatgcagaaagcccaaccctcccaagaatcgaagctccctctcctcccatggagctcctcctcctccatcctcctcccttcccctccctcctcctcctccacaaaccctaccacttcccctccaagctccgccatggccgcctgcaagaaccccgcgtcatggcgtccccgcaggcgcctcccctcccgctttcgtcgctccaagaatcgagaagcgctcgtatccgtatcccccgcgacgagccgaggccgacgccgcccgcgcgcagcagcagcagggaggagccccggttcgtcgcggagaccaaactcatcaccgtgcattcctgcgcggggcggctcggggacgcacgggaggtgttcgacggaatgggccgcaggggatcctgctcgcctggtcggccatgatcggcgcgtacgccatcaggggaatgtacagtgacgtcctcgcgctcgcggtgaccatggtcgaggaaggggtgctcccggacaggttcctgatcacgcggattttacaggcgtgcgcatatgccgaggaccttgagcttggtagggcgctccattccatggctatcaggagagggttcatggggagggtaaaggatgtgccggttgggaactcggtgcttgtgatgtatgccaaatgtggagatttggggtgggcgcgcaaggtgtttgacaagatggtgtgcagggacttgggcacatggaattcgatgatttttggttattgccggtctgctgagtgggaggaggcacggcatctgctcgactccatgaggcaggaaggtacgcagccaggggttgttacgtggaatacattgatttcgagctatgccaggttcggggatcttgatgtggcaatggaattgcttgggcagatggaggagtctggagttgcaccggatgtcgtcacatggactagccttgtctctggctttgttcatatggataggagtgatgaggcacttcgatgtttcattcggatgcgtcttgctggagttgaacctaacggcatgtcaattgcatgtgctatctcagcttgtgccagtttgaagttactaaaccaggcaaaggagctccatagccatgctattaaggttggcagtgttaacaacgtgctctcagggaactccttggttgacatgtatgcaaaatgtggagaaatagttgcagcttggagaatatttagtgggatacctgacaaggatatattctcctggaattcaatgatttcagggtatgcacaagcaggttattgtggcaaagcatacgagctcttctgtaagatggaaaactatggtgttcggcgcaatgtgataacctggaatacaatgatctcagggtacatacggaatggggatgatgagagagcttttgagctattccagatgatggaaagtcatggagtaaaaagggatacagcaacctggaacatactcattgctggatcagtgcataatggttattatgatagagccataagaatattccggcagatgcaggcacttctgaggaggcctgactacattaccatccttagcattattccagcattcacaaatctagttgcgtcctggaaagtacgggagatccatgcctgtatttttcaccacaatttagaactggatggcaaaattgcaaatgcacttatcaatgcatattcaaaatctggtaatcttgctagtgcgtgtgctgtgtttgatatgcattcatcaaggaacattatttcttggaactgtatcattctcgctcatgtgctgcatggttctccaaatgaagccttggatcttttctgtcaaatgaagcaagaaggtgttgtgccagatcatacaactttggtcactgttatcaaggcctatggtctcacgggaaaggtatctgaagggtctcagacatttttcaacatggccaatgattacaatataactccagaattagaccattatgcagcaatggtggatcttcttggtcggtcagggagactaaaagaagcatatgagcttattgacgagatgcctttgatacccaattcaacagtctgggacacatttcttactgcagctgtaatgcatggaaatgtaagactggctcacctggcagctagagaactgtctgcgattgatcctggagatcccagagtccaaaggttaggttctagtctgcaagatctaactggaaaaactgttgatgtgccagaggagatgacacccaacaaaggaagaaatttagatgaggtcgagagctgttcaatagaaatcaggaataaggtgtatgtgttctcaaatggtgataatgttggcttggaggatacagtagcagaattaaagtcgatgatgtttaagatgggacattctatgcttgacattggcattggaactctagatgttgaagaagaaaaggaagaagttgttggagtccattgtgagaagctagctattgcatttgggctttctaattccccacagttcaaaaacataaggataatcaaaactgcaaggatgtgtaaccattgccacacctttgccaaactagtttcagagaaatatggacgccatatactgatcaaggatccaaagtgtttgcataagtttgaggatggaaaatgctcttgtgaagattattggtgaatgatgaatacaactagtttatgtctactgggtaaaatatcttgccaagtgtccttttgcaggattacacgctgctaacctcttgaacaggtaatatccattttgtcagattcactccaggagtttccttggggttgaattttgtctgtcacatacatagtcttgttgacaggattacttatccttgtagaattcaaacacttggaggatagcctatccatcaattcaacccccagacaaaaatatccagtactatgtggtatcagaaaaggggatctctagactgttctgatgctattccagcttcagtttaggtttattttgaacggcttgggagacagtactggtggttactccattccatcattcaagaaacagtttggtaccaatcacacatcttttaccttttgttaattgttccaaatagttagcaacttagtatctcacaaatttatgcttacaatttgatcatttctattgactataaaaagaatttcacttgccattaaactgattcatcaagttgatctgcgtgttggttcacatcgggaatattaccacattgaggatggccagacaaccttgtcaaaagggacagaggtattagaaggtggatacgaaaattgactgggatggaagaactagagggataattatagactaggatggaaaaactagaggcattgagaggcagtgttaaaggattgaatatttcttcttgattgatctcgtctgatgctgatgctctgtattttctctagatttgtccctaacatagtatatcattatacatagactcttgatttctaaccaaaaaaaaagctgacattacttgtacaatttagactctaataattaaaaactatatttacactcaaaaaaatattcaagactatattctaaacttgcagactcaatttctaatttaataggaccttaatgtggcagccactgcttcttgcagctgaaatgctcctgagttttcacaaatactccctccgtcccaaaaataagtgcagttttgcactattcacgttcaacgtttaaccgttcgtcttatttgaatttttttttatgattagcatttttattgctattagatgataaaatatgaatagtcctttatgtgtgattaaatattttcaattttttcacaaatttttcaaataagatagacggtcaaacgttgggcacggatatccacgactgcacttattttgggacggaggtagtatcacttagatttattccatgtgttatgatggtttaattttttccttcatcacatgcatacatgttttctttaaaatattacataatgctacatagaaacaatcttttaataatatagtttcagcattttaacagtgtcacacagcagcatgtacttattgaaatgggatggcagctattgtagtttcttaaattttgccggcatagtttgtgtctctatctgttttgttttccttttcagggtgaaatactaataccaatttcttttgcaggttcagaagcatgaacatggcaatgtaactttgagagttatagacttgaatggaaaaaatgaaattcttcaagtggttcctatttatacactgctggagcaaataagaattatcttagtagattttaatagcaccataaacattagggatagtgaggctagaaaatctattgtccacattcattaggtccaatctaatacggaaccatcatattacattacgcttcatttgcctcccgttcgatgacacaatttgttggatttgtttgcccctctgaccaaaggaaaccacgtggaaagcgtggttatcagctaatcatgtggaaggaggggatgaacagaggagaacgaagagatgctaagatcagagaagacagaggacgaaaagaatttaatagtaccactcactttgctcgattgcttccaacaatgttatgccgatgaggaggattatagtgacttgctcactttgagaattgaccattttgcccctgtacatttcctgtctggaactggtatagctatagttgagataaagtgtttagctaaaggtacgagaactctggtacttgtttggagatctctttctttttgtggaagcaagcaattgcaaatttgtgtgtatgtgcgttctttgttaatcgaatccgatcctcttttttttttttttttgagaacttcgatcctgttgttggtaccggcattccttttcagctttgtctgaaatgtgatgtacacatatatggttttcagagaaactagaattggttggtttctgaattctgaattgtgtgtgaaaacagatggatgggaggatcggtgggtcaaatctgagtggaagaaggaggacaacacagtcggcgagtggaaccacacggccggcaagtggaacggcgacaccaacaacaagggtgaggatcgatgcacacaccacgctgctgatttcgttttttcttttctgttccggcatgtgcgaagttactctgcttctctgtgcaggtatccagacatcagaggactacagattctacgccatttcggccgagtaccctgagttcagcaacaaggacaagaccctcgtgctgcagttctcggtgaagcacgagcagaagctcgactgcggcggcggctacgtgaaattgcttggcggcgatgttgaccagaagaagtttggtggcgagacaccgtacaggtgatggtttgatcaccttgcattcccttctgtgtgctcatttcagagcgcaacatctttgattgatcggtttcttttgaaattgcagcatcatgtttggaccagatatctgcgggtatgccaccaagaaggttcacgctatccttactaagggtgtgtttgaggagaaggagatagagaagattgggaaggtacgcaaaacgaggtaagtcattagcgcatgattaattgagtattaactattttaaactttaaaaatggattaatatgattttttaaagcaactttcctatagaatttttttttttttgcaaaaaacacaccatttagtagtttgggaagcgtgcgcgcggaaaacagaaacaaactcactccctttgttctccaaacgaacgcagcctaagaacggcaataaccatctgatcaagaaggacgtgccatgcgagaccgatcaactgacacacgtctacaccttgatcatccgtcctgacgccaaatacagcattctgattgataacactgagaagcgaactggaagcatctatggtgattgtgataatcttcctccaaagaagaagaaggatcctgaagccaagaaggtaatttagagataattcactggctgttctgaataggcagtctgtgctgttctatttttacagaggtcataactaatacggtaaaatgttactgtttgcagccagaagacgggctgtgtttagttcagcacaaagtttgtattttggttgaaattggagataatgtgactgaaaagttgtgtgtgtataacaggttgatgtgatgggaaaggactgaagtttagatccaaactttggatctaaacacagcctgggacgacaaggaatcattcctgatcctgagtacgagaagcctgaggttgctttcctttgtttgcgcaactttagatgatatttctgtctgaagattaattgagtttttactaataccactctactgagtttctaaatgaaaatgggtggcagttttgtactgtatgttgtgagcttgctgctcctcagatagcaatagagtacattgtgttacaaaagcatcatgaggccatatttgatctcatcaaaggctcatcaaagagcaacaatggcatcaatcaagtgacttgtaacagccatattatggagtatttgtatcacaataacagtgaatcctaggcttgtacacatacaaatcctcaatataaaagaggacatattgagatcaataaaatgggattcactgttttcactgtttatctatcgttttctaacacgttatcagcagctctaccaagagagaatagtgaaaacacttaccgacacttaccggcacgtgcatcatgttttcctctgtcactgctttgtggtgctttcgaagcccctcatctccctcgtgagagctagatggagtgatggacaattatttattttgcatgtcaatcatgttttcctctgtcaccgcttcgtggtgctttcgaagcctgtcatctccctcgtgagtgagatgtcaatggtactgttaacccatggatgcaaagtggtacgatcttcctctctcatttccctaatgagagctagatggagtgattgacaattatttattttgcatgtcaatcatgttttcctctgtcaccgcttcatggtgctttcgaagcctgtcatctccctcgtgagagctagatggagtgagatgtcaatggtactgctgtgattgacaattatttattttgcatgtcaatcatgttttcctctgtcaccgcttcatggtgctttcgaagcctgtcatctccctcgtgagagctagatggagtgagatgtcaatggtactgctaacccatggatgaagtggtacgatcttccttttctggttgatcgtccatgttttttgcttttttcttctatgttttcctctgtcaccgcttcatggtgctttcgaagcctgtcatctccctcgtgagagctagatggagtgagatgtcaatggtactgctaacccatggatgaagtggtacgatcttcctcttctggttgatcgtccatgttttttgcttttttcttctatagaggaataggtggtagtgaggactaaggcgagaactatacgttcgaatttaaagaaatatagcgagtccggtattttcgcggatacgctattttgactgtggttatcttagctgtgcagagtctaggagtactctcggtgtaattggatcacctcgatttataattatttggactgataactatgaaagaagcttaattcttttatggtcagaaatgacaaattcatcaaaggtaaatgataaattcatcaaggtaactgattaaatagtatttttcaatcattaaatgatcattgcgtattagtcgttaatcataataatttacagagttaaacaatgcaatgtggcataaataatgttgaaattgtgttacactcggataagaattctaaacaagccaaaaaaatatatatcttctaaggaagtttgaattgataagctcaatacagacatcaaatattctgaggaagtttgaattgataagctcaatacagacatcaaatatgcatttgttgaattcagacgacacactacaaaatggaatgagtgaccatgctgccccaattaaattcaatatatatatttatgtatgatatttatatttcatatgatttgaaaagtttcaatcatttgaattaaatggctacattgaaaaattttctataggattgaaatcctataaaatcctacatagatctttggatttaaagtagcgcttatttacttaagtatttattttttatattacatgtatttaaactaatgtatttataaaacaataaattatctaaagaaatgtaaaaaattcaatacattataaaaatagactaaagataaactaaatctcatttttatatgtagatctcattataatgcataggcatgtaactagtaaatagtgaatatcacaactcacttgaataatatatatcacattatgatcattggattcataacaagtgttgatcactacttcatccaaaaaaaattatatgactatatcgtttaatattattaaactttatagcattctagattatatttagcaaaaatatctttctactaaaaaactagtcagataccttttataaatacaatatcatttacaaagataatagttattattttctcatataaaaaacatagataatatatattacagagcacacacacacataagctagctgctactgcctccgtctctaaatataagggattatgtctagatttattgtactagaatgtgtcacatctaaccaaaatcgcttatatttagggacggagggagtagtattcatgtgcaagtaatagtgttgagtgctgactgtagcaatattattatcaaaaataaataagaatgagaaaacaagaagaagatggaacaacaaaagaatataaggttaaagttgttagtttcacaccattcactacaaagaacaattttaataatattaatatattatctattaatgtgagtatataccataccatggatgtgagcaaccaccctcatgtgtttgggctagtgactaacctcctctttttcttacttcttttgaagttctctgaacgtatttaggtaaaagatgttttgttttgaataaaaaagaaacaatttaactagattattttttagagagaatccatcgtgtgccgctaactttgtcactgttctataatatgccactgagtttgttaagttctacaatatgtcattgtattttgcttaaattctataatataccatcgccgtccatttagattctgttagtactttataattttgtcctaatgattgaaatatccctaggacaaaattttctaaaatttggctgaaaattccaaaatatcatattataaaataggcagagaagttgcccatctcaaactttgtaagttttacaatctgtatgataaaattgtacaatgctaacggaggctaactagacgatgatggtatattatagaagttaagcaaaatgcggtgccatattagaacttgacaacccaatgacatattgtagaccggggacaaaatcagtgacacacaatggattgtctctattttttatggttgttcggttaactacctatctactatgatgcggcttttttagaaaaaaaagttaaatcttacactataagtccatatcttacacattaaattacatacacttataatataattttcaaattttaaaatgccctattctcattttataggagaattatggaaaaatgatttattgtctatttaattatgagaaaaatattagtccaaattaacatatatgtagaaaataaaaaacaatatgaaagaactacggaaatacctactaatgtagtaatcatatatcatgcaatgaaaaaagaagaccatagtcgaatactttattattgagcaaaaatgatggtattatttttatcatcttttagcggaatctatctaaccataattaatcatcccgtgttttttgtgggacaaaagggagtaaattatagcacatactatggattcttaaaaattcttaaaagttttcatataatattatcctttaaccattcttttcatttacacaatagccaactttacatttcaatttggaccaccttattctatccaagtccggtgattcagcaatgactctgcacattaactctctctctctctctccattttctttttccctccaacagttggataaccaatagatctagcaagaaggagcccaaatatagcgccttcgcgcttcgtcaggtcagctcctgcctcccaaagtccctgcaagcctgacttccccgacctgaacgacaaccataacaatagtgtgcatcacgataggggagggtaaaaagacatgtcggttactagagggtaaggctgcgcatgtaaaggcaagaggaggaatgatgatggctcatggagaaagagtggtggtggtggtgcgtagagtgacagttagtgtttgttggtggtatgaggaatttgttgttgacacaatcgcttaattttcctttaagtattgatgatacgtggatcaccagttatataaataaatagtaactacttttaataaaatagtaaaaatattgagataagggctatagatggccatttggccctcctggtatggcccggcccaggcacgagcaaggcacggccaaagaagaatcaggccggcatgacacggtcggctctttgtgccgggccgtgccggcccacgtgctacacctcaggcctaggcacgacccactagcagtcgggccgggtctttgggatgtgacatatatataactaaaataaatatattttatgtccatattcttttggccgtgccatataatacgtctatttttgctcctactgtgtcttacatatggttgaaaattagtccgttatgtatcctgaacttcgtaccaggcttggctgtgccatcccggcccagcgtgccggtggggaagcccaagcatggcccggcggtcgggccgggccggcacgggcacaacccccagtcgggccgtgccgtgtttgggccgggccgtcaggcttggaccttgtgggcatctataataagggcggagtagtcgagtatcgcgtagaagaaaaagaaatctgccgtctcgctctcgttgtctcctccgctccttgcgccgccgccaagacgagtcgcggctgaacaggggagcgccgggcggcgagctccatctggcgagcagagcagagcagcggaggggaggggatcctggtgagcatccgcgtcctctctctttctgattcatctctctcttccaccccaccgggactggaatttgcttgcgttcgtgaacccctactagcttctcttctagatctggaagaagctcttctcctcctccttaatttgatagccttaaacctctcttaattcagtttatttgttcacccaaaagtttggtggttcagtcccaagttggatccgcccctgtagttaaatatccattttttgggctatctactgatttcccgtcaatgattttgttgctgaaaatttccagccttttctgcttcaggaatcaggacatagatggatccagaggtgaaggactcaaggccatcgaggtctcccggcgaaccaaatcttttcctgcaatggggcagccggaaacgactccgctgtgtcaagacgagggacgacggctcgccatcacctgcgcggaccgatgttcttaggcgcaccataccacgagtgaatcgcccgcttggcggtgatgttgccccgtttcgttcgccgcggcgcccgagcacgctgaaccgaaggtagcttcagtatgccatagaacacactcgcatcgactggaaatatcgagcaattcttcctaatataaggtaactgattgtctgagagcaggaaaaccgagccatttgtgagcgataacaggcactccatgtcactctcgccagagaaggatcgatattactccactaggggttctccattcccattcgagggaaatgggtttgattttggtggtggaatggaagaaaagggaaccacagcactgccaaggttcttcatttcattatccaacaaggagaaagaagaggacttcatggcaatgaagggatgcaagctcccacagaggccgaagaagaggccaaagttgatgcagaagtgcttgcttgtaatcccttctttcacaaagattactgcaaaattttgttcttttatgtgatcatgctcacttttttttaacccttccatattctgtttcattgttgggcttgttgtagatggtaagtccaggagcatggctgtctgatttgtctcatgagaggtatgaagttagagagaagaagtgcgctagaaaggtaaacctagctttgttgttattttccttttagctccttgtccaaattttagtttgatggttgctaattcaaggaaaaactttttgcagagggctagaggattgaaggctctttgcaatgagagtgattcagaatagaaatacagagcgggatcaattttttttgacttttgctggagacagttaggtacaatgctggttcattcattaactagacagatctgagcggctaatttagagagggaggatcaccggctctcctactatccttatttcaccacccctgtatctccatcctttttttgttcattcgttgttccaaacaaatcgtcatctagaactaagcctatcgaccgaaatagttgtatattagatcattcctgatctagcaagtttgtagctcagaccttaaaggcaccgcggagtttggtcaccactgaagtgaaagtaaatgaaaacgaagagagagagcttaagatggaaggcagcaatgcatggtctatgagtctatcatgatttgggattgagaaagaagatgggaggttgttgggtatggtgcatggtgcattttggtgcctcaattgttgtaacagtaacaccaagttgggaggaagatttgaggccagctggccattcaaataggttactactgaatcccaaatattgtaatcctagttgatgttgaagagaacgccgtgtgcaggccatgcctgggcatgatcctggattcatggttagactgtttctcctgaaatatatatcaaattcgcagagttgtttgaccttctccataagtcttgtgttacagtttaagttctgttggagtgatggattgtgctgtgtcactcactcctgttaataattctgcttggtatgttacgaccgttgttatctttggttcgtttcagactcagtaatctgtctaggcgcctcgtcaggctgctgaaattgagcattttgtggggagggccgagatggtggtcgtgggccgtaattgggagcccatgaagagaaacccggcctgccacgggctgcctcgatcaatgccgccgcaggaatttgggcctccatttggcctaccagtaaatggaccgctgctgcccgtgggctgtacgagggagcccaagcgaagaaacgcggcccacctcacaaatttgggttcgttttggcccaccaagaaatccgtattgggcctagagtggagtaggagagcaatttcacgcgccgagaaatggtggctgtcggactattttgggcctccaaatggcctgcttagaaagtgggtcgtcgtgggccgtttttagcgtgacaggccgagttggagcccaactgttcagccatcctcggccatcgggaagtccgtcgatccatggcaaccgctcgccggaaagtccgtcgtctccggcaccggcaagtgtacgccactccgtcatcattttgcttgctacacgtccaagacaggaactgcttggcatgtgagcaccaccaaggctcctgcagtgtccgggtctgcgagtgcatcatctcacttctgactaatttaggctgtgtttaggttacgggtgtaaagttttggcgtgtcacgtcggatatacggatatatatttgaagtattaaacgcagtaacaaattacagaatccgcctgtaaaccgtgagacgaatttattaacctaattaatccgtcattagcaaatatttactgtaacaccacattgtcaaatcatagcgtaattaggcttaaaagattcgtctcgcaatttacacgcaatctgtgtaattagttatttttcgactatatttaatactacatgcatatgtccaaacatttgatgtaatatggtgtaaaattttgccagggatctaaacagggtctaataactgactggaactggacagtgacacatctctacttccagtgtttctttttcttcagagaacagacaactgagggggcccctctctcccaaacaccccctcagtgacctcacctatgatcaggagtacaccatccttctgttcagggaggttcagagctttcaaaattcaacacagattcatcagagaaatatagtactactgtacaatgcaaatgttgatgatccacatttgtgtagttctcttcgaaccaagtcaaaagaaaacacatcaaagaagcaaagggacaactaccattgcctacaggatttgagcattcatcaccagtagccaacaccgagtgcctcattagttatccaaaagcttattataagccataacagcttattgagataaaaaaaaatgtatatacatatatgtttttaatgacttaactaatactgaaaaaaaaaactatgttgaaaatatgttaaaatcaacttcaaagttaagtttaaaatttgaattttagctttgattttgtttttttaggcgcaccgatgaggctaagcccttgtttagttcctaactttttcttcaaacttctaacttttccatcacaccgaaacttttctactcacataaacttccaacttttccatcacatcgttctaattttaaccaaacttccaattttaacgtgaaaaaaaacacaccctaagattcagaaacaattaaggagaagaagttggcctgaggagttatggcactggcaaacatggacctagtttcagaatggcccaaaatttcaagcatcttcacatgacacatatacaaactcctgcatatacaaacatgcacatttgagttgaggctgctctgcccccaaactgtctctgaatctggtcctggcctgtcaaacagcatgggttctcttccaacccaccaaactggagcatatactatgaaacaagggcaaacaaaccagacctctagaaacactcctcaaccaattttgttcatctgcacatgactgttgatggcattaagatggtcaatgcaatgtacagtacctcttacaaatccttcttcatctgcaattgacaaaaatatacctgacatttatgctccccatgaatactagtactcacaatattcaacatactactatttaggtctgatgctttcatggttggcagaagagataaatggcacaacattttagttattttttgtgctttttatagcctactaccagatactcctccatgggaatggcatacaagttgctgagtaactgaatcctaccaattcctctttcctatacaccactgacattcaaaggaggtaaaggtgacatgagaaaaataaagcatggccctctgaccctttagttaagcccaagagagaagctccataaccagaaagacaagtgaatctaccatataggaaaaaggaggtaggccatcaccacaaccaccaccagatgccattgcttctcttcagaagacttggcattacaaaaaaggaagaaagaaagctcaaggcagagagagattagaaagcaacaccggggacccattcacatgacacacactatctagggctaaaaaactggagcagatggtgtattacacttgaatggttaaacacttgctcagggtgttcagttcagttttcagttgtcatgggcagtttgagctccttccagggcctccatagtagaagtatgtgccccagtcggcattgttaccgttttgcacgtcgtagcagttcgattgctcagtgaatgtgcccacccccttgggggctttcaggttgttggtgctgtccaccacctgtatgttcttgaagtagcttgacttgctgaacccttcctccgggaagtgaccgctgcccatctgcgtcgacgtgtgcacgccatcgagctgcgagtttaccacctccccgccccactcgatcatcgacgcgctgtcgccaaggtaggagaataggaaggatggccaatagccaagaacataatccttgccaaactgcatccaccagttcccctcctttggatcctgctcatatatatgtccagcaaatttcattagagcaatgcattagtgcattactaaaaaatccaatgtaccaatatacagatgtatttagacattaaaaccaatatatcaatatacagatgtatttagacattaaaaccaatatatcaatatacagatgtcttcaattatcaatatacagatgtatttaagacatttgcaccgacatatctggacttcagtacacaggcattgtgcccatttagtactacaataggatgcctcgcattcatgttgtactaagcaaactatgtttgcactcattactcgtgctcaatggaaatgaaaaacagcttgctttctatcttgcactttgctcggcacttgcttgcttgctgaggtgaaaagtagcaatggttctttcttttggaaaacaatgaaactagagtaatcattaaggataagaaaggctgttgaggaagaaaaaaaaagtattatgaccacactaccacaggggcacagggtgaggaggaaactattttcaaagcccaaagggtatcagccaaggagcacgagtaagagcacagcagcaagtgggcagagagattctctggcctgcatgttttgtgacaactctgaacttactactactactactaagcgggggcatgtggtgagtaactgaatttctagtttaattttctagctcaccttccaaatcattatactgatatcgtattgggagccagagtagcttgagatggggaagatgctggctcccatggcgatctcactgtttatctgcacgaatcctgcacacaatacgttgtagcaccctgttgcctggtatgcatcgctctgcagaaacccaggtttaaacacaacgaattagacatcaatacaagcacatttcaccaattcttcaggctttaattcattctggaatgaacaaacaaaacttacagtccagtaagtgaacagcctcgtgttgttgtcgccgtagaggtcggggctaacctgaagaaaatcaaaggaaaacacaaaagcagattcagagctcgtgagtgacacagcacgcggggcatcgcggcagaaagggggtattgcaaccgcaagaacggtgccgcatttactcgccaatgcaaaagctcacgcatgagatgagatgaaatcatgaacatgaacatgagattagtttctttcggattgctacctgccatccagcctcgatgctgttgaggtcctcgccgaaggagccacccaagatccagagctgggacaagctgaactcgttgggctgctcgatcttgggcgcccagacattgatggttgccttggcgccgtagtacttgtcgccctggacgtacgcgatggcatgctgcaaaacaaagaaagataaattttcacccaggcaaatcagtaaatgagccattgctggtacccgcagtgcaacaacaaacattgcaagcatggaggtcatagcgcatcaatggcgaccccctctcattcctgggtgaatatgtgattgtgacgtacctggtggccgccctcgttgagcaggttggggtcgacggacatggggttgggcgccgggtgccgcttcttgccgtagcggcgcatggagctcgcccggagcaggtcgtcccgcttcgtacgccggattgggacggtgtcctccgggcacctgccgccctggtgccagagctggaccatgggcttctcgccgccgccgccgctcttggattcgtcgtacaggccatcgggatggtagttcggcctcatctgcggagagcatgatgatggtcaccgccattgttgcggaatccaacgaattgaggtttgtagatgccattgttgcagctgaaggtttacctggatggtgtggttcttgaggaagggatgatcgaaagctggctggtgtgagatgtgcacgcaatctatgatgtccccatctgggctctatttgattccacagttcgaaaatgacacaaatcagatgtgtttggtggggtaagaattgccagagatagctgcttgggtatccctatgaaaacttgctaaattttgcacaaagttaagcaagatagaagaacttgagaaaagaacaagcacaaagtgacagccaaaaggaaagtcacaaaatctttgctggtacaattttttgcatatttttcacccaatgtagccaaaaggaaggtaaaggttttgaacgaatggtaaagagagaaagtgaattcccccaagatcaaccacaaagagccacagaaaagacatcttctcttttgaatcagaataccaccttgcactttgaacgattagcccaagagcaaacctaccaccttgctcgtgcttcctcccaaatcctctccccccaaatgaagctacacacgcttaactttgaccaggacgacgaacccatgatagataccaattaaaaaaaaagcaaattcaaaatcttcacacatgacgcacctcgatgctcttcaccgccggcttgttgagccgcttcaggtgccggtgcgccctccccgccggagacctcgccgccgccgccgcgcacgacaggcagaccaccgccaccaccaccaccagccaccccacgccgccaccgccgcgcgcggtggccatgtgcggctctcgcctcctcacgccgccaccgctccctcctcaaatcgcacttcacttcacaccccccccccccccttcctcttcaccgacgaactcacctcgccgccggtgaccgcgccgccgcagcccgagggccgatttgagaaattcgaaacaatgcggggggtgcagcagcaggagcagcagcagcagtggatgggtgggtgctggattcttgggcggctcgtcgtcttccgctacagcagcagcagccacgaggatccaagtgggcagtgaagcgaagacacacacacacacacactctctctatctctctctctctcagcttcatcagctttcgcagattacgagctttatttttggggcttctggactggaccaaaatgccctccatgattcgcaaattattacgggtaccgggcattccacgccaggaccacgggtaacgcccactgatttgtggggtccgaggaaagcctttctcaagaaatggagtaatagccgctgtgttagtgaaaaaaaaaaagagtgaattgtactttgggctatgttttattgcgatagtttcactttgaactaccctgtatacaatcttttcacgttggactaaataattttacctttgttgcataatggaccaccataaatcttttcgctagtgatgtctagcgtctctttcgacaaatgtatggcatgcatattggtatgaaagtttactggcatgtcgttaacaatttgctcgaagtcatcgaagaactgaagatatgttttggggtggttcattgtgcaacaaaggtaaagttacctagtccaacgtgaaaagattggacaaatggtagtccaaagtgaaaattttggcaataaaatatggcccaaagtgaaattaactcaaaaaataatgtactccgttccaatgctaaattatactacagctatttctaacttagtataccttgttttaaaataaaattatttctttatctgttctcttttttttaatcaatcacaatcattttctcattcatttatttacctactttctcttcgatcattttttatatactttttaatagccgtgtccaactaaaaatatacttaaattctgttgtgattctctaatcatttttatctactttattaatacatgtgtctacctagaaaatacttacattctcaaaccgaggaaatatgttgttttgcgatataaaatccaacactatctatattagtgagtgatactttaaagattatactatctatatctttagtgaccaccaaatttttacaaaatatattggggctcaagaaaaccacttcccacgataaggtataaatattagtttgttttttgaacttaccaattaatcgagtggtttcatgtatcagacaacatcgagtggtggccgtcaatatttgaaaccttcatattcgtttcgcaatccggcttaaatttgaataaatggaaatgttgttgtgaagaaaataggtagttagacataatttttgtaataaatataaatgttgttgtgaagaaaatgggcagttgactgtaatgtcgcacaatgataataagagttaaacattagaaaagtccacaccatcaacatgacaacatgcattaaatgtattaattatactaagattatccataatatgcactggcataagattaattaatctaagtcaatgagacttttttttccttcggacttcatgccagacgatctatagctagcatgatctagctttgactattacagttcgtcgtagtgcttcctagattttctgtcatagctgactctcaccatctcaaatccgtaatacgtttgtctttcacagtttgttcctagatgtttatgcacgcattgcacggtggttcaaacggctaaacccgacttcttcctcctcttggggggcaaaaccctgggtatggttggtaattttctttattcgggccactcacgtgggcccccaccaacctgcccactgtgccgcggccgggcccccgttccgtttcccccaacacggccccaccccccacccgcggcccggcacgtgggagcagccggcactcgtgccaccgccccacccgctgaccagtgggtcccatcttacgtggtgggaccggacgcgtgagcttttcgcttctctctctctctcgcacgcgcgacgcgagcggcggtcgcagcattggatcccggcggggggcgcacgcgtgcctccgtgcaccggctaacgaaagttttaaggaaagtgattaggcagtgcttaaggtacggtgagctttggaaaaggggaccctgcaaagtgcacaccatgcttacagtactgatatattacagttaagtcattttgtttaacggtagtactacgagtagtaggtaagtacagtactgatattgcagttaagtcgtttttatcattacccgcatgcgaagacatgctaatacgtattaatggtgtcgagctagtatactagtatactctagtttttaatgacattcgtcaggtctacgcaagagaagtaactcaactgtcccgtcttcagatactccttccgtccaaaaaaaaaagacaatttcatgcctaacgtttgaccgtccgtctttcaaattataaaaaaaaataaaaagacaaatcacgcataaaatattaatcatgttttatcatctaacaataatgaaaatacgaattataaaaaaatttcatataagacgggccgttaaagttggacacgaaaatccagggtttgtcttttttttatgacggaggaggtatgttcaaatagaccccacacaaatacactatacggtatacctggataagatagtagtaggagtacattataaaaggaacattgtaaaatggctggtgaaatgaagaccgaaatgttaacctatcctataaaaaaaaagtaacgatcaccggtatgacacgtttagcagcaaaaagcaggtacagttctacgtataaaactaaccgcgaccgtgcactcatcactccgttttttaacccggcctttgctccagaatgtttttcacgctagtaacactaatcagaggagggtgaggactaaacgtggagggttaaaaagataaacatcgtctggtaacaacctgacaacagtaataatagtgcttgcacagtcgccctgcctgccacgatggctggttgtcgaagcagtaacaacagcacatcacatgcattggtcaatccagaccctgctaatgctacgaccgttgaccggtctcgtcttgaccggatcttacagcatcggacctcttggtaaacgggtaaaaaacctagaaatacagcagcagtaacatgctaaacagatggatacaaaatttatttagtatcggagtagtattacgtgcggtccatactggccccacctgtcagtaggccctttgcattaggacaggctttggatgttttcagtttggtccgtagtagttgaaatttttttcaccggctcagaagacagtcataataattcgaggcacacctatacaaataatgagctcaaatagacactaatagattttacttcatccacaagctgaatcgcccgcgaatataaaagcatataaccacgtcagagaaggaggaatccatctctcttctactggcttttcttgcacaagcacttgaagttgaagggcacctttatgtacaatttccaaactacaaagaattgaagcaaggctaccaaaagccagtgattctatacaaatggtcacttcccaacaagcggtgcaagaatcgaatcattatccaacatagctagctcaacaacgcactgaggatgtgcaaaaatgcagcttgtgtactagcaacacacacgcaccaagatggatacgaacaattatacgtggatacatgcatgggggctgatcggttagcatcagggcatgggggacaaagtacaaagcaggctacaagttggggataaggaaacccattacacgtcagctttagccttggacacaggaatgcataccaggtaagaacagtagaggagtcatgggcacaatcacaattcaaagccgttatatcacatggttcgctgtttctctcagtgagccaccctggcaggtttgtccagttatgataaagaggctaaacagataaacacacagggcatcattttcagtctccgtatgaacaattgtttaatgtcataaactcctgaagcagatttttaatatagggtcgcaactcacaagtgacatgcttgatcggttgatcctaggagctaggactccataaaggtactatatatattttgagatgttgagcaaatagtcacattgtaacagctgctatttaagtgctactgctaaccagctaaaattagcctgtattgacagagatggattacgtactaataactctaaagttccaatcagtgtcattacatacatttattcagggattgcccccatcctaatcactctccatcagctatcattcttgaaaaaacaaatcacctaccaagatactccctccgttttttaatagatgacgccattgactttttctcacatgtttgaccattcgtcttatttaaaaaatttacgtaattataatttattttgttataggttgttttatcactcatagtactttaagtgtgatttatatcttatacatttgcataaaatttttaaataagacgaatggtcaaacatgtgagaaaaagtcaacaacgtcatctattaaaaaacggaggtagtaacatgcatgggtctgcgactctaaattcaatctacgcaagcttaaaaggacattactcaacagcaacattcaaggggtcattttcttagacaaaagggtaatttacatccaacgggactgcgtgcatggtctttgggctgtaagctcatttatttgagtgctttcctgctgtgtgtggttgagctgccaaatcagttgcctcaccaaacgatagcatgtgcctttaccaggcatcaggcatatgaacggtgattcgtgctggacatggccctctctagtttgtaccgcaattccatgaatggttcttaaactttacttgcttaactaaggcatgattttcctgtaccacaaaactacaacacaacgtggtacagtgtgttccaacttccaagcccgatacttaaatctgactgtgaataggtttcaagtaattgggtttcagttctagaaagatctcatgctgcaatatgccaccagacgagttcaatgaaagcttaattaagcaactaatgccaggcaatctacctatttgtaacagaagattcccagaccctagttccacttagcagtacttttcagccttcaaacagagagcagaaagagactttcagtgcatcataaatcgtaacagtataaaagacccaaggccagaacggcatagtttctattgggcaggcatatcgcttgcccgtgaagcaattagttgcctaggagactaccaaccaagcttatttatcagtactcctctaggttccaaagttgagattaatggctatcgtccagtgtctacaggacagaaagagcagagacacgcaataatagagccatggctaaaaaagcttgtgttactatggtagcaccatttgcctttccatgataagcagagggccagaggaccctacgtgttcacggttcatgaggccactgacatgtgcgaggttggtcacacttcaacacttgcaatgagggcctgtttcttctcccagtctatttaatcagctaacgaggtatttgaacgctacatttcaactctagcaaacaatttattagaattaaatgattacggacatgctcaattctatgaaaaatttgatataatcaacctaaatcatggatatcgtataagataacggataagtggaaaggcaatctttggtcacataggaaatggatgctttctagttaggcagtgagcaatttacacaaatagtgagtagattgaaacagaacgatataaacaagctacctcatacacttcattatagagttggaaacaaacataccttcatggaatatagcattttatatctcttgcctcttcaaagcttgaaccgagagaaaaagaggatatccagaggcagtaaagctggaaaagggaggtgacataagatcttcagttaccttgataggtgatcacaataaacaggatgaaccattttcactgtaacataacagaagcacaaatcacatgcaatgaatcagagatgtgctcacatgcgatgaatcagatatgtgctctcactccctccctctctctgctgcaccaccttgcccaaagcccttataatatttcttgacttgggaaatgcaattccacaaactaaataagtcgctaagcagacacaaaaaaattgatgactacacatatagttgccaaaatgcaatgctgaatcattacagaattagtgcttctgactaaaatccacttcacagacagaagcacaaacaaaagttttctgtaatcaaagattctccttgtcttcacaacaatgttcaattcctgaacaaaaaaaatatgacctattttctttctttaagactatattaatcgttttattaccaacatttatggcaacctattttagtataggaagaatggaacattacctttactcaaaaaccgacatggtacagagcacagctgtaatccgtcagacagcaaaagtaatccatcagacagcaaaagatgacaagatgatagatccatttccttgttctgtcctgtccttatagagagaaagatgtgctaaataccagtgtactcacaacgaagatgggcgcttcacaatgctgtgtcatcattcatcaagtataatacataacatattttcaacaaagaaaacagccatcttcaatcaatatctggaattgcatttcaacttttaaatacagtgtgtggcgttcatcagcactacccagtgatgagttccacaataaaacaatgcaatcataaaaatagagcttctaacctatggaactattatcaatgaacaacctcagaacgtgttaggttctgagtgctagatgcaagggcgaatgattttgcatcaggtacagaatgcaagtatgcattcaatctttgcacctgaaagcccaaaagttgcctcccacagagccttattcctaagcaacctgaaatagacgaaaattagagatgatgggggatcaacaaaacaactcaagttttaaatccagaagaggtcctaagaaatgaaccacaattcttaagcctcaaacatgcacgcctgctttgtgagggtgacggaaaacatattaaaagatcaatgtgcactgaaatatggaagttgtaagttgtaaatctcttcacttggttactttatttcccatgcaaaaaagaatggttttagcacattactttcactaaaaaatgatgcattctagttgagctacagcttgactttaactgcgcacaaaatagtcccaaaatatatagttctataccatcttttagaagctagaaaactgtcaaggttgagtagaaaaatctactcaagaaatatacccaaatggccaaatgaagcaagcacaatatatattctaaaagttcaaaacaaattatgaatacagtcaaactgcacgaactaatgttgcatttttcttcaggagtggccagagatccatctagcttgttttgcatgactgaatgagcgcattcaacaaaaggattttattccagaagcatacttcctccctgagcatggaattaggcccatcaaccaatttaagaaaacggcacatctaatgtttccagcagattgaccatacaaggcaccacccatcatcacaatgaaggtggaaacagcaagcaattatgcagatgcagacagaagtttgagaactatgtccttctcatcatcatcttatagctatcaaactgctgtcagccagaatgttgaacactatcaggttaacctttcaagtctgtcagggccaactgtcattgattgcacaggaatgaggcatacgcaaataactgtatccactactttctagtttctatagatgccaacatagattgaataataccacaacaataggctaaagtaaaacacggtatgcaatcttatgcaagttcacggaacagacagtctaacaaccttatatcagatttctaataagtcaacatggtacaaatcaattgagtgtgcatagtgttatagaatcactctctccacttaaagtagtgaggttggatggaaaattattttaaaaaagaaaatattaactcaaaaaaggtaattaaattctaggttcattctgatgttatcaatggttcgggtctcatttaactatattagctgactaatttgactaaactacacctaactgcatctgtagaagatggtaaataccgatcgaacaatgaaaatgcacactaatccaaccaaatatcagcagaatttcagcacatgatgacctactgacctacgtgagatatctcctccagacatattgaggattagcatcatataaataaatttcagcggcttacaagttatactgtctagtaagcaggtccccataactgagtcatcacatcacatgtttgaactttaaattttactgtggtttgttcaagtgggcgacctaacgaatgcccaatgagttcgggtagttagactactgatcctgaatttgcaaaaaatttcacaatttgacccttttgcaaaaactattttacaaatgaaccgtcagcaaaacttatttcaaaaataacccttggcgctgaacttagacacctcagcgccaaatagcgtgacgctaaatatgcattggcatgctgacttagtctcccatccgcggtggcacggcattcagcgccagttgacatggcgctgaagtgtctaagttcagcgccaggtgatttggtgctgaccaaaagagtcatttttgaaataagttttggcagcggttcatttgtaaaaaaagtttttgcaaagggacaaattgtgaaaatttcagctgaatttgtgtcatttgtcactagagctacatattatccagagttccacaattcacaattcctttccacacgctaggattgctagactatgaacaaatggatacgaaatcaaaggcggtaagtgaccagccgcgaacctcaatcgaagtgaagatgaacaatctccccgtcctcgatgtcgctgtcgtcatcgtcatccgacgaggacgaggaggaggaagggaaaggggagtacataggttcgacttcgacgaactcctgaggcgggaggaggaggaggcggcgcgggtggccttgcaggcgaggggagaggaggcggggcatggcttggacggggacgaaggggatgcagaggaacgcggcgaggcgggcgaggaggtggagcggcgcgcagcagagcagcccgaggacctggtcggcggggagcgtctccgggttgcacgccacgcgctgccacgccgccgccgacgcccgcgccaccgccaccgcccaccccggccgcaccgccattaacacgatgccccaaaatccaaaatccgaattcccctcctcctaggatgaacctaggggtgtcgtgacgaggaaggcacgagcgcgcgagcgcgcgtggggcctcgccggccgccgggccgccgcgaggatctcgccggcggggctcggattcggccgcggcggcggttttccgtcgttggatcgatcgatcacggtggctgggttggcgtggcgaggtagccaactttatctactcggatgcgcacgtggactaggggggaggttgactcgacggccgacggcgacgggtggaccccacatgtcggtgggatattccttcttccgggcggaacgctcggatctccgcgatggctctgcggagaaaatatctttcattccattttttacgggaattttgtgaaaattaaactatttcctgcaaaatatctgtaaaatccttgcgttagtaaaggagtcctaaagcattctagctgagattactgcataatgaaccctagctaatattagggagtaattggtaattgaaattggtttaaaccatgtgctacttgtcactgcgctattaagtacatctcaagagcacctatatatccatattcaaatcttgaagttgtttttttccttttaataggagtagaagggcatgtttggattgctatcataccaaattgttggtagtgtcaaattttagacaagttttgacattaccaatattttggcaaagatttctattgatttggcaagttttggcatcaatccaaacatcacacaagtactatttaggctaccaaaaaatttggtagggcaagatttggcactaaaccaaaacagcccgaagttattttagctcttatggatttcaacaggccaagagctctattacgctctcattactattctagatcgtgccggagtatatttgacaaccaaaagctgatactttcatggacttgaacaagctgagagctctaatgctattttaggggtttacaaaaccgcgcggtaaccttttcagtttttgaaaccacggtatgtctcgtggttaccgtggtaaccgacttaccgcgggggtgcggtaaccgcgccaaaaataataagaggaaccctaactcgttaggaagaacaagccggaagctctattactatactagctcgtgctcgtcaattgtcataaccagtagctgctcaaatgaaaggctgcaaaatcatccatgacatatgcaaaataatactctctccatttttatctcattttacattataaggcatattaacttttttatttaagtcaaaattgtttaagtttggctaagtttataaaagtatagcagtacctttgacaccaaacaaatatattatcaaaatatttttcatgttagatttaatgaaactaatttggtgttgtaagagattatacattttttttatattagaaaaaaagtcaaagcgtattataatatgaaacagtgggtgtagttgtaaacataaagcaattctttgctcaggtgaagcacaatatacatgaataatcgctcaaatgcgactctgcacaaacaaccatgaccaagaaccatggcataatcaaaacaataggtggtaaaacaaaagccattctgagcaaacaacagacattcttctcatgtgaagcacaatacatgaagaatttacgacaatgatgtaaaagaaaaattgttgctgttaaattaacatatttgaaaaggatgcgaagtaatcagtgacgaccaatgcatcacacacgaatatatatgaaaatggaacttcaaaatgagagacagtatcatgagtcatccactgcattttatttgatgcattgtggtgggaaaaaacagcagggcctatcaagataagacttcagggaagggtcctctggtgaaggggaagggctcccagttcttcacgctctaatctctccttcttcacctgcaacaagggggggaaagggcatttagactagcacaagcttcaaatgaaaattagctgcacgtcataaatggctaatgggtaatggcaaaccataaaattaaggcctaggaatttcttaggtagttatttcagttgttttttctatgtacaactaattgaatgcagtgggtattgcatggttagattgcatacaacccctgaggagttagaaggatactagaaaataatagtcacaacccatgactgcaaattttatagggatcacgcttcttgtaacccagtaatactaaaagcgaccatgcccagcaagataataaacaagaaaaaaaaggtgatcgatattcatgccgacatgcaccctcgaggatactcaagaacaaaagcaaatttataaacacacaatatcttcagcttagagtggcgtcaagaggaaaaccctttttacatgaatttaatagactgccatttcaaactaatctgaatacattttacccagcacaagagaaaattacaaggctatagattacattatggcatgctaatgtataaccaaatgcaacaagacctcatactaagaattataagggtaatgcttaatgtaacttggcattcaattagagcgtttgtgcaatgaacaagtgcaatgacaaagagcatcttcagatacacttaccagatccatcatgtcactcaaatagcctctgaatggtgtctgttgcgcctgtgcaaatagagagaatgtttcagaagcacatcagtttaccgggttagtacagataatgacaaatgtaatggtaatcactggctcactgctaaagatgaaagatggcctaattgtgtattcaggttcttaggtaagaaattttacaagaatacatgtgtaacaagctgtaactccgaaatcaagaattcgtaggacgaatatacaccctcttcacaaacaaggaacaagttttgtaacatatgttaacccgaatcatgcatccacaaccttccggcctaaaagaatcatcaacatcatactatacccaaaatgagtgcatcgatcccctttgctctacactcatttcactttacaggcaataatcgggataacctataatttacgtatttgttgcgtgggctctcaaaaaacacaaacctagaaacccggccaccctaatctgcacaccatcgccgcaaaaactagatcagggcaggagggaaatgaacggacctggtcgttttcggagaggtactggtgcttcatggagaggtccatggcgcgcttgaggcgctggtggcgggcgtcgaccacctccctgggaagcctctcgagcgcctccttgatgtccagatcatgcttcgggtcgtacagatcgtcgtacctcaggcctaacaacggatcaatcacacatacagaataacaagaacaaaatcccatcaaatttccagatcaagaaagccccccaccccccccgaatcgagacacccagatccaggcgagacagcaaaccctaccgtatttccggaggcgcgaggagatcgcctgcatgtggaggcgggcgagcgggttgcggcgcgggttcacgaaccactgcgagaacgcggacagcatcgacgacatcgtggcggcggcgggcggcgatccggcgatctctccctctcttccttctctgcggcggcggcggcctccttcgcgtcctcgcttttgtgggggaaagagagaggagaccagtctcgggcccaagtcgtagggaggattcggaaaaatgagccagatttgtgaattgtaataggccaaatgggccgacgaaggaggagggcccatatagttaaattttctctttctatattgtacaagtagggttttgttatttgagcgacaccttttctttttcttttttgacatgatgaacatcagttttagatctatggctttaataagccataaaatatgcataaagaaaggaaaaataatttatgggtaaaaacttttgtatttatattagtaatggtttaaaagctaatactggaaaatagacaaccatgaacaaacctcaaaatcaactctaaagattatgttccaagattttaattttggtgtggaggataggctaacaagagcacgctagggaacttttaagatgcaattttgagttagggtagcacctgcagaatgatttaggatttaggcaggaattaattttgtttattctatgttcttccttttgaagtcctcaaattcttagtagctagattttttcaattgtagaccaaactgttggtgttaggattatttcatatagaatacttgccaataagcactgcattggttcaagaatagtactagttttgacattgatgtgcagtattatatggtacagaacctttataattttgcctttatataaacatatccttccaagttattttcttatgggcactatgaacacgtgtgggagtgggaaggaattggccagacacaatacatccaaaaacacaattgaacctataaaaaataaatcagcaaaaaaacagggagagaaaaatacgtgctaccaaacttcataccattaggtaaggcatcagagcatctgtatatacaaatacattaaactcaacctcactcgcattcacatcaaccaaaggtgacatttcaacctcactcacaaagccacaagacagaaacatcaatacacacaagaaaggcatataaacatctgcctattttgtccttctattttttttgccccttcaatcttgatgccattgaaatcatgctgttctatacagaggtaatggccgagtaaacggcaaaatcacagaaaattcatagctgccatcatccttgctctgttcttcaagaaccctagagcttcagcttcatcagagctgggtgacggtgcgaatccaccaatatggaccatagaacatgcacatcctcatcctggcaagacttgacatccttgtacagaatgtgcattcccctccctgccaagaaagcatcaagcacagcaatgtcagggccataacaacgttagaaggaagaaacaagtcgatttcaccgcgtaaaatgatcaatgaaaatggctttgcaatcgcggaaatcaccaagaggagttgatgcatgttgaaagaatgagttctcagaaacaacttacggtttcgacgtgcggaatgcgcacgaacccagagcttcctcagaggggagaagagggagtggagccaccccatgaggaagccctgctgagacctccggctatggcctcatagagaggaggtgaaaggaggaatggagcaagctatgcaaaagaaaagaaataaaaggatgggtagttagagaggaagtaaccatcaggtttgcttttggcacgaggtgaagtttagtgcactgtacccttcttctgccacattgtgcttccttgcaacccaatcatagtgctttcagaaattttattccggtatcttgtccctttccacttcttactcttcctacctcttttctccatttaaaagagggcatttttacacccccccccccaaaaacaaacctacagaataattcaaggtacatgacaaccatagcatccatagcatttcttgtttgtatcttctgagtgctgccaagcttaagattttcacaccaaatttgagggacattttttttaattcaacctgcatccgctcgcgtgttttgtgcattactaaggtgctttcccttttttaaacaaaatgggcttcacaacggcctttgggtccagttggatatataatgcaggaaaagacattttcagacagagagagagagagagagagagagagagagagagagagagagagagagagagagagagaggaaatgcatttggtcttaatgatatcatgaaaacatagcatgaaaatacatttttcacagattttaactgcaaactcacatgtatcacatgaactaattatgctaaacttatagtagattttgcttggacatttgggtatagcactaactcaatgttcttagcttttcgtacaggaaagctgttgctgatttggatggtttttaagactataggtagtcaaaacaaacattatcttgcctgctttttggatggtttttaagactataggtagtcagcacaaacattatcttgcctgcttttacgaacaccattacaaatttgtagtgttatatttacatttataccataagattcaagtaactggccatcataacaaagcatatgtgtgttaacacgaatccagcttcaaagtaaacatgtaacttttgaatatattatgctctgcgacaagaaccataccttttctgctactgtctgacctgctgttgatatgtcgtatgccgcccttgtcaataaggatagacatctttgactcggcttcttccaccagcaaaatgagaaggttgtattcaactatgacatgcaacaattcgttgagtagaagattggagaaaacatgtgaaaatcaggaagcacgagcagtcgagcaccaaccaggtaaatttttcatcaactaaaacaatagaaataaaataggcatccctacctgttgatgcctattcaggctctatgctgccacaaggcaaatgccaatcctggcccagcccatgttgcactcacaaatgcttaaaattttgatgttcgtactctcctaacatggactcactaacttgataaacctgtcaattatctgaattgctccttcttagaggatacagtaatatgaaaggtggaagttatggatatcgtttgtaatatgtatataaccaaagaaataaagaatctgcatggcctacaaatccaatatttggagtttatctacaataatctacatagacttcttctaaaaataaggcagcaagatgatggagacgatgacaataaatggtacatctactgcatactgttactgattatgcaatgtcttccatttagatagatcaacatcctttttctttcctttccatttcttcttctagttggaacaggatatcatctatttttggttggaagagaatttatactcctaaataagattactgtaccaaacaggcaaacaccacatggtcactttccattgtattcatatgctattaagccacagtaagattactgccgtactaaagtcatccctccatattactgtacctgactaagaaaagttggaacagttccttgttaaactagcaccgcaatccggtaggtagtagtcagtacttatagtgacagaaaattccattcatatgatgtagctatcaatggacaatcactagaatcagttgtgaggttcttctcaaatgtcactgttaaaggactatgtttgcattgaccagaaatgcaatcttgtgtattgctccaaacagtagctacaagaaattactgaatgaatggacaggaactaacagacagaatgctgtctgtctgtgtgaaactagtgaaaaccaactgtcagagagctgaatattactcccaaaatatcatatatgaaatgcttccaataatgtaggaaggctaattaaatttaccaacaatgaatcaatgaagactacaagattgatttaaggaagcaaagtaagccggctttgcaacccaatttacgttgagcaaaacaagttctactgaagtatatcttggatggcctgtatatttgggggtctagcaaggccgtaagaccctaaggagtactttggatcttaactcagctcaaggcaagaaatttccagttccatttggtaattttggttgcaaaccaagagcttttctgattttaacgatagttcagtctgttcctttgtactactcacaaaataagttgatggataaaaatgccaacttacagcatggttaaagaaaggacttgttcagttaaccacttaaccaatgataccatgattaaaataatataatattagcccatttcatagattcatgatttgatcagagtttagacattgttgtgtactgttaatgatgaatttccacgatcttctgttcaaagggaagcatcaatggaattagatacactcactagagttaaaagattatataagcaatacaaatggtgtacctttcaggaaaaaaaaagagatttaaattcatcatagatgacaagataatgtcctatttaatgtttaaaacgtcaaagctgatgtggtccaacagttcggaaagctacaggctgtttaatttgattgttcatcattgctaatgtcaatgcgatctcctaaataaagcacactagagctaagccaaccagcttcctggttagccaatggccattgaggcacctcacttcagtttgtttttttttctttttgaaacccacctcacttcaggtgataagaacagcaacaataacggtagatcatcactttagtagatgtatagaacgaaattacacagaatttgaagtctcttcactgagttgcagcatttgaacttcaggatcctcattggtgtgatatgtttcctgaaaaagacagacacaatcagatgtctgtagataagcataaaaaggaccgccattagggtaaatagaccttgatgcgcgcgtattccatgagtcttgattcctcaaaatccacacttttccacagggatcaaagttatatcatgatgaactttacaagtttgttgatctccaagtaacaattgtgactgatcacaagataatacagggaagaacaagtagtagaaatcgtctgacgatgttgctattaacaaataatctatatccgaactttgaagtactttacatcatgacaacattctttcttggagcattgccacagtaaactattgagagcattaggagcaaaaggaagggaatttgagaatcacaggattgtcacagaatcttgccaaactattcaaacagtgtttataaaagatggcaaaaccaagaaaaattgaaagaacatatattggagagcctccataacatttccaagaattgacactcaataaacatcccgttagcactaaaacggaggcaattgcagaagcaaattatgattctgcaagaacctattcaagcttccatgcatataggatcagcgagaaaccaagaccctgcaactgagactccctaaaaacctgcgagtatgaccaaggcatcgacttctcaggtgcttggcatgtctgaaacatgaacaccgcattgcttgtcgtcaatccaaacagccaactgtggacatcccagaacacctccacgggcaaaccatccacaagaattgtctggtttcccctaaatttccaagccagacgcttcacctgcatgacgggcttcttgtcgacccgtatctcaagacatggatccttgaggctgacggtgtcacactctatcacaacatcatggaattgaccattttcacagaattgtgccttggcagtgtaaatcttcttcccatatatgtgctccctcctagccacaaatgcagcattcagcatcggccggtttgcgccggtcttccggtatgcatccttcttcatgtcgccgagcaggagtatcagctcaaggtcaaacaccacggcgacatagaacccttccattggctctggcccagcaccaaacttggcaccggacaggtcccagaagatctcaatcttgccgtcctcgacgtcaagcctcttggagcccttcttcttggagaagagccatggcttgatgtctgccttgcacaggcactggttggacagatcgtccacgccaatgctgagcccttgccccatgaggctcttgctccaggtcaccgagatcacgcatggccggcccgagaactgcgcctggtagaggcaggtcaccagattctgcgccgcgccctttccggcgctcgacgacgacgacgacgcgtccgcgatctggacgccgctctccccgaagcaggaagggaagtccctcatgctcgcttgctcgcgcctttcaccgaacacctggcggccgccgcagcagcagcacagcgagaagctccgctccgccgcctcaccgcatcaacaagcgacccggcggcgagctcgcctcccccgcaatgccggcaacgaggagaagccgcggggagatcgctcgctacctcgagtggccgcgagatcccccaacctttcaccccaataaagcagcaccaagaaccgcccaaaaagcaagcaagcgagcggaggcgattgatcccgcaagcaagattccttcacgaagccgacctcttccaacgcaatcaatcaagatttgccgcgaaaccagcagcaaagcagcaatctttcccccggagatttcttcagaagtttccccaagaccaccaccattaaagcaaaaatgatggaagcttcaggtgcttcttcacccaagataagcctttgaagactttgaagaagaagaagaagaagaagaagaagaagaagaagttccaagatgtggaggaggattcaacactacactacaccactctactctccctaaaagcatcaagcaacaagagaggcaatgagagaagctagcaaacaagcaaagaactgaagtagagtgggggagagagaggaggggaaaaggagacaagaggtttggggctacagcctactacaggccacagccatacaagagatactcctcctctcctaccactacaccacacacactactgtcactcactcacccaactcaaggagggcagggcagtagtggcagcagcaagcagaggagggggagcagttgctgtggctaactgctgccattactactgttaccataccactagctgttctttcttcattcatgcaatgaatggagtggtttctaccatttcttctttgcaagcttttaaaaaaaagagtgagggcgtgtttagttcatgctaaaattaaaagttttgttaaaattagaacgatatgatggaaaagttggaagtttatgtgtatagaaaagttttgatgtgataaaaaagttagaagtttaaagaaaaagtttggaactaaacaaggcctgaactaagattcagttataaaatcaccctcttgggttcaaattctcattcaataaaatcaccttcttgtagtagtagaggttgcacaaaatctttggctccaggtggtacttgctctctttggtcataggccactgcctagctctactacggctctactttctctgtgtcactgacatgagaataccagctctcaatagttttatttttctctctctcttgtatgtattctggaccagttcacatgcgttacagtggaaaatgactggattgtatttgatcccccttgctacaagcactccagtgcctactccatggaagccccatccttttttgttgtctcgtgtaaaagagcatatactatgcttgcttttctatataaaaatgtcgaaaagataacccaatcacctgaatgtaactagtttaaaacagggcatttaactatttatcacttttagattttaattgctacatctaaaagtggtaaatggttaaatatctcgtttaaaacaggttcatgatatcttcagtggttcttaacaagacatcacaagattcagaaccatcaatcctttacaagtcttgatatgaaattgtattcattgatttattcccagcctcactaaaaaaaattcagacatgcgtatgtatatacgctactaccattttaatggttttcttgcttggtttactaaaagatagagccaaattgagtgcctttagcttactagttcgtagtatttttttgccatgcttgactttgttgcaaatattcaagtggaatacatgctttctcaatcatgtctttctcaatcattctcaatcttgcatgattgagaatgaaaaaaaaaacttgcttattttccttaaaactagtaatatacccatgcattacaatagaggttgtatgagcccatatgactaggaataggttaaacatgtgaattgaaatccaatcactttcctccggtggggtgggagaaggggtcgaaaggagaattgagatccaaccgcttatagacggtaggagaagaggaaggagggacaatttggctttcaagtagtagagaaaattgttctaaataaatactgaatatagttgatcctctccaaatattcctggccagtaggaagattaaaaacaaaaaaaagatgcagcaaagtagggcaagtagcacagtaccactaggggtttctctgccgtatgctaccaacatgtggaagtaaagaatgtagggatccaaaatgctggagtagctacagcatggcaagtggtgaaggcaactgaaatcaatgagaaggacaacggtttcctttggatcagggaccccatctcatatctctcgtctgtttaactgcacgcccacgaggccgcatttattcacctcctggagatccatccacacctcctcttccattctgcttcgtctccaagcaaaggtaccccaaaactttggtaaaaaatatttcagttaaagatgaactacagcacagttctggagtatctctttcagaaatttgagaaatggtatgctagttctttatgttactcccttcactcgatatttttttttccttttcaacaataaaacttattggttgtacacttgtcggcagagaccaaagatgtaaacaatttttttaaaaggcttttatgttattatatagaattgcagtcaagtgttttgcttttcttttcttttttagcatcactcatatgttttagagaatttaatatttccagttgctgatgcttgtgtatatttagctgaataatgaactttactcgactagttcattggcctactggacttaaagaatcaatcttggcgagcttaattaattcaggtccacaggaacaagctcaaattttcagtggaacaagcttaaattttcaaagtgacatggtatatgcacactttgtcttttaataaaacttctttatattgcacccacttcacttgaactaaagtgatatcactactaatgtggagtagcataccatatctcattgagggtacaaatttggttgttcatggagaaaaatactgtttttagggccccagcccaattactctccaagaaccaaccaacataatggtaggtattggtggtgttcagtggccaattcttttttctctgacagggtgttaatgtgatctaccgtagtctcaaagctgaaaacaccaatagtaaattatttggagtcaaaggtgaatgtacttggaaattatttagtaatagtagcatatagtagatggaatttgacctaacctttgctactcctatactgtcaaataccaataggttagttccagagatgcaggagtggagaattcttaagctcactgtctctgaaaaaaaatgtaaacaaagagggattcagttcaagtcctcaactatatttttttcttgcctgaaattcgaaactgtaaaataggatttctctccccctctttctcggattcaagctccacctgaaggaagatctctagtggtattcacagcattgtagcttgtgctgtgctgttacgaggttgttttcttgctcgagagcattagaaaaatggaaagcttcagatcatgacacatcatgtgttgatcttagaatttgccgtttccaagtagaataatgttcattatggttgtcactttgctttctgacctgctggcaattttggcacattatcatgtccatgccaagctttggatgaacagcccagaaaatctgtgtgccgctgagccatttcagatactggtatctaggaaaaggtaagggaagaggaattgtttggtgatggcaagaagttatctgattatgtatgccattttaatcttgatatttgatcctctgaaataatagggagaatgattgatttgtgacaattgatcatcactgtcttacaagccttttttttcccagaaaaagaatggacaagaactatctgaatactagtactatgtagtacctatttaacttcttttcaagaggatcctctttgttattaagaaaggattattaggttttgctgagtactgaagttattataaatatgcaagcttttctttatatttcagccaaccaaaagatataggatatattattttccaagttaatttatttctgattcggttgcaatgatcacaagaaaagggcaaaggtagtagaatactttacaccttagttacaggtaaaaagcctaccagctagggataaaaaagtaacagtcgcaactaataagggcttagttatgataaggatggtgtattcatggtacttagctgcaaggagcaccaggtgttgtaaattataataatgtggttacttaaggggaaaaaaagttaggaaatacaacagataatgtcttctttttttttaaaaaaaatatgttagctcattttgtcttctatcccccatgaaaaaagaaatgtttattttttttcatgaaatggaaggagctatgccttaatgcatcagagtaaagatagcaaaaaaattatctcaaaatcatacatattccttatgcgcatcagaacatctccactagtgtttgaaacttcatggaggacagtgggccttgttagctccataaaagagcattgtaaatgtggttgtaaattgtaatgcgggagagcacctgcagcggccgtggcatattgtaaattctttctaaaacttttaatatacttcgaccggctatggctatcgctggcccggcgaaaaaaaaaagtttttgaaacttcttggaattttgcaagagacattacaatttacaaaccatccaacatgatacaaaattcccaagtttgaaaccaggcctgaactaaagtgctacaagtctaccacggtaccacctactcaccgactcaccacacgagagagagaaacaacacatatgacaaccttctatcccgacccacattcagtgactcagatgacccccacatgtaactgagagagaaaatcgcattcggaaagtaatatcaaatcatcaaaatatgccccccaaaaaacactattgttcaatttggggaatttttctagggttagcctactcagctcaccccttcctcatctattctattagcataacactttacagataggtccttggtacaatacatatttacaccaacactccccctcaagatgggcaaaaaatatcaatcatacccatcttgttacatattgattgaatctcactaggacctaacccctttgttagacaatcagctagttgttcacatgacttaatatactccaacctaagcaccccgctatcaatcttctccttaatgaagaacctatcaatctccacatgtttagtgcgatcatgctgaacagggttgtttgcaatgctgatggctgatttattgtcacaatgaagcatcacagtgtcacttcttagcactcgcaattcagtcaacaagctcctcatccacaacatctcactcaagctcaaagccatagctctgtattctgcttctgcggtagaccgagccaccactgcctgctttttgcttcgccaagaaacaagattaccaccaacaaacacacaataacctgatgtagatcttctatcatccatactactcgcccaatcagcatcacaatatccttccacatttagatgcccattcttcctaaaccacaatccctttccaggagtccctttcagatatctgagaatcttatgaacaacatccaagtgaccagttcgaggatcatgcatatacctactcacaacactaaccgcataggaaatatcaggtcttgtatggcaaagatagatcaagcgtcccaccagtctttggtatgcttccttatcaacaggatcacctgattgagcacacaattggtgattcctatcaataggggtagtacttgcacggcacccaagaattcctggatttgttcacagattccaaacaaacttcctttgagaaagaaccatcccctttgaaggacgagccatttccatttccaggaaggaagggaaagggcccagatcctttcccttcaaagccttttcc

SEQ ID NO: 8889 - DNA, 21230 bp, Oryza sativa
tattggaccagagtgaatctcttcattgtaacaacactactactatgaactactagtctactacgttctaccgtggatgtatacgagtttgctcatcggtttcgctcgctgttggtgattgtcttcttcttcttcttcttcgtggtacgtagtacggcgtacacactgttgatgatggtggtggtgtcgccatctggtgggacgtacacgccttgttctcttgttgattattagtgcaactccgtgatctggtatagtaggaggctagctttaattttgctagggcgatatctcaaattgatcgcgcccgtagctttgtcgcgatcaaggaatcgatcgatcgatcgtgtctagattttctgttttgttttgttattatcatctttcttgtttaattggttgggtgctgtagcgtggagtggtctgtaagctgcatatattgcctgtgaatgcaatgtgtgtacgtatttgccagcgggtctgatattctcgatcgatttgtttcgatcacctcgtacagtggtatgtactttcgttcatctagaatatgagatgctgcgttacaaggacgcgatgtgtgcgtcagtcaatttgcttactatacacatggaaaattgactgacgcaaattgactaacgcaaattgaaaataatggcgtttttattcttgtttgtccatcatatatactatacacattcagacgaaatgtttgtacagagtttggctcaagcttgtacatactgtttttcatttgcatgttgtttccatatactaccataagcaaaacacgtatttggtatatacgggcaggtcctgggtgctcacgtttataaatatgtgatatagtacaattgagaaattttatgagattagtggatttgttcatggacattgtctgttgagaccttgagggtgttagttaaggccttaaggggacatggctcatgtcactagctaatgtgtatacatgtggcatgtgtgtttatgtgggttccatgtgtttgccaaaacagtgttctcattggcattttatgtctggacaaaagcaaccaccaagaatgtaccatcacctggacatgcatggaaagtggcccttgatgatgtgcttgagatggaaactaatgagcggtaacacaggtcgaaagcgcacaaaccgtcatagatatcaaactagagtagatgaaaaggtaccaaagcaaacgtcataagagcagtcgaggagtggcggatgacatcggtcaaataggagataggcaaaattttctacaggacatgtaaaaaacgtgtaattggctaagaggcaccgtaaaaacgtgacacggctgattgacactctaaaaattgtgtaattggctataggacaccggagacaatattttatattttccagatcaaaagaggtgataatatttttcaaatggcgagattgtccctgccatggagcaccgccgccgccaattcatcggatcggattgcctccgcacctacctcgctctctagcctcctcctcctcggcagccgtcgaaaggtccacggccagaggggagtcgcgctggaaagcctgcatatgtagtacttggttgtagtgtaggataaaaagaagaagaaaagaagccaacaaggaaaagaactcacgaatccccatccgctctttgtgaactcctgccccactgtcctgaactggcagttgatggagaggaagagctccacgtatggcagctcgtcgacgatggccgccacgacgccgctctgcaggctggaggagtagtcggtgatggcgagctcccggaggcgggactcaggcacgcccagctcctgcatgaggtagctcttggcgaaggagccgacctggaagccgatggggtcagagctggcgatgaggccgtccagaccctggatgtccgtggacagctactgcaccatgaggatggaggtgaggctggccgttggtcgtcaccgtcgatgttggtcctcactgaacgaggagatcccggcgctgctcgtcgccatggcgttggtcctcgctgaatgaggagatcccggcgttggtcctcgccgtcgccggcagtgataccccggcggagcgccgccgctttttccgccgcgtaccgagccgtcccagctcaggctgctgttcctctgctccgccgcgtgcgtgaggaagaaggaggataggagagagatgtgggccccacttatggttagtaaatagtaatcaccctactaattaggaacaaattagtccatgacgcgtggggcctgatggttaaaaacctattaaaaattagattaaacatacactgtccatgacacatgggacccaccggtgtttaaagaaggaaagagaaggggcaagtcaggcatttagaaaaatatctcacctcttttgacctggaaataataaaaaaaatgtgaccggtgtcctacagccaattacatgtttttttactgtccatcagccgtgtcatgttttcacggtgtctcttagccaattacacgttttttttgcatgtcctgtggcaaattttgcctaggagatatggtgcgtcatgagggaggatgttaattacttgcaggcaacaattgtgaagtatcacaaggggagacagggcaaacgaagggagagaagggaaaatgaggattcgggtgagtggagggaaaaaagttgcgcatggtaatgagtggggttagtttttcttgctaggtcctctctatggaattgttttttttttcaattttagcattgtgttgtaagatttggaattttgttatcttcgcccattaattaaaaactcatggccttcttttgaaaatgaaggaatactaatggatttgtactagctagaggaaattgagctagcatcctatcaaaaccctagaaaatgtttacattgcaaatgagtcctaaaggggtttctaggaaaaaaaagaattaataaatggatcctcccccaagatttttgagattttagataccagctagtactagtattaattaactcgtggcagcaaattcaagctaggagtggataattttgccatatagctctcttttttaatttcaactgaacctgtcggttcaaacaacgccaggttttgctagagctaacgctatgcgtttgggatggggccaattttatcaccatctcttcgtctacatctggaaaacaataacctcccaaccctgtatcggtcaagcttctactgttgctatgtgttctttcctgtgcaagcatccgaacctcccctgcagaaaggctgtgagagacatgtccagttgtttgtttgccctagaaaagggaaaaaagggagcaatggggtattgtagctggagatacttccaaaaacaaagatgtttccttgcccaaacatttatatactcctatcctacaattggatggagctgtgacctacctgtgcattgcatgtactgtaaaagaaacaagagagagagagagagggaaacaaagcacagagatgagtagtatgtgtgtgtcactgtgtgtaagtgagagagaacaaatagcttggggatcttcttttcacgaggagaggatatgtgtgtagatggagatcaactttttgggcgcacttgaaggctcaccacggaatggccgacaaaagtatgtctaggcaaggttgatggatggatggaacatcagatgtacatgcttgctacctgctgctgctgctgcacacacaaataccatgagatgttcatgtcaaatgatgagcttttctcatgcatctcttggattgaaagggaaagatacatgagagggaatcaatggggggacctggaatattattattgccgctagtcaggcatggaggaagttgctcttctgccagagcaggccgggacgacacactgtatgcgattgcctatcttacgagttgtgctgcctggggttccgttcgtttctgcaactcgggcaagcaactccctcgttaattctttgtggatatacttatcaaactattttaaggtacatttcgtaaaataaaactttatatgtaaaagtttcttaaaaagatcaatcaatttctaagtttatataattaatagtcaattaattactcgttaatgattttctttttcatgccatgaaaaatctcacctgagttgttgaaacgaccatgcccttaattctagcttccaatggttacagcttcttatagaatcaccacctcttctaaatgctccatccaatttaaaatataaaccctctgccctataaaatataaaattttatacattaatctggatatagtctatgtatattctcgtataaaagttgatttattttgggatggagagagtaagtatttctatgattcaaattttacatcataatattataaggattcatgcacttattcccaagattcatatcattctattgatgattcctaagacaatgaaatgcttgaaataaaaactaagcaattcaaaattgacaactgaagttatttacatggaatcttttgacctaaccttagtatttgtgtaagaacaattttacggtacttgagaagataccatgaggtactgccttttcaattgtaaatttgatacctcgtgatacctaagtactatgatataccaaattttacactaaatctttggtaccccatggtatctctcaagtacaataaaattgctcatttgtttaaacctaaaaatttttacattttggaaccgagggaagtggtccatatactcatctagactatgtgaatcaatagctataggattcagaatgaacccagctagcagcaagaagttgggaaatctagttttgacatactcccactagctgatgactcaccaagcgatggcggagacaaggggggaatggatggagtcaaagctccctcaaataatttctttttttataataggaccatctaactaattaggtaattataaactgaatagtagggtgttagaccctctccgatattcttgggctccacccatatctaaataatggctagtatatggcgatttctcttttgctaggcccggtgctaaaaaaccaactttcttaattctcataatcgtcggccccttgccaattgattttgacttactccctccgtcttaaaataagtgtagttttacattattcacgttcaacgtttgaccattcgtcttatttgaaaaatttttatgattcgtatttttattgctattagatgataaaacataaataatactttatgtgtaactaaatatttttaattttttcatatttttttcaaataagacagacggtcaaacgttgggtacggatatccacggctacacttattttgaaacggaggtagtacttctcaaaactttcaacccaaaacagggccttagcttcatctagacgacggatcgatagatggagggttggtgtaacgtgcacttcacgggcactgcatgcatatcctcccctttttttttttttttgtcaatcttacccggccctcgttaccacaaactcatgcgtttcatatatgcagtttgcaggtgtaaatagattgcttttcgggcaaaacaacaccgaataccatgggaagctagcttgcgtttgatccggcgtgcgaaagcaggacgagacgagagggggagcagtcgatcggcgcggcgcgcggtagctgctggaggacgggtcacctcaacgggcacgcgtgtgtgagaattttgcaggtgggggagaccggccggaccgggcaggccagcaacgtgacccggactccacgtaccccttgtagtaccatctgccacgcagaaacacacaatcaatgcgacgctctcttgcgttgcgcatgcacacacacgcgcgctggccactggccacagacggagtactgcgttggctgcaagtactgaagtacattggtgtctttttcgcgccctgccaaaatgtgtatcggtagctgcctgaataattcgtggggaggaactttgggagatatggaaattattgccctgctatgcaaagtctaatcaacaccagcagcagcttcagtctttgtcctgaaaagttggatatgccggtgccccaaagtacaacctaccgctaccgctggcctggctggctgaccaggccggccctcccgcgcccagtaattttccttcaacacaaaaaacatctttctttttttttaaagaaaaaacgtagagctggctattttatactcgatctattgcaaaataagcgcaaccataaatttcggtgtccaaccttaatcgtccatcttgtttgaaattttttcatgtttagtatttttatagttattagattataaaacacgaatattactttatgcgtgacttatattttttagttttttttaaaaaaaataaataagacgaacaattaaagttgggacacagaaactcatagttgtgcttgttttgggaataagggaatatatatttttgaaacacattacatacacaaatgcttataaacacgcgcacacagttgaccttgtgaatacatacacatcttttctctatgagcaaccaatatatcttgggattgatgaagtcaccaccaacgtttcgctgtcgacatataccttaaggcttacgaagacactacaagcactccacaatcgatatgtaccttgcgattgatgaaatcatcacgagcaccttgctgttgacatatacatcacctacacctggaaaaattagccataaatgcgggtacccatgctaaatctaagatttcaaccatagtttatatgtttcacgaaatgaaatctaaccagctacgctatgcaaaattcacaggtagaaaatatttttgtaggaacaaaataagcaaaatcaactgcatgtgtaaaacggcaccctaaaattccatggaacactaacatcaatcttaaatatgcaaatcatatattgtgcctctttaacttttcaaactgtttaagttatatcccttgctcgaaccggcctaatttggcctatatgactccaatcattaaaaaagaggatcttttgagaaaataaaaggtgagggcgagtccgacatgtcacttcattagttttctcctctctttcaccttcttcctgatctaaatttttttaagaaggcaaaagctacatcttgtatatatagggggtgtttggaagagaggggctaaaccctaaactcagtacatacgaacccttgaataaataagaattgagaagtatgaaatgtgggcatcataacaaaaaaagaaaaagatcgaaccagtaagactaatgtatacttatttatacctttgagaggtccacttagactattatgattttctctttagctacgtaggttatataagattcaattcaatctaacaagcggactggactaccttcggcggtgcctagcctgtaatgcttgcaaagtcgctaggcggggtgataagatgaaagaaggtagtatgtgcatctcaataggcctaatcgccttaaaactagacccccagggggtctcccggctgaaacaaatatgccctattttccgatacctgattagttggtgtggacaagtaaccctgaatctggactgtcgctctatttgatcctcttatgttggcccttctgcatcatccagcaaggctcggaagtctgagctattaaggtctagttgacgtataagaggccttcgatatgttaagggagagaggggagagtcattttagagttgggtgggaatcgttgatagaaaatttttttccctgaggtatgatagcgtctgaactaaagaaagggaatatggaaagtgaatgtggtaaaggataccaagagccctgaatgatttttaggcgtcttttctttgaacaaataaatctaactctctcaaaaatataagtccatctcctagagacttatatttttgagagaggggctaaagtttagcccctctcttccaaacaccccatagtgagggagtaaacaaaattaaagtatgtacatcgacgtgtgaaagtcctcgcccgacttaaaaaggtcaaagtacgtaatctccccccaaatagaaactcttagaacttggacgctcctactttgacccaagccccagcctcctatttgattttgcaatcacggaggttggggatggcgatgtgtcgaaagattctagtgttctgctcgcataatagcacccaaacgatgagggtctatattctgaattttcgtccaaagattgatgaattgtcacagatggtcctccgtggttatctttaggctgctttcgaacctcaaggttcccaacctctctcactttctttcgcgcgcacggttttcaaactgttaaacggtgtgtttttacaaaaaaaaattacgaaagttgctttaaaaaaatcaaattaatccatttttttaaaaaaaattagctaatacttaattaatcacgcactaatggactgctccgtttttcgtgcggaggggatggattcccaacccatcctatcaaacgcagcctagtgtgttcagatccctgacccaaatgttttggtatagtgcattcgccacagttctgttcttctattttgaggccacaaagatgtcaggtgctacgagttcagagtttggttctttaatcactatggcacgccaaaacttttcacccctggaagtaaatagggccttagttcgcgagacgaaatgttttggtgtgtcacatcggatatacggacacacatttgaagtattaaacgtagactaataccaaacaaattacagattctgcctataaactgcgagacgaatttattaaacctacttaaaccgtcattagcaaatgtttactgtagcaccacattgttaaatcatggagcaattaggcttaaaagattcgtctcgcatttacacgtaatctgtgtaattactcactccagtttcattttaattgacgctttggacaattacacgctctacaaaatatacctttgaccttatttttctattataatatatacaataaataaatacatgtttacttttattatagtgttttgaaagacaaatctatatatgtttttctaaactaaatatttttaaagttattgatggttaaagttataaaagtttaacctcaaccttgtccaaaacgtcaattaatataggaccagagggagtagttttttatctatatttaatactccatgtatgtgtataaacatttaatgtgatagggtgaaaagttctttgagagagtgaaatgtgcgtgttctagccgccgatgtaaatgtggagaccaagagtcaaaactgtaaacaaacagttggagcaactccagtcagcaaagccgcaggagctgaaggatgatgaccgagagagaggctcagaggccgcgaggaaaaagctgacaggaacccacttgggaaggctggcaagaaccgaacgcgacgcagcgcggcgaagtcagcagcttccctccctgctctgctctgcgaccgcggccggtcggaccgacggaagctcgcccgtcgtcgtcggcgagctgtaactaatcgcagtttcttcagagttttctgaatgatgcttatgatacatgtttggaccacctccactgcgtgatgaggaccatgatgacactgcgtgacagccaccgttattagcacgtcaacgactgactgtaagtactacctatgtactgtactactagaaaaaacgtggagattattagggttggttcaaaaatcacaaggaagttgcttgtactctcctggtcctggcgtcctgccgtccttggcgtggagagagacatggcagtacgggtacggcactactcacatcgctagtttcaatttgggccagatctcttcccctgcatcactactacgtcgtccagtgtagtttgggccgtttgtatttggcccattacccccaagccacaacctgaaaagaggcagcaattctcagcgggaatgtctgtgtgtgcgtgtggagtgcgagctccattagcacaagatgccaatcccgtcgcctcatcacgccatggcggcgagcccagctctcgcaccaacccgcacggtgccggtactgccgccgcgcgggccgtctcgccaccggaacgccgcggcaccgccgtgtcggcctgcgacggcgcggatcggcgcgtctccaggcgacggcgcggccgcggcagcagcggctgcggtggagcagggcagtcggagcgaggagaaggataggaagcgatgcctgcggtgcgggagcctgtatctcgacgaggacaactcccccaccgactgcgccttccacggccacgtcacaggtagccaacctcgcgataaatatcttcttctttctccggttcgtggctatcttgggctagtgtagtgtgaagtgtgtcgacattttggatagacgcccacaacattttaacacttataagcatcttcaaatgattagatcgacgtattttgaaattaacgaaatgaccttatataaatatacattatatagcactgaaataataattagctgtaaatataagtatctattatattattaaaacagttttgaaaggaggcaccacgtttgccgtgggggttagaaatttccacattaatcggagaaaaaagaagaaaacgaaaagtagagtccaagtagaaatacaatttaaaaatatctgaaattcggaattaaaaataagcaatattgaaagaagtttccaaataagaacccaatatgagattaataaaaaatcacaaatataataatataatatatacaatactcataaattatgagaaagagaaaaaaaaaaagagctcacagagagaagaaatatcacatagtaggagaaaagtaggcatgaaacggcggaaaataaagaaaatacgacatatagtagagaaggaagtccaccatataaagaacccaatacgagattagtcaaaattcaaaataaaaacaaaaattagaaaagaaaaggataatccaagtaggaatgcaatttaaaaatagctaaaatacggaattaaaaataaggaatattaaaagaagagttcatataagaactcaaaacgagattaattaaaattcggaattaaaataaaaataaaatctgaaattagaaaaaaaaagagttcaagtagaaatacaatttaaaattagctgaaattcggaattaaaaataagcaatattgaaagaaggatgatataagaacccaatacgacattaattaaaattcagaataaaaaataaaataatatccaaaattagaaaaactaacagagagttcggaatacaattttgaaacaactaaaattgaaaataaaaaataagaatattaaaataacacaatatggtattaattaaaatttggaaaaaataaattctcaaattagaaaaagaaaaataagatttcaattatgaatacagtttataaataactaaaatttgggataaaataaagactattgaaagaaaaaaccatctaaaacacatgacaagataaattaagtaacagacctataaaagagtagagtggtgacgattgatacgacatataaaaactgttaataaaacaccaaatataatcctaatgatgattaaaaggagggacgacatgtaggccgtgaagcaaacgagcaaggcgattgccgggacttctagaaagtaaaaaaaataaaccccattgataataatattcgatttttaaaatctcaatgacaataaaaaggagaagcagcgggcggggtgtataggagtatagttgtagagccaccgacggttgacaagacttctagaaaataaaaaatgaattccaacgatagttatgttcgaattttagaatcacaatgacaataaatagtaggcggcggacgggccgtagaggagcatagtgacatcgtttgatgggacttctaaaaattataaaaaatgaaacccaaccagataataaactctaaaaactataaggtccaatttttaaaggttcggaacttcttaaaaagtaaaaaaaaaccaatgataatcatgtttgattttaaaatctcaatgacaaaaaaaaagggaggcagcggccgagtggtagaggagtaaaatagcaaagccgctgatggtttggcgggacttctagaaagtaaaaatgaacccaaacgataattatgttcgatttttaaaatctcaatggcaataaagagaagacagtggacgggccgtagaggagtataatggcaacgtttgacgggacatctagaaattataaaaacgaaacccaaaatgacaataaactctaaaaaaatataagatccaatttttaaaggttccaaggagaatgaatagaaattgtggtagatcggacaagcaaataaagaaggagatgacataagaagtagcaactagtgtgacttttaaaaattatataattagaaacacggagatgataaagtttgatctttcaaaatcttaagacaatgagatagctatttaataaattttaagtaaaatcatacttaaaaaaatatatgattttgtttgggtgctagccgcgcaattgcacggaccacccagctagttactgttaaataagacttgaatctatcttttgacgggtttgcaggggagaaggggttgttctcgctgtcgccgccgcaccaggggatcgacggcgaatggagcgacaagagcggggtgatcgtgtacaggtggaacgacagggggagtcgcccaaacaccgggagagacaactggaaggggaggtggagctgctgccaggagcgcgacgagggcgcgccgccctgccgccgcggacgccacgtctcctacgacgacggtttcaccctctactagacgcactctctcttaagtacagcgacggtttcaccctctactagacgcactctctacagcgagaatgtgagaggaagtccccaaaaagcattcgcaatgttgattctgtacgtcagtgtcagatcagtagtgcggagtgtggtaatcaaatgaattgcagctctaaatcacacatgcatccatgatgctaacaatggaatcctctatgtccagataagccaatgtctcgaaactaaccgctgcttccagtaacagtggaagggcaggggaaaaacactcctccagtttgcaatccatcatacgcaggggaaaacataccagctcacacttttaagtagcattatgctgtttatctaaccacgaatgcttccagtaaactgtctttaggggatgataaatagacttcataatcgcaaacagaaacaatatgtaggataagataccatgctccattacatcctaaataacccaccattacaaaattcagtctctcagaaaattgcaactcagaggatgatcagacacgggagacaagaaacagcacttcatgatactaggtgaagataggagtttacgcatcctctgtgatggtacccttgtcgctcacgtagataccatccaagaacttcctgatatccttgttcttcacgtggcatttctgtttacaagcaaagggaattttgatcaacaacacaacaagggcacaaacaaatcaacaagagcaaaacacacgataattgataaaatatcttgtttcactgaaagcatggaaaaaagagtgctcgacgaaccgaaaaatagaagataaatcacattggcaaaaaggtttgatgtataatcatggtgttgtgcagacgccaaattcaaatagggatcagacagtggataacaaactgtaccctgagcaccgacaccactcatggtttccaaaccaagaacttagcaatgccaattagcccaactacaaaagggatcttggttgttcaagaaatggatttgttcgtcacaaatgtgttaacgtaacttcagtactgacataacagacagatggtgaaatggttattaaaacctaagtagagcactgtaaataatgacattcacaactgccaatgatcaaactaaggacatagaacatcatgccgccttagcagtttcaacatataaccttaagcagcaaacaacagaaacaagcaggcaggcatgacttgttaaacaattacaaacctagatatatcattggagcaaagagaactaattcctacaaccatggcaacatgagtacataacacatgcaaagatcaggactaattaggttatattgcatcatatcagtattagaagaccaggaaatctccaatctatagggagaagaaacgggatcgtatcattcacctggttgatgagggctgctgagcgagagacgagctcgatgtcgttgccgtcgaggacgagctcgtccttcaccttctccgaccgcaagatggtcaccccctcgagcatgtcaaccttcctcacctgaaacacaaagcatacagaaagacgcatcagatttgagagatctgtgggggagatctaggatgatccacgaacagcgggcaaatggaagtgatccaaaggtgggtttcttaccttcttctcgcccaagaagttcctgatctcgatggcggtgttggagttggtgatggaggcgttgatggggaagtgagcgtagacgaagcgcatcttgtagcggtagcccttggtgacgccggtgatgaggttctggacgtgggagatggcggtgcggatggcggccatggtgcggcgggtgccgaaccacgcgtccacctgcagcttgcggccgccctccagcagctggaagtcgaggttgaggtgcttgaagttgcgggtcagcttcccgcgggggccctccaccgtcaccaccttcgcggcgacctgcaccgtcaccccctccgggatctccatcgtctcggacgccaggatggtcttcatcttcgccggcttcctcttgccccttcctcggcggcggcggcggggtagaggggagggtttgggtgcttgctcgagagaagggcggcggcgcggggaggagtgggcttttaatatagtcgacgatggcgcaggttagggttttgatcttcgccgttggatcgagacattaggtcgcgaggtgatgactcactgggctgctggccttaggccggccccaattcatgaattcttaggcccactaagaagtatgtcaaaatttggcccatctgtagatgcgctgggctgcaggtctggtagctttgcagtccaagcaaattgagcccaaaataatgggtttaattccccgtggaactcgaatattcctctcttcctccggagtccggagtccacacacactcatattcccattatttcgctgcagttgctgtcgaaatcgctctcgctagcctcgctcgatctcggcgcgacgcgacgcgcgcgcgcacaggcaagcggcggccggccggccggcatggtggtctcgtacacgcaggagcacgtgtaccgccacccgtggcaccgggtgaccgcggcggcgtggcgcaagttcacggacgcggacgcgcgggcggcgccgctgtcgcacatcctcgaggtgcacacgctgtcccgccgcgtcgacgctggatcggggcgcatcgacgccgtgcgcgccatcgcggggcgggcgccgccgctcccgctcctcctccgcggcctcgtcgccgccgccgacgtggtgctctgcgtcgagcacaccaccgtggacgggcccgcacgggccatgcgggtgatctcccgcaacgccaacctccgggcgctggtgcacgtcgaggagacctgcagctaccgcccgcacccggagcggcccgacgagtggacgctgttccggcaggagacgagcattcggtgcgcgccgctcgctgccgtggcggcctgggcggccgagatggtggagcggcggtgcgcggagaggttcaggcagaacgcgtcccaggggagggaggtcgtcgagacgatctgtgaacgcctcgcgcttgcagatcactgactgctcggtctagacgaagaacattctcaaacttcaattctgcttcggcatcgaaagggaaaggatttgtctagagattgccagttgcagatttgcagcattttcgaatgaaaaaatgtcgtttcttgatgttgcgaacactgtaaattgtaacgaagttttacatctgcgggattccacgcgtgggagcgccgctctgtcccgagatgtttctctaaattttctgcgtttggaacggcatcgaatgcgccgacctgtcaacctgtgaagtgagacacgatcgcctgagagctccggacgttgacacgatcacctgagtcctgaggctgaggtgagaagagcgcggcctgtgccagaaaactccaggcgtggacacgatcacacgacgaatatgcggacggaaatcgaacaacagagcagacgtcgtcgtctgaacaggtattgctgaaatctttccaggggctctgcctgtttcgttatgccgtggggtcgcggtgggccaaataaagatccatatttgtgcacgagaaaagctgccataatagcccacgaaattcggcttgccctaagcctgtaagcctaattcagcccataaatatcgacagattgaacagcccatcatgataccacccatttcacgttcggaaaagtacaccgaaggtccctcaacttgctaccgagataaaaaacgtcctcgaaccgcaaaaccagatatcaaggttccttaacttaccaaaaccggttacaataactcattcggtggttttgagcccgtttttatcctacgtggcagctgagtcagcatgtaccccacgtgtcagactgccacgtcacatctcttccttggtgtactttttccttcacggggaggagtcaaggggggttccacttcctttttctgttctttcttgttttattttgtctctttctctctgtttcttcacttcgccgttctctctctctgcctttttttttcctcctcacgcgtcacacgcgcgcagcagaggaagggcgccagcgacgcaggtgatgggcggcggcggtggggaagaggggccggcagcgtggaagggggagagcttggcggcaaggagagggagcctggtggcggcgcggttgcacgcaggaggagagaggctgcgaggcgcggcggcttggcagcgcggccgggagacggcgcagaggggaggaatcgaggtggcgccaggcggaggagggagggaagggagtggcgccgggaggagaaggacggggcgccaattggagggggcgccagcggcggcatcggctccgattgggtgatggccggctattaacgacccaggcctcgtgtttttcatcaacaccggcgcatcgccgcggcgcggcggtcggcgcctgagggaaaaggggtggctactcggcggtgcccgtctaggtgcgacgacattttggggtggatgaagacaagtagacgacgacgatggcggctttagtggcgaaggcggaggtggttgcgggcgcgcgcgggggcggggaagcagctgcacgggggacggccggcgagcgcaagcggcgggggaggagcagcgtgtaggcggcgtgcagcggagcggcgcgcgggcgggcggcggcggcaggggaagcagcagcccgggcggtgccgctccactgccttctccatccttctccgccggcagggagaacagctcgccgccgccggcgagttcgaggacgaagtcgaccgctactggccgccctccccagacaagagggagagaggaggaggaagggagcagcgatcctgctcctcgtcaccgtcaggctccctgctggcgtcatgcagtgagtcatgaagcggcggcgcaagagtcgaggccgccgcagggggcggtgtggctacatgagggggcaagaggagggccgccccggaagagtcgctgtcggggagcgccaaggcgattatcgcggccgcatcaatgttcgatatgatggacgacgaggtggcgtcgacgacagcgtgggggcgcggcaaaactgacgcggctgaggcggcgtcggagctggagctcaagatcatgtgctcctggttctacagtagcggcttctagcggagcccctcctccggctccagctcccacgcctcctccctatgtcggaagatgacgacaacgaggctggcgtcctccgcttggctccgccaccccgtcggcttcgggtgccgtcactccgcccgcgcgtctgctcaccgccgccccactccgtcccgccaggcgccagcttcgcgtggcgctggtgactcagcgacgaagaccaaggttaaagcaccacggtggacaaaaccagtgccacgtaggataaaaccgtgtgaaatactgccctgggactacttgtgaccggttttggtaagttaagggaccttcgatatctggttttatggttcgaggacgtttttttatctcggtgacaagttgagggaccttcgatgtactttttcctttcacgttggaccaaaaaaggcagcccagttttcagcgtgtcccctacgcggcccaatctgcaaaacgcgcacgcgggcatcacgacgactctcctggaagccggaaggtgcggtcaaaccggcgtcgtccggaagcggacatcggccccgggagcgagtaaacgaaggttgacggctcgacgcgtgtgcgaccctgaactgtcccgtgctgggctggcgctcgtgctcagtggccgggagacacgcggtggcgagcgtcacacacgtgtgaagcgcagcgtcgccgccgggttcgatcacagccgccgccgttcgacggaggatatcacaccagctgccggccatccacccacaatcgccacgtctaaactccacaaacaattatgtagtaaactcctgaagtgcaaagccactagtagcatcatcctgaactggaactttatgagcgaaaaaggagcacttggcaaaggtgattctagggtcaagggatagcaatccaaagccaatcgaaatatcaagtcggtccgcaaactggaacggacacaccgacgctgacgctctctgttgcccgcaagacggacggtgacgtgttgcggcagtaatatacagtcctgttgatatcttcggttggatgtggttttcctggttgtcgtgcttccggtaaaggattggtacagccagccaaggcggctttcaaaagttatacctgcagctagttttctggtactagctcattgtcctgtcagtcacttgagcggtactcgacctcatccttttgagcaatggtccagcctttcgatgcctttatatcatggatattattccacgccgacttcaattttccagggaacagctaattcaatggaaaccatgaaggattaagcattaagcatcttaggttatttttgagggaccgaattaagctcaattaacatcgaattatgatgtaggtatatataacatgtgttcgtcaacagcccggttcgttcgtagctcatgattagccgaacaattacgtgtatatatatcggcaggacaaatcattggtcgagttggttgccggtcgatcgattgggcggccggccggccggctgccggtcgacccgttgtcggcagcgtgcgcaattaagcttcccctgaatgatcaattgatcatatgatcacgaccatgcatcttccaacctctgcaagttagctccaatgctctatccaaagtacccgacggatcatccatccatccattcctgcttttgctgctacctatccaagggcagagagatatttcgcgcattccggcatattttcctcgctctcctttaccccaattcgattcgatcgggtgaggtgatcgatcaatcgatcggttgccgaattgtcaatgtactcatgtggggaaagtttcggttcgctccgtctctcgcgtggcgtcgcgcgtgctgttccggcgtcttttccgtcctctctggggcaaagggaatccgcttatccggggattctcttcgtgcgctccggttcgcgtgtctcctcgtggttggccgccttgtactttgttaattcaggacgagttaagctcagcgaggccgtgaagtttccctgtaaaatcgggcaacaaactacgccgtgatttcacatgaaaacgccatcagcgcgtggctgcgcggcgcgtatgtacggggcaatgtattgcgtacgtagctggaccaaaaccggtccacgaatcgtccttctccatgtcgacatgcgtacagccgatgcatatatcatatacagagagagaggccgtgatttagtattctcaattctcggattgcaatttggcttttgagtgtgtacgtacgtatgtgtgacagtgacatgggcacggtctacgtagggagggagggggagaaaagaagaagggggggggggggggggaaggccggccggaaggaaaggaatggccatgctaatccagacagctcagcgggcggaaagcgacgcgaggagagctccacggcagcaacagcagaaaggggggatcttttccttaatttttctcatcgcggcgtcaggcagatcggcagaacgagaacgtgcggtgaacgggggcacgccgcgccacgccacgcgacgggtcgagaggccgaggacgacgacgggttccaacttccaattcccagctagaacgagagcttgcttagccgacccgagacggcgatgcggcttgccgatggtttggtttaccgctttgccccggttcttcgctttcccgttttccaccccctcccctcctctttcggtcgagcatatctcctccccgcggggtgggctacttggctacttgcccgggtcccgtgtcctaaaaacacaacatatcttacggggaaaaagaccgttccacccacacgtctccacacgcttagggcctcaccttttcgtttatacttatacttaaaatttaaatttttaatattaaatttaaaactgattttaagtctttttattaaaatttatctttcatcttttatttttagatcgttaagaatacatatataaaaattttatttataaattatttttcgtttgtaaatatgtcatttcgtttattcatgaaataagcggaacgatagctccactgtactactcatccagtacacggtcacaggagccagtgagccacggctacccatctggatccagctcctccactcccagcgccgaactgtggccggcagcgagccatgagtggcggcatgtcacgttccgccgtgacgattctaccgtagtactacgcccgtgggagaggcgaggcgaccgacccaacggccgtgcacgccgtttaccgcttttttggctgcggaatccacccgtgaaaccgagggccgcgttgccgccgcgccaacccccc

SEQ ID NO: 8890 - DNA, 7775 bp, Oryza sativa
aaaaaggaaaagttgtgcctaaagtgttttggataataaagtaagtaaaaaaaataattccaaatttttttttgaataagacgaattttcaaacagcgtaaataaaatgttaaaatctcttatattagaggacggagggagtatagacgtgttaatttggagtgttcaggggcgtacaatgtggagcccagtgagcagcgattgctgcgacggtgagctggagtggtcacgttgccgccggcggccagccggccggccaccgtgtgtcctgtttggttctcgccgttgcacggctatcacaccggcggcgcatgacaagtgagaaccgcgtgtagttttgtttaatcaccggctaaagagagccgcctaatccgattctgtgacgctggtggtgacctactaggctaccaccaccgacagcctctgcctggaatgaccagggtcggggattcccagagaccactgaccagtacgttcacctcatgatccaagtgaataatttcgaattcttcgtttcctactccctccgtccattttaatgcaattataagttttttattcaactttaattattcatcttattttaaaaaaattataattagtatttttttattagatgataaaacataaacaatactttactttacatatgacttatacttttaaattttttaaaataatttttaaataagttgaacgattaaagttggacacgaaaactatatctatatttaaaatgggatggagggaatatcttttccattatcactgctttttattaacggtcattatcactgctttaattgttgccttgcaagggaatgttttgctttcttatttatcgttagcacgttttctaatctcataaacaatactccctccgtttcatattataagacttgttagcattgactacatttatataaatgttaatgaatctactatgggtacgctggtacaaggatctacgtaatacgacatcaagtaggcagaaaacaaatattataccggttcaggccccttgataggtaatagccctaatccaattgatatgagattatatgatggaaaccacagattacaagggggatagtggaactcgacgataccgacgagatcgtagtcgagttgattcgactagatcacccggcgacttggctcctgtaggctccggcttcgtaggctgtggtggttgccttgattatgagattcgatgccttaggtcctcccggggggtcccttttatatcgcaggtcaactggtctccaagtaggactcggagacatcggacccagcacgatacaatgacgacccagttctgtccgagtaggactccttccatttgtgaactccatgatgaatttccttaacgtatgccaaaaatgtccgtatacgcatatgtataccatatcgatatgtgacgtatatcgaaaggtagagggtataccttacccgtaaccctgacagtagcccccgacttctgcttaaatgaactcgtgtaaccgatcgtgacttctgatgtcgaggttgttgttgttctcggtgtgaggaccgagggataaggagtgatcgacaacgccctgtgaagctcaatggtcatgagtgaatttaaattgaagtccaaaaaactactgcgcgtaatggacccagaaatttccggcggtaatctctctcctttccttggaattcgcaccatcggaagtgcgactatttaagggagttttgcggatccaatttgaagtccgccggttgtgaaaaaactctccagcctccaagcgtccctcgtcttctccgcttccgcaaaaaccctagctagctcgtctcggtcctttctccggcgaaccccggcggcaatggacctcgacaagtctacctccaccagtgcgtcgctgaagaagctataggaggatggcgctcttcccggtcgcgggaccatggagagagaagcaggaggtactgaaccccagcctgtcctgggtcgcatggttgcgatcgaggactatattctttatggttttcttcctccgccttctgaatttcttctcttggtcttgaatttctacagccttttcttgctccatttgaaccccaattccatcgccttcctcagtatcttttcgcatctttgtgaggcctacattggggtagagccgtttcttgacctcttccgtttttactatgagttgcgctggatggaaccaaaaaaggtgtccggatgtgtcggtttccgacttcgggatggcctgaagtcgcgatacatccccttccagtgcccttcatctcgcagcaaatggcgggggaggtggttctatcttcagatagaagattcggatccggtcttcattgtttctaaggagcaaccagccaagatttcatcttggactgccaaacccgccttgaccccatccctcaaatctttcgtcgatatcattgatgacctccgagaacgggggttgtcggggtatgaagtcactaccgacttcattggtaggcggatccagctgctctaggcttgagcccacccagcctttgactattctaggccggaggacgcgacccgggtttctcctcggggtattttttttgtagttgaattgactcccttatgtgcgtgttcctcctgacttatcgaattctggtctcgatctataggcttgaacagcgcaaccgtgaagcgtcgcgtcggccaattgatgatcagcggcccgacaacgacgagcaacgtccccgtccccctttgcgagaagggggcagtcgaacgcgaagctgccatcaatgtaagtgtactcagcggcccttttgcattttacttccgggatcacattgtgacttcatgaagcgtaggctctccctctgactgatatcatcgggccgctcgtggatcatcaggcggcggcgtcgctgaagggaggacgtcgccaagggaggcgctccgatgcttgctgtccgctggctggccatcaacgaggtgggtgaggcaacgcctcacctggatagggcgctctggtgcaggggaacgcttctcacgcacaaggggtgctccagggcgtttcgcaaggtggggcataccttcgctccctgcggggaccgacccaaccggtgccccgcgtgggcctttacgcgaattccccaaaatttcccgggcttccgatgattgtgccttgcggtacacgtgtcgaacctcgatcccatcgaaccttttttccagtttcctgacttctgcgagatacgtagataactcggggctagagcacttgtaatctttatgcacctggttcgtgactagttcggaatcccctttcacgactagtcgcttgactccgagtgcagctgcagctcttatcccggtgagtagtccttcgtattcggctgtgttattggtcgccctgaagttgaggtgaattgcatgcttgaattgatctcccgaaggtgacgtcaagatgaatcatgtccctgctccttggctgttgagtgcgccgtcgaacaccattgtccacgtttcgttgttgatttggttgtctgacctattatcaggcatagtccaatcggctacgaagtcggcgagtacctgggacttgatggttgttcgtggcacaaagtggacatcaaactggcttagctcgactacccattttgcaatgcggccgacaacgtctttgtttctcacgacttcaccgagagggaaggaggatacaactgtgaccttgtgggcttggaagtagtggcgtagctttcttgatgtcatgattaccgcgtagagcagttttcggatctgtgtatatcttgtctttgcgtcgtggagagcttcgctgacgtagtagactggtcgttgcaccttctctctctcgacaacaatgacagtgctaacggaatatggcgtggcggcgatatagagaaataattcttcattaggttggggggcaacaagtacaggtggatttgataggtagcgcttgagtgcaatgaatgcctcttcggcttcctgtgtccatacaaatttgtcttgcttcttcagcagagcgaagaaaggttgtcctcactctctcacctagcgatgaacttgcttagtgccgccatgcatccggttagcttctgtacttcctttagtcttgtaggcgacttcatgttttcgattgccttgatcttttcgggatttgcttctattcctctgccagagacgaggaaaccgagcagcttgcccaatggtactccgaacgtgcacttctctggattgagcatgaggcgatatcgtcggaggttgccgaaaacatctgtatacgcgtatgtataccatatcgatatgtgacgtatatcgaagggtagagggtataccttacccgtaaccctgacaatatgaaacgaaggaagtacatattttagaatatatatatatatatatatatatatatatatatatatatatatatgaaggttttttggaaaataaataaatatatttttcaagtgtataacatttattactcaattaatcatatcctaattacttccatccgaaaggctaaagcaatttgcagcctaagtcaaagctaaaatttaaaattttaaacttaattttaaattattataggtgctttttaattttaatttctgaacttaatttgaaatcactaattgtagaaatacaaaagtcgtatccaaaattatgtttcgttgccgctattaggcgaatccaataaacgtaaccctatatattctgaaaatatctttaaatatactacctctgtttcaaattgcaagttattttaacttttttaagtcaattaaatttatagaaaatttacctctgttttaaattacaagttattttaacttttttaagtcaatcctctttagatttgattaaatttatagaaaattatagcaatgttttcaaccaaaaaaaaaactatcagaagctagacgtaatgaaataaatttagtgctatacgtattgttatatattttacaatcttgataaaaaataaatgacctagcacttcccaactcacttatttctattgtgcgcgcatgctttttaaattgctaaacgatactttttttttgcaaaataaatccttataagaaagttgctttaaaaatatattgatatttttttaaaaaataactaatatataattaattatgtgctaattaaccgttccattttccgtggtgcacagcccttataatataaaagagggagtacataataaaaatttaaaaaagactcgttatttggagaaaaaaaatggttgagatgccgtggaaagcggcaggtaggctgaccgcgtgcggtgaaccgactcgagtcgagagagggtgcctcgaaatgcacgttgatataaacagcccgcagcgaaaccaccccaaaaaaccaaaaacccaccacccccacgcggtgccactgccaccgcccctcgccgctgacgaccgccgccgccgccgccgcacggacattccgcacacgcccgcggggggcgggcggcgccgcgtcgctgatccaacgcgagcacgttcgtcgtccatccatcctcccgctcggatttggagtcggcaaccgctcgggctcgcgtcgcggcaactgaagcggcgaaattgcaacaggcacaggcaggtgaggtgaggagcattctgatatattattatttttttttgcccccaccacctccgccgttccgcttccccggcccgaatcatcatcccccaatctagttcgtgtgcgctgttgtgcggtgtgggatttcgcggtgtcgtattggattcgatattgggttggttggttggcctcgtttgctgttttgattgttgattttcttctcctctaataactgcacgcgctgatcgtttctgtacctgcgacatggatgagatgtccgcatttttttttgttcgtaattggggaggggaagctagccgtatagccgattgttagtatgttttgatccgcatttgcgcattgatcggagatgatagttttctcatgtcacctttctgtttttttttcctttacttctttcgcgcatatgattggcttgaattctcctgcactagcggttacctgataaaaaaaaattctgcgcgtacggagcatcggaatgtgaatttggggaccatcggtggcatccgaaatttgtcaatatatatacactagtatgtgttaatcttgaacttttacatggtgaattgctctagccatttgctccatccatccaaagtagtatcactgcacttgcctagtatttagctgcttcgtgtggtgattggtgaatgtgggcaatgactaggaggacttggggttatttggtatggaatccagtactggatagctcactgtcactggtggccagtatgcatattcatcatggattgtggttagctttttccaaatctgcggcttgtcagatctgcctgtattatagttattgtacagctttatgtctggggctctttcgcgccgttgggacctcaaattctccaatgcaatccaagtcgcatgatggtccaagaccagcgtgccccactgccatgtgcttaacaaccaccttcttcctgagatcgactggacaaggaagcataattgtactgaattctcgtgttattacgtcggtttaaggtgaaaaatcttgcttgagatgcttctttaaggtggagattctgcttagctgtacagctgttgagacaagctggagatcagttattcatttgatgtcctatcacttgttcaatgttatgaagttatgaacatgggcttcttagcgttttactctgggtgcagtgtaagttatttatcttctctgaacttgtactgcacttgtagtacattttcttgatctcttcagttaaagcaatttatgtacaagctgttttgtgcgtgactttttcctgtcataatcattatgttgcagggtcggaccacccttgaaagctcttttgctatcttgctcattgacctgatcaagttgctagacctttgctcttgttactaactttcttggtgttatatacaggtatcaagtttctagtgcactaaacaacctttgagatgggtactgtagagaatatggaagggagagaagagcgttcgactgatgtggaacgggatggtaaacaaggaaaagaagttgaatcggactatgaaccagctagagactctgtttcatctcagggtgaggctaacagcaatgaagataccagagccaaaagagtctcaagggttccaaagaagctagtgaagaaagattcaaaggaaaacagcccacgctcaggcagaattaattccaatcgccaagtgcagactaagctgcaatatatatcgtcaaacaatttgcagagcaaatctccaaagccaaacaaaacatctgatggtgctaaaaccattgagataacaaagccagatacagtgacagttccttcttgtccttcatctgaggtgtctgaggagatggatgataaacccattgagaatatagtgacggatgataaatccattgaggatgtagctgatgataaggccactgagggcacggcctcttatgataaggccactgaaggaaaagctgctgatgatacgaccgttgaggacaacaccactgatgaaaggagcattgagagtggcactgatgataggaccattgcgggtatagcagctgatgttaaatctagtgaagaggcaaaggagattgatatattggatgaagccccaaattgtgatcagagtactgctactgacgaggaaatagctgatactgaagaaagcatagcttatgatggtaaat

SEQ ID NO: 8891 - DNA, 51473 bp, Oryza sativa
ttactgttccattatccatgcagaaatgagaggcaggaaaaaggtgagcaaggaaaaaagaaaggcaggcagtgtggctccctctgcttttgttggtgagccaacaagagacaaaaacatggccacactttggagagtttgggagggtggtctctcacggcataaagtcctaaaaaaggagggaataggaggtgatacggttgggtttgacaccggctgggcagccaagaagcagccactagtcctcccagacctggccaggagggtcttcatcaagaggttgaccctgccacttggatgatgacacaatcagttccaacatttcgttcatagttgattataaactaaaatgcttattagacatataaattaattataggtaaaacttttatatatgtgggttcttcacgatctaaaagcaaacgctgaaaaaaattatgataacaaaatataaaaagacaacttaaaatataaattttgattgggacggataagtaaaaacaaacattagggatagataataataggacataatgctacactagtatttcttatgcagttttatacagagttagattttaaaagtagaaatagatttgatgcgtaacccttactctctttatatacacaatttattttctatacaacattattgatcaacctacatcattactagatttaccacggccaacgtgtgtatgtctctctgatttttgtcaagtaacatatgatgtttttatgcttctatagtgaaaatgggggctctttttagcgtgctctctctctctctctctctctccatagtacatcatatattgtgacttgattcctgttctctttttttttaagtcggtgattattcccatccgtcttggcatataaaacctggcgtgttaacacactcccatgtagcaagtgtcagcagcatgtgtttttgagatatgtcaaatatgaatggaataggttcaatttggcatgcaagataaggtaatatgcatgtttgaagtcggtatatgttcatcctatattatacagcctgttttggaaaaagttgccatgtttatttttagttcgctgtagatcgtatacttttttactctgtttccactttcttgaaggatttttttttagatgcactttcttgtagcagttagaaagcttcatgtaaattttacataggtagaaattgtattcggatgttgccaagctaagatcgaagacccttgtatcatccatgaactaacgttgacatgtttgtttgttcgataaacccaatcttcaaaggtgctcataaggatatggaaagatgtattcaagggtaagagcgctcgcgtatatatgaatgcccgcacttgtaatatatttagaaaatgtattattatgggcatgtactaaacaataattctctttatgaatctattctcgagaataggcgtatcaagaatcgtgtgctctaatattgataaagtgatgaaccatatccgaggatgctattcctcgagaatccaacggcagtaaaaggtcccccaatgcatggagtcatggagtgtatgtgcgtttgtacataaaatggcataattatcgtgataaggatctcttgatggcataaggtatctttgatcaaacgagaacgacctcaccatggatgaatggatgaaggtgttgcaagcaagaaaaatcttctgaagttatctgcaagaacagtggataataccaatataccatctgcagattagtgccaaaggatttgtgaaatgtatgtgtcgccatgagcgcttcatgatcttcacgagaacttggccgtttctggaacctaatgttcccattattcctaccggtggaaattcctcaataatgctcacattttgttcgaatatacagaaggatctatgcattattatctgaagcagtctataccatttatgtactaatgttctgtgatatattcccctgagaataatctcctgaatcctgacagcaattgcaaatttttatgtcttagaaaggtccaaaggaaggtactctcagcagccaattaccaaagtgatcgtggtgcaggaacactattcctctcggtagctaaaatcacgtcacattattctttcattgggataagcttcacattattggcacctttggtcagggcgtatcactacaggagcatgaaaggatgaaaagacaaagataacggaattatgtgtaaaggttgcatggatatttattttgcaaaaggaattcaattagttagtgtggtggtctcaatattttgctgtccaaataataatattttcacaacccggtatcagattctaacacccaccttagataatactcccttcgctccataatggatgttctagttttgttctaagtcaaacttatctaattttaattaactttataataaaacataacaacattttcagtactaaattagttttattaaatcaacattttaatatatatttttaaaagacatatgtttcgtgttggaaatgttgctattttttttctataaactttgtcatacttgaagtttgactttggacaaaccaaaacattttacattatggaacagtgggagtataatctttttttttacactcaaataaccattttttctctcttaattacttggacgctagtgcatggctcttgcacaaatttagttaggtgaaagccctctacttctttgggggacagggaggactccaatctgatctctgatctgaactgaatgcccacataaacacatgagagttagacaaccagcccagacctgagtagcagatgccaagtccagtttttattggcctttcaatgcacaagaggtggtagctgcccacgtaactgcagggcccccgtactgcatagatgtgagggaagtgaagccggagccgtacggggaaacaccggcccgggcaggcaagcatggcgcaagattgagatcgccagccagcgctaagcttccctcccggttgacacaacagcatgaggctataggatctagcattctagcaccagtgcaagccaaccaccaccaccaccacgacgacgacgaccgcggctcaggtgggtaggccggtggccggatacctcacagccttgaccaaagacggcgtcgccttgtggccaccggccggctcacgcggcagagaggtttgcagggtaagcaaactcaagctgcttgcagccagccagggtgcatacatgcaagtttctttttgacatgtactacaagggaggctagtgcaaccaaaatagaagaagagatggattcagcggttggaacttggaacatcgcagcattttaaatttgttgagggtagattctggttacatttggacagcaagcgtactgggaaaagaaagggaaacaaaggttggttcaaaacttactgtttggaatctgagctccaaatgttacagccttgaccttggaccaccctttcctggtatctgtagagcgtcataatggccaaaaccatgaaaaagaacttgaattggatcttctttcccgtactcctgaccatattctgcaattgctattaaaccaccagcttccttatcatgcatgtacacagtaattggcatcctggccacattggtaacggcatattagagcttttgttacttcccgttttcagaaggacaatacaacaagactacacatatatgaaactatccactattgctgttgagctacattaataaactttggtcaaagcctaacaaaatggaatattaatgacttttgggagttgtgttttgaaaaaaaaaaaggaagatccccgcaaaaaaaaaaggaagatgcttaacagtcataacatgacaaaaaaaaacaaacaaacaagacagtataagtggacaaacttatcccaggaatcctaaaatggattaaaagcaaaccaactaaccatcaaccctatataaatatgaccaagagggcataagtattctaacaggttactgcacaaatgtatactgcatttgaaatggtgagagtaaaataactccaaacatcatggctaattctcaccgaagaacatgcgaagccattaacagttctggttcacctccccacacatgtggcttcctaatccgagagacatatgcatcgaagtccccctcaacaaacctgtgaattaatgtcatagcgaagcataagaatgcgtaactcaacaatatttagatgcagagtaactaacagaataatgaggacaggtagaactaaccattcagtctctgcccgtctcttgataaattcatcggcgacctaacagtgacaccatttaaatagatcttttacatgataaattcaccagaaatggttgcgttgcttccagagcaacatttagtatctaagaacagaatggatcaacagtagtacatcagcagaacattacaagcataccattgctcttaagtcatcagccatctttctctggagatcatcatcaggtcgcttacctgacctaatacatgcaccatgagccacagatcggaacaagcaccttccatctccaggaatgcctgagggttaccatgtgaatcaaacacaagtgagcagacgatgcatgctttaaccaaatgcatattgtatagtaattagaaaaacacgcacactgtctcaccagtaacagaataatccgtgcaaacttttttcccatgagcataactagtggacgattcagtagtttgggggctatcagtattattgtccacaggaccctcagcatttgccttcgcaggaactgcaaaacttaggaaaagtccagtgcctgtagctccaactttgtgtcctatgcttcttgaatcccagagaatactatacaacttctgacgtgagggctcatcaagctttagctttagaatattatccctcgcaggttgtctgccacacaactgtttccccgaactggcaaaacatgttcgcagtgattttatgttcatcttaggaggcaaaccaactaatctgatctttacatgataaccgactgcttgtgaacgagaatacttccataatgccatgccctgtgtcagccctccttgtaactgacaagactgagaatacaagctataagtacagcgttgtaaacagacagtaggtgtgtagatagccatctgcttcaggcagcaccgcgccaccaagtataagctgaaaaacatgtttcgatgaccaaaattaagaattagtggaacatgagataattcttacgaaaatcaaataaagcaagccaccaccacaatgaagtagaagatccaccatgacacaacggacctatgatagatatgattgatgtcaacattagtatcaattgaagaggattaaattatttttcagcacaaaaaatagtttcatcgttgacatatccaggaaataaatgtgtggcagatagttattagtgagcataaaagactgaatgtctccaacctctagcaatcgaccactttctgctgagattcgacaaaacaatgggaaggatgggcatgctaaatcataagcgcacacttgctagaacaaaagcaatttgtcctccttttctttgtcacacttgcgtagagaatccatattatcctcgtgaacttctcaggatgtgctacagggagaaattgccctcccaaatcccgagcattcgagggcatgggcagcagcgaatcactagaaaactattctcattaagattatttaagttcctgtcttggccgcgaagccgagatttcgtgctaccaggccattcccatgcccgaattcacaagactacaaccctaagctggtggaaaataatgcattatatgcacaattgaattcagcaagtgccaatgcacccaaaccattcccctcacccgggagagcagataaattggaagatagtagtaactcaaattagtcacaaattgcagaggataatgaagtaaaatccgcaccttagccttcggactgtccgaagcgagcggagccgaggagagacgcctgcaagaatggagctgacgaaagcggaggttattggggacgggagcgtgagccgaagaggaagggatagtggtggcgggagaggctttagacctccgttcccgcgaggggattcgccggtgcacgccgccgccgccgccggcgcagagtcagtcacggccactggcgcgccgccgccgcacgcgaggaggaagacgatgagacgacgcctaatcgatatccaccgcgcatggtagatcggacggttcaggtggacccttcggatatggtagcgatcctattccgaggaggcccacacggaggcccagctttgtttggtctttggtggcccgagaagagaagaggctcgattttgttcggcgggggaaaagtctaatgtgagttctcatataggagtacatttcaagtgcaaaacttggtatatctagttatctaccactttaattattaaaatattttaaaataacccccttgactgttttgaggatagttttcagtgatttggcatctaatggcagtctagtcataagatgaaccaaaaatagatagaggattcaagtgtaagtggtacaaaagaaagtaaacaactgtggtgcccacttgtcatagcccactcttattcttctctttcttctttcttttgcagatagcagcaggaacccgacaagcggtggagacgaggctgatgagcccagcactgatgccatctccctcacttccacacccttcctctctgcctcatggagggccaccgcttgcctacctcctcttcgtgtagctacctctacctcctccgtttatcatccctcttctccataacggcagtggcggggcggcaaggtgggaagtcagagtcgatgtaggattccccaagctctgccacccttgctgttttggcctcaccggccaccgcttgttgtccacccagagctccacaccccatctccctcaacaccgatggtgatgcttagggtatcgatggggaggggatgaggtcctccaaccttgccgcttccagggctccgtcgtctctccgggtagggctcttacgaggatgcgatggcgacaataagggatcgataagggcgccgacgataaatttttatactgcaacatgctcgcctgctccatcgagatggcctcttgaatgtaccttaacgtcatctacctccttaccggcatcgagcgtctgctccgaaagcacctcgacatctgcaagcatctcaagattaccaaccaccgatcccgcaagttggggaaagaaaaaggggagaaagaaagagaggattgttgatgaggagggcagaatctccaatttatgaggattgtgctacagggaagctattcactcttttattataagcatgttttcccatattgctaaatggtatttttttttcaaaaccatctatatcgacattttttaaaaataaatcaatttttcaagtttataatatcaccaattgtgttttctgtctcggtgagttgctactacagaaactcataccattcaaagcacggatgactggtcatttcacccacaactagggctccatatcaagccagttcagctcggctcgttatcctacgagccaaaagcctcgctcagttcgaaccaacatcatttcaaagttacaaatgtttgcatacaatataagtattaaatcatcacaaatttagcaaatgcaccattaatttcatactttcatataatcatctaaagtcagtctaaatatttaggcctatgaccaagtggagtggtgtgacaatgagtggatgggggatgagttaagttgagatttacgagtaggttaaactttagttttgacttgttaacaaacccaaacaagccgagctgtgcgagctaaagtgccatcatccttttttccagccctatccacgacccatccaacctgtgcaaccttggcaccgcattctctgatgttagaaaaactatgttagagggcagtggtgtatcaattcattgtcctccgagtatggaatgctccaaaaaaaaaagccaatgatgccatcgctcgcagtcactatcatgttcgctagcgtgcgagcaaggacaacattggatttttcttgggagcgttccatatttgagaaacggtcgatcgatgggctactgacgtactctctctgttttttttaaaaaagacaacctctgtatccagattcgttgtaatatgttgtctttttttagaatgaagggagtagttttcccaacttcagaggatctggttccgtgcaacctcgtgccacaactctcaaacttgtacaggcaaccaagaacacctgtgatctacattttgagatcaggtagtatgattgatccatgaatcccattatccatcatcctcgagtgagagtccagcacgaaagctgcagctaccactccagcttatccatctcatcatccattcccctcgcaacgaactccctgcctctcgctccgatcgtccgcgccacggcggcgacacgatgaaaccccgatccaactgacaaaattcccaagcgaatcctgtgcagctcgagtagaagagaagagagagtgcttcttggcgagcgagtcaacgtcacaatggcgtccccgctgctgctgctgcttccgctcgccgtctcgtcccttctgctgccgttcgcggcggccgcgcgcgtcttctccgtcgcggactacggcgcggcgggcgacggcgcgcggtacgacacgggggccatccaggcggccgtcgacgcgtgcgcggcggcggggggcgggcgcgtcctcctcccggcgccgggggactacctgacggcgaccgtccacctccgctcgcgggtggtgctcgacgtcgcccccggggcgcggctgctgggcgggaccaggcaggcggactaccctcccgagtcccgccgctggtacgtcgtcctcgccgagaacaccaccggcgccggggtcaccggcggcggcgagatcaacggccagggcggggcattcgtggtcacccccaacccgcagaagaacatcatggtgagctggaacgccaccggcgactgcgagggcgacgagtgccgcccgcggctcgtcggattcatcgactccaaggacgtcacgatccacgacatcaccctcaaccagcctgcctactggtggtgagcatttcttgatacctcaaatccattgctcaattcgtagtagaacagccaaaacatgacaacatttcccttgtcatttcatcctaaagatgataaatccggctaatttgtactccactgccctagatatcatctgattagcaaaaattacacagcatttgtgtagtgatgaggtattcagggaaagttaacaggctatatgcacttgcattccctgcagtctgcatattgtcaggtgtgacaatacaatgatccacaatgtgtcgatatatggggattttgacactcccaacaacgacggcatcgacattgaggattcaaacaacacggccatcactcattgccacatagacaccggagacgatgcgatatgccccaaatcaaccacaggtcctgtttacaacttgacggcaacaaactgctggatacggactaaatcttgcgctatcaagtttggcagcgctagcttctttgacttcaagaagctggtatttgacaacattacaatagttgattcacatagaggacttgggatgcagattagagatggaggtactgacctgtacttgctgttgtgtgtattgccattctgtgatattaggtagtacttactattttctctagcaagctataagatttccgcagcaattaaaatatattagattgttttcacggacatttttttaggaaaactgaaccttatgctgcatttgtaccccgtgtttatatagaatttataaattgctttagcaccatgaaatttttatacagcagcgaacctatcctgtatgctgaaatatttctattgtgaattttcatcaagtaaaaactgcaccattaaggtctttggtctagaaatgagatttgctttaagcctcttctaaactggagttttcattcctgcaggaaatgtgagcgatgtggtgttctcaaacatcaaaatgagcaccaggtactaccatcctttatggtgggggagagctgaaccgatctacatcaccacatgtccaaggcacccagattccaaagaaggcaccatttcagacattcagttcatcaacatctcatcggtatcagaaaacggagtattcttggctggatcgaagcacgggctgcttcgcaacctgaagttcaagaatgtcgacctaacctacaagagatggacaaactactcgggagggctgtatgattacaggcctggatgccaaaagatggtgaagcaccgaaccggtggtatgatgctggagcacatctctggccttgagatcgacaatgtgaggatgagatggtcaagaggaagcctcaaaggctgggatgttgatcctctcctcttccagccatcgacagtcgacaagctgtcattccatgactggcaatcgctggctgtcagtaggtaatggaagagcaagcctactgaacatcacatttgtacaagtatctgtatcacaatctgagtggtgattcttttctgaaacgtgtaaataaagatcacatgaaaggcaatggtcttaccatgttgataatcatcgcttgaatggcataaggttcttaccagtcaataaaaatcctcaagtcccaactccctgtaagcttcagcgaatgggcgagaatggctgctgaattgatttctgagtactgaactgactgaatcagatacaatcaaattcaatctcaattgtctataataaacctatgctgtcattctgatctggatttcgaattttaatgttcttgtctgttcatatttctgttccaacttcttgtttgcctgttaccttgcttactccataaagcgatgttgagttcagtgagtcagctgcgctgtgcattctccatggtaagcgcaaacacatcaagttttttttgaaaaaaaaacacatcaagttccatggagtttcgtcattttagttccagatcttggtcccgctgaactgcaaattttcccaagaaaataaaaaatttctccatagctgctgtcaggatgtcaaaattttcaaaaatccttcgttccaaacagttcaaattttctggaattaggagataactactaattccaaccttgcatacaaaaaagatctcattttttcgcttatacttatgcttatgcgaactgcttattatagcaatttaaaaataatttgttagtaaattttatgtacgtgttcttcataagaaaatgttgtaaaataaactacgatgaaaaaaaaccacaaaatcaactctaaaataaagttctaaaaattaaaatttacttcctccgtttcacaatgtaagactttctagcattatccaaattaatatggatgttaataaatctaggcatatatacaaaatatatactctctcattccctaaatgtttgacaccgttgacttttttttaaacatgtttgaccattcatcttattcaaaaatgtttatgaaatgtgtaaaactatatgtatacataaaagtatatttaacgataaatcaaatgataggaaaagaattaataattacttaattttttttgaataagacgaatggttaaacatttttaaagaagtcaacggcgtcaaatattttaggatggagggagtacattaatcaatgaatcaatctagataagaccaaaaaagtcttataatatggaacggagggagtagcttataagcgtaaacccaagcgaaacattgggagcttcaaaatcgagaagaagagtccaaacctccaaatccggcccataatgattattaacccgaccttttcagcccggcccaatgtacttgaccaaagcccagcccattttgcaactcctcacctctgcattgtctccgcgtagctgagcaactcttcccctttctcccccaaatcggcggcgacctctctccgatctccacaccaccccccgatctccaccaccaccaccaccacgcgggcgcgcgcaccaaccgggggggcttcgatgcgggcgatctcgtcggcagcgggggggatgctgcgggcgcggctgcgcggcggggcgcgcgtccgcggcggcggcgggcacggggaggggggcgggcggtggacgaccccggggcacgaggagcagcccaagggctacctattcaaccggccgccgccgccggcgggggagtcgcggaagtgggaggactgggagttgccctgctacgtcacctcgttcctcaccgtcgtcatcctcggcgtcgggctcaacgccaagcccgacctcaccctcgagacctgggcgcaccagaaggcgctcgagcgcctccagcagcaggagctggcctccggggaggcccaggccgagtgatctgcgcgcctcaggtcacctcgaaccctagaatactgcatctgttttactcccaataagatgtttgagatgtgcgggatgaacactgtgctcttgtttctgtttttgttctgtttcctcgtggaatttgtccaatgatggcgaatgccctgaacattttgaaatgctttgtaattctattattttctcttcctttagttgtgctgctctgagagttttcgtgaatttcacccgttcccaactaactcagttgcagatcgcatgttggggttaggttgagcaaatagttgaacgttgcttaagcattatcttattcttgatgaatgctgaatccaaactctaaacacgaataactatccctcttaccaaatatgttgagcatcatcgtgatgaatgctgaagccaaaccctaaacacgaatagctactcctcttgccaaatatgatgactgttaccttgttgctaaactgatcatggcgcggttaagctatctgaaaataacttagaaatatgccacaatgaatgatttcgtactgtagcaccggtggctgttatttgtttatctcctgtttatggtgcttaaatttctctcaagttcatttgatgccaagttgccaactaatctatcaatttattgaacatatccgtttgcatactatcacttcacatgaaacatgtgtatatcaacgacatgcactataatatcattagtttttaaaggacacactttcaccatcgcctggtgaaccatgaaagcatatcacatattaaggtcagatagcatgatatcgagggtccttagctactaccatagaccatgaccatagtgctttgtttttgttttccattttcttggcatcttgctaaacacaacaattgtaaacacgcatacagagaaatataagggttcctttgagtaggaagatttacattgtcaatacttcatttgcctaaaactaacaatgaggttagggaagacaagaaaatattttttttttcaattttgaatattttagctgatcagatttgttatcatgatgaataatgcccatgaaaataaggtccgctatcccagcaaggcttctgctgtttgaatgtttttcatgtatacataaccaatatggagctgacgattcttcaatgtcaagttccaaccttgttcttgcatgttgtacgagttgtagagttcttctaaaaattatcacattcacttttttttggggaaataattttaaaccctgatttctctcctattgcccataggagcaattccatttaactgttttaactgatctctgggttacgaggtttgattgactttgtagaagcttcaatcttttatgcagcaaattgggaaaataatcagttgtgctctgtactctataaggaattagttgcctgcctcctgccatgtgtaatatgtttggctagtaattttactttacgagcaaataagtggaggggaaaacactgccttggtgaaagtttcatagaaatctgtttaggcccagaatctggcattaatttgttccttcctacaatggagcatcctgcaatttatgctttatatttgaacaaccttgtatctttttaagggtacgtacttcacttaatgttttagtgtcttggcctgtgtagactgtagacactaaacaccatcccaccactgcaactctgttacatatttcttctttacaaaatgcaacctgtgtttttcacatatgccatctattgttactactgtaagcaaaaatattgtcaaactgtgttggcattctaacttttagcagaccatggaatgctagatgaatttgaggtgaactgaaagttctgaggtctaattaagcagacgagtgagttataaatatgccactgaaatatgaaactggattgctagtctgatataatgcgcatgaggaagatgcatatccacatatagtatctattttcttcttacatcaaagctagtaacatagagaatcacaccgtaaggactatttcttgtttcctggtgatttcttatgctttgagcagccatcctaggctcctagccagtctcagtactgtaagactgttagttactgctcaaagtggaatgtaggtatttggaatttgggatctacaaaacgatgatgttgtcttttcatgctttaccatttgtcttgcactttagacctggatcgacaacttattcatcctttatgtcaatgtagatttattcgcttgctttgttcaggacgcatctttatgagacctctttcatgaattatttgtacatactcatagccttcatatgagtacagatgctaacttttgcgtagatccaaagctatatatgtctttcatgaacttttgaacagttctgccaatccttttactggattcctttcgtcttttgttatctctgccctgcattttattatttttctccttgcctttttgcgcgacactagcacatttcttctgtttctcaaatttccctgtagtttagatctgctgtgtctgtgtgacctccatgcagatggtccataatttgcaagcacggtatttttaactcagaacttcaatttccgctgaattttcttataaagccccatttgtagtaatctcccttgccatgaaattcctacagaatttctgttgattcagatggagtagtcttctgtgtggttcaattaccatagcttgattattgtcatgtcctagaactttttggtgtggtccattatgtttaatgtgcagatgcggaatagggaatagctggcaaagctgttaatgacttaatgctaaccaaccactgtccaccgtccattatctatgatgacaattcttttctgtatactactcgtacttgtctctccttttcttctagcaagatttcaccttaagcagctggagtatactactatagagagataaatgtttggaactccctactacttttaagtcttcactggagacaaaatgcattatataaaaatttagggctggcttttgcactccaaatggtatgtatgatatggtcactcactcactcctattaggaattggtttcatattccattgaaattcactccatccataaaagacttgtggtgggttcctgtatgctgggggcatttaaggcctagtttgtttggtttgaatatagatgaatgggtgatagattttctaattttgtgatgatgttcgataaaaaatcaatctagatgagatgtgacgtttcctagtacaatgaatatggataggaacatgtccaaattcaatatactacttcctccgtttcacaatgtaagtcatttctagcattttctatattcatatatatgttaatgaatctagatagatattcattaacatcaatatgaatatggaaaatgctagaatgacttacattgtgaaacgaagggagtagaaaacatcacatcttattctaaattgattttttatgggacggaggggatacaagcgaatggattaccattattacaaagttggagttgtttcaaaataatattttaagaaaattatatatagaattctttatatatatatatatatatatatatatatatatatatatatatatatatatatggtgttcttttctcctgaaaatgaagatgaagattaagttttttacgcaaaactaggtggtattaacgtatgattgattgagttttaattattacaaattttaaaaatagattaatatgatattttagagcaactttcatatagaaagttttctcacaaaacatactgtttaacagtttgaaaagcgtgccacgaaaatcttaattttcatccaactcttgttgaagaaaagaacatgactatatatatcggttaggagcttgggaagcatatgccatggtaatttgttacaagagaactcaactggcctaggtaaaaccgtgccacaaacagtgtcggtagagcatgaaatgccctcgcggtgagccggtgagtagtcgcaacgtctgcatcgctgcatgtcatcttatctttctctgcctccggccattcttttggcctaaaatttctttgtttggcagctgtaatgggcgaagcaatgcttttaatccgataaagctgtaatgcgagacaaatcttcctttagcatcatagttctttgtctccaagaacattccatttccaccgtccaagtgtcatgtaacgtcatcacatcaccctcatactgtcatacagaaaaacttatataatcacattatttttactgacatgtggggccggctccaaaaggtcccgcacaatggcagctggactatagtgaagtcctttccgcttaattatgccttggcctcttgtgtgagcagctaaccatgcaagcgaagcgtccctgtactagaagccatacggcggcgctccgtacgtagatccatctgctctttggtcacactgggatgtactaatgctgtcaatcatttcgtgctaatttccaaaaaaaaactattcatatactggtaaggcatacgggtatcagtagtacatctcttgaacatgagcttcattgttgtcttgactctgaatatttgacggcgggataactacgtgcatggatttgttttagggtgtttttttaatagccgaataattcgtgataattattcgagggtaaaaaataattgattaaacataattgaaactaatttcgtaagaaattcatatatactaacaaagttttctgtgaaaatattactatttagaagttcgggaagcgtgccgttaaatagaatggtttcattccttataaaagaacatcaccttagtgggattgaatcggatgtaatttactctgaaaagtttcatgggcattattttgttgtttgtgtgaatttcacacaaactctaccactccatggtgacatcgacaacaaataacaatagatctatttttgcggggttgtcggtgaggtcaagggggcgtcgggggtgatctcgccgcgcctcttcgacgccgtcctccgcccactgcggcgtcgcctccgtgcgcacgctccccgtcgctgccggcgccggggccgctcccctcctccctcgtgctcctcgccaaggtctccatcgcctacttctcgtgagccacgggtgccgctgtccttgcccgctgctcctgccgcctccttgccggtgagcgtagatggatcctccgctgccaccgtagaagcagaagaagctggcggtcccggtgcctcgactgccgcaacgccgacgacaacctgctctggaacctctacctcctctccatcctgatacctggtaccctggtatcaactgatacctgttaccctgggtatcgagctgatactaggtatcaagccttggtacctgggtatcaggccttgctacctgggtatcgactgatacctggtaccctgggtatcgagctgatacctaggcatggtataccatatgcatggtatcaggtaccagatgcctagtacctaggtaccatccatgggtaccatgtgcatggtatcagataccagatacctatagttatcaagtacaacctggtacctgatacctattgtacctagtaccacaggtaccaggtcaaaggtgtgggaatggggagcacgtcgtgtcgccgtcgccgcctggctgaccggtggccacacgttcgttgcctcctcttctattctcccttccttagttcctctcctcaacgtttctcttctccttctgttgttgttgctgtcggtgggggcaaagaggaggatttagcgggggagttgtctgctgctcccgctgctctggggcgccgacgccgacgaggaggtgtgtgcttctccagctgcaaaggcaacacaacaccggcaagggaagcgtgcgataccatgaggagccggctaggtatcatgcctcttcacgttgacaacagggacgcaggacgctatatttttattttgtcgtgtgttttaattatcccgtgacatcacttttccacggtatcccgtgggctagctgccctcaaaatgaaaggcacaatgagacaaagacaaataaaaaaaaggttcacgattataccataattaaacagagaccacaaatatagatcagagggaccgcataaaacaaagaggagacctactgaatttattctagcgcatgatagtgtttttaagcaaggaattcagttgatattttttgtttagtaagataaagaaataaatattccgaccactagatctacattctacggtgtattatgaccattttagtagcaataacactgccaggtggttagtggttaacctgggctttctgccgatttttttttcaagtagtcctgattttcacattttgtttgtactgtttgaccactcgtcttattcaaaaaacttgtgcaaatatataaaaaaggaaaagttgtgcctaaagtgttttggataataaagtaagtaaaaaaaataattccaaatttttttttgaataagacgaattttcaaacagcgtaaataaaatgttaaaatctcttatattagaggacggagggagtatagacgtgttaatttggagtgttcaggggcgtacaatgtggagcccagtgagcagcgattgctgcgacggtgagctggagtggtcacgttgccgccggcggccagccggccggccaccgtgtgtcctgtttggttctcgccgttgcacggctatcacaccggcggcgcatgacaagtgagaaccgcgtgtagttttgtttaatcaccggctaaagagagccgcctaatccgattctgtgacgctggtggtgacctactaggctaccaccaccgacagcctctgcctggaatgaccagggtcggggattcccagagaccactgaccagtacgttcacctcatgatccaagtgaataatttcgaattcttcgtttcctactccctccgtccattttaatgcaattataagttttttattcaactttaattattcatcttattttaaaaaaattataattagtatttttttattagatgataaaacataaacaatactttactttacatatgacttatacttttaaattttttaaaataatttttaaataagttgaacgattaaagttggacacgaaaactatatctatatttaaaatgggatggagggaatatcttttccattatcactgctttttattaacggtcattatcactgctttaattgttgccttgcaagggaatgttttgctttcttatttatcgttagcacgttttctaatctcataaacaatactccctccgtttcatattataagacttgttagcattgactacatttatataaatgttaatgaatctactatgggtacgctggtacaaggatctacgtaatacgacatcaagtaggcagaaaacaaatattataccggttcaggccccttgataggtaatagccctaatccaattgatatgagattatatgatggaaaccacagattacaagggggatagtggaactcgacgataccgacgagatcgtagtcgagttgattcgactagatcacccggcgacttggctcctgtaggctccggcttcgtaggctgtggtggttgccttgattatgagattcgatgccttaggtcctcccggggggtcccttttatatcgcaggtcaactggtctccaagtaggactcggagacatcggacccagcacgatacaatgacgacccagttctgtccgagtaggactccttccatttgtgaactccatgatgaatttccttaacgtatgccaaaaatgtccgtatacgcatatgtataccatatcgatatgtgacgtatatcgaaaggtagagggtataccttacccgtaaccctgacagtagcccccgacttctgcttaaatgaactcgtgtaaccgatcgtgacttctgatgtcgaggttgttgttgttctcggtgtgaggaccgagggataaggagtgatcgacaacgccctgtgaagctcaatggtcatgagtgaatttaaattgaagtccaaaaaactactgcgcgtaatggacccagaaatttccggcggtaatctctctcctttccttggaattcgcaccatcggaagtgcgactatttaagggagttttgcggatccaatttgaagtccgccggttgtgaaaaaactctccagcctccaagcgtccctcgtcttctccgcttccgcaaaaaccctagctagctcgtctcggtcctttctccggcgaaccccggcggcaatggacctcgacaagtctacctccaccagtgcgtcgctgaagaagctataggaggatggcgctcttcccggtcgcgggaccatggagagagaagcaggaggtactgaaccccagcctgtcctgggtcgcatggttgcgatcgaggactatattctttatggttttcttcctccgccttctgaatttcttctcttggtcttgaatttctacagccttttcttgctccatttgaaccccaattccatcgccttcctcagtatcttttcgcatctttgtgaggcctacattggggtagagccgtttcttgacctcttccgtttttactatgagttgcgctggatggaaccaaaaaaggtgtccggatgtgtcggtttccgacttcgggatggcctgaagtcgcgatacatccccttccagtgcccttcatctcgcagcaaatggcgggggaggtggttctatcttcagatagaagattcggatccggtcttcattgtttctaaggagcaaccagccaagatttcatcttggactgccaaacccgccttgaccccatccctcaaatctttcgtcgatatcattgatgacctccgagaacgggggttgtcggggtatgaagtcactaccgacttcattggtaggcggatccagctgctctaggcttgagcccacccagcctttgactattctaggccggaggacgcgacccgggtttctcctcggggtattttttttgtagttgaattgactcccttatgtgcgtgttcctcctgacttatcgaattctggtctcgatctataggcttgaacagcgcaaccgtgaagcgtcgcgtcggccaattgatgatcagcggcccgacaacgacgagcaacgtccccgtccccctttgcgagaagggggcagtcgaacgcgaagctgccatcaatgtaagtgtactcagcggcccttttgcattttacttccgggatcacattgtgacttcatgaagcgtaggctctccctctgactgatatcatcgggccgctcgtggatcatcaggcggcggcgtcgctgaaggaggacgtcgccaaggaggcgtccgatgttgctgccgctgctgccacaacgagtggtggcaacgtcactgatggccttgtcaggacgtccagaaaggtgtcaggttcgagtggctctcgtctggacgcacgccgtgctagatcatccggttcgatgttgtccttgcggtacacgtgtcgaacctcgatcccatcgaaccttttttccagtttcctgacttctgcgagatacgtagataactcggggctagagcacttgtaatctttatgcacctggttcgtgactagttcggaatcccctttcacgactagtcgcttgactccgagtgcagctgcagctcttatcccggtgagtagtccttcgtattcggctgtgttattggtcgccctgaagttgaggtgaattgcatgcttgaattgatctcccgaaggtgacgtcaagatgaatcatgtccctgctccttggctgttgagtgcgccgtcgaacaccattgtccacgtttcgttgttgatttggttgtctgacctattatcaggcatagtccaatcggctacgaagtcggcgagtacctgggacttgatggttgttcgtggcacaaagtggacatcaaactggcttagctcgactacccattttgcaatgcggccgacaacgtctttgtttctcacgacttcaccgagagggaaggaggatacaactgtgaccttgtgggcttggaagtagtggcgtagctttcttgatgtcatgattaccgcgtagagcagttttcggatctgtgtatatcttgtctttgcgtcgtggagagcttcgctgacgtagtagactggtcgttgcaccttctctctctcgacaacaatgacagtgctaacggaatatggcgtggcggcgatatagagaaataattcttcattaggttggggggcaacaagtacaggtggatttgataggtagcgcttgagtgcaatgaatgcctcttcggcttcctgtgtccatacaaatttgtcttgcttcttcagcagagcgaagaaaggttgtcctcactctctcacctagcgatgaacttgcttagtgccgccatgcatccggttagcttctgtacttcctttagtcttgtaggcgacttcatgttttcgattgccttgatcttttcgggatttgcttctattcctctgccagagacgaggaaaccgagcagcttgcccaatggtactccgaacgtgcacttctctggattgagcatgaggcgatatcgtcggaggttgccgaaaacatctgtatacgcgtatgtataccatatcgatatgtgacgtatatcgaagggtagagggtataccttacccgtaaccctgacaatatgaaacgaaggaagtacatattttagaatatatatatatatatatatatatatatatatatatatatatatatgaaggttttttggaaaataaataaatatatttttcaagtgtataacatttattactcaattaatcatatcctaattacttccatccgaaaggctaaagcaatttgcagcctaagtcaaagctaaaatttaaaattttaaacttaattttaaattattataggtgctttttaattttaatttctgaacttaatttgaaatcactaattgtagaaatacaaaagtcgtatccaaaattatgtttcgttgccgctattaggcgaatccaataaacgtaaccctatatattctgaaaatatctttaaatatactacctctgtttcaaattgcaagttattttaacttttttaagtcaattaaatttatagaaaatttacctctgttttaaattacaagttattttaacttttttaagtcaatcctctttagatttgattaaatttatagaaaattatagcaatgttttcaaccaaaaaaaaaactatcagaagctagacgtaatgaaataaatttagtgctatacgtattgttatatattttacaatcttgataaaaaataaatgacctagcacttcccaactcacttatttctattgtgcgcgcatgctttttaaattgctaaacgatactttttttttgcaaaataaatccttataagaaagttgctttaaaaatatattgatatttttttaaaaaataactaatatataattaattatgtgctaattaaccgttccattttccgtggtgcacagcccttataatataaaagagggagtacataataaaaatttaaaaaagactcgttatttggagaaaaaaaatggttgagatgccgtggaaagcggcaggtaggctgaccgcgtgcggtgaaccgactcgagtcgagagagggtgcctcgaaatgcacgttgatataaacagcccgcagcgaaaccaccccaaaaaaccaaaaacccaccacccccacgcggtgccactgccaccgcccctcgccgctgacgaccgccgccgccgccgccgcacggacattccgcacacgcccgcggggggcgggcggcgccgcgtcgctgatccaacgcgagcacgttcgtcgtccatccatcctcccgctcggatttggagtcggcaaccgctcgggctcgcgtcgcggcaactgaagcggcgaaattgcaacaggcacaggcaggtgaggtgaggagcattctgatatattattatttttttttgcccccaccacctccgccgttccgcttccccggcccgaatcatcatcccccaatctagttcgtgtgcgctgttgtgcggtgtgggatttcgcggtgtcgtattggattcgatattgggttggttggttggcctcgtttgctgttttgattgttgattttcttctcctctaataactgcacgcgctgatcgtttctgtacctgcgacatggatgagatgtccgcatttttttttgttcgtaattggggaggggaagctagccgtatagccgattgttagtatgttttgatccgcatttgcgcattgatcggagatgatagttttctcatgtcacctttctgtttttttttcctttacttctttcgcgcatatgattggcttgaattctcctgcactagcggttacctgataaaaaaaaattctgcgcgtacggagcatcggaatgtgaatttggggaccatcggtggcatccgaaatttgtcaatatatatacactagtatgtgttaatcttgaacttttacatggtgaattgctctagccatttgctccatccatccaaagtagtatcactgcacttgcctagtatttagctgcttcgtgtggtgattggtgaatgtgggcaatgactaggaggacttggggttatttggtatggaatccagtactggatagctcactgtcactggtggccagtatgcatattcatcatggattgtggttagctttttccaaatctgcggcttgtcagatctgcctgtattatagttattgtacagctttatgtctggggctctttcgcgccgttgggacctcaaattctccaatgcaatccaagtcgcatgatggtccaagaccagcgtgccccactgccatgtgcttaacaaccaccttcttcctgagatcgactggacaaggaagcataattgtactgaattctcgtgttattacgtcggtttaaggtgaaaaatcttgcttgagatgcttctttaaggtggagattctgcttagctgtacagctgttgagacaagctggagatcagttattcatttgatgtcctatcacttgttcaatgttatgaagttatgaacatgggcttcttagcgttttactctgggtgcagtgtaagttatttatcttctctgaacttgtactgcacttgtagtacattttcttgatctcttcagttaaagcaatttatgtacaagctgttttgtgcgtgactttttcctgtcataatcattatgttgcagggtcggaccacccttgaaagctcttttgctatcttgctcattgacctgatcaagttgctagacctttgctcttgttactaactttcttggtgttatatacaggtatcaagtttctagtgcactaaacaacctttgagatgggtactgtagagaatatggaagggagagaagagcgttcgactgatgtggaacgggatggtaaacaaggaaaagaagttgaatcggactatgaaccagctagagactctgtttcatctcagggtgaggctaacagcaatgaagataccagagccaaaagagtctcaagggttccaaagaagctagtgaagaaagattcaaaggaaaacagcccacgctcaggcagaattaattccaatcgccaagtgcagactaagctgcaatatatatcgtcaaacaatttgcagagcaaatctccaaagccaaacaaaacatctgatggtgctaaaaccattgagataacaaagccagatacagtgacagttccttcttgtccttcatctgaggtgtctgaggagatggatgataaacccattgagaatatagtgacggatgataaatccattgaggatgtagctgatgataaggccactgagggcacggcctcttatgataaggccactgaaggaaaagctgctgatgatacgaccgttgaggacaacaccactgatgaaaggagcattgagagtggcactgatgataggaccattgcgggtatagcagctgatgttaaatctagtgaagaggcaaaggagattgatatattggatgaagccccaaattgtgatcagagtactgctactgacgaggaaatagctgatactgaagaaagcatagcttatgatggtaaatcagctgcatatgaaaagagtgaggaattagaatctaaatgtgaaaggttggagcaggaacttcgagaagttgctgcccttgagatttctctttattcagtagtgccagagcacggttgttcatcgcataaattgcacacaccagctcggcgtctgtccaggctatatgttcatgcatcaaagttttggtcctctgataagaaagcttctgtcacaaagaacttcgtttctgggcttgtccttgttgcaaagtcttgtggaaatgatgtttcaaggtaaagtatctgtaattggatatagtatgtaactctgtgtagcttatatttccgcataccatcatttttaaaataaatctttatgtaggttgacattctggctatcaaacaccgttgtcctaagagagatcattgcacaaacatttggcattacacgccaaccaagtcttgctatgaaggctttcagcacaaatgttaatgcaaagatgctcggtaagaactcttcaccaacgcggcggaaaaacaactacagtggcaagcatgctagacctgctatctggccattacctgatgattggcgggaaactggtacactcgtggctgcactggagaagattgaatcatggatcttttctcggattgttgagtcagtgtggtggcaggtaaaacctttcttatgctttctcggcactttttaggaaattgagtacattttattctctgtaaaactaggatagcagacagctttttcgattcattttgttgtcaattttctgaaggatgtttccttttcaggcattgacaccccacatgcaaacactggtgaaagatatatcaagtccaaaggctgggagtttgttgggacctgctttgggtgatcagcaacaagggaacttctccattcatctttggaaaactgctttccaagatgccttcagcagaatatgtcctcttcgtgctggtggacatgagtgtggatgcttaccagtgttggcaaaactggtatgtttaatcattgatatttaatttgagaagaataatcatttttgtgaagtttatgcatgagttgttttattattgtcaggtgatggagcactgtgtagctcgtttagacgttgctatgtttaatgcagtcctgcgtgaatctgcaaatgaagtaccatctgatcctatatctgacccgattgtcgactcaagagttctaccgattccagctggtgacttcagctttggatcaggtgcacagctgaagaactcggtatgtgcccaaattgcaaaacaactacgttcttagtttaaaaccacttacgttggaacgtttcctgtaactgcatgaagaacaaaccagaacatgtgttttaaatcatctcttccttgcaaacaaaaccaaatgttaatggaccaaatgcttcttcagatcggaaattggtcccgatggttgcaagataagtttggcatggttgctgctgcccctgagaagcatggtcaagcaggagatgagagtgatgacagaagtggtgctgctgatttttattctttcaagctgctcaacgagttaagtgatcttctgatgctcccaaaggacatgcttcttgaaaagtccatcaggaaggaggtcagtattcatgcttagtcactccaactcttaagttggaacatatattcaggttcagtgctgcagttaaaattttgtcattctgtttaggtctgcccttctattggcattccactggtaacaaggatactctgcaacttcactcctgacgagttctgtcctgaacctgttcctggaatggttttagaggagctgaatgccgaggtacgacgtctatttgctaaatgatattattgcattgtagcattacaaagtccaaatacaatcttgctcaccatatgtaatgactaaccaagatacttctatagtttcactctacaccttctcaatcagtgttggttgctaaattttcacacagagcttgctggagcgcttcacggagaaagatgtgatcaccacattcccctgcgtcgcggctcctgttgtctactgccccccttcaccggaggatgtcgcggagaaagtagcagacgcaggcgggaacgcggagccggacctgagggcctccatggtgcagaggagagggtacaccagcgacgacgacctggacgacctgggcaaccccctggcgtccctgtacgacaggagctctccaccctcaccctgcaacggggcctctcgttcgactacacggcaaggtggctctatgtcgaacgcgagatacgagctcctgagagaagtatatggtcggagaggcctggtttgagtaaccagtgaaagtgtggaacggaagacgaaaagagagcctcttggtcttgggttgcagatttgctgtgaggtgaacaaggggttggaaattggtcgggaaggaactgctttgcaacagacgctgaatgaacgaacagcacttggatatcctcatggcaaaatgctagagtgtttagaacccatccccccattcttctcatgtatatttgcattttgattctgttgaagtgattggttcactcttggcaaaaggggataaatttatttgttggtggtagtgaggagaaattttagtgagtggtcagagtgagcgtgacttctgcgtcagccatcgttcgatgggccgcctaactgatcacaaataggaataagttcaactggcgtccctcaactttacagtttacatcgatttttttttgacatcccttatcctctgccttgtttcactgatgtggcatcatagtcagcaaaaataaaataaaataaaatatagagcccacataccgcatctctttctttcctttttctcttctcttctctcgagcgggcgtggcgtcagatggggggagaggccgtcagcggcggccggcaaagcgagcgcgacggcgggcagagctggcgcagcgggcgggctctgttgccgatgttgtgctcgtcttgcatggagatcccctcgcgacttcgtggcggcgggtgagcgcggcgggcgacccatggatcgagctagtactacgtgctatggcccctacctctgaattatgctgctgctagagcttaggtgggtatcgaagaactggacactgcagatagctttttattgataatattaacttgtggcaaatgacgatcaagcgtatagcaatgagtgagagcgaagagttggtaagctaatgctactgctcttgatttggagcacacactatacggttgcgttgtattaaaccgcaacccaccccccaccccaccccccgggggcaacccacacccctacccctacccccacaccacaccacaccacactagcacatccctgtccccctcaattcccgtaatggtgttactaacggtactatcaatttctactgagtaattgttttactggtagtagtgtttgaatcgtcgtatacatacatgtgttggtcccacaccgtaactaaccactaatcaatttcccccccttttttttttggatctacagaggcaggaagccggctcggcagctgtggcatcaggaagcggaggcggcggcgacggcgatggcgtgctacagggaggaggcggcgtgctggatctaatgggttaggcggcaagaacgggcatgtccatgtctggcgaggaggcgaggacggtttcgctctcgtttccgcggttgtcgtcggctccctccctcaagcgagaaaagcaagaagcgcgctgcctccgccaaggctgccgacgaggcctccaccaaccgcacccgcgctacctcccgacgccaacccctccgctggatccccattgctgtatcgttctcctcggtgaggtggggacttctctagggtttggggattaggggatttatagggttcctctgccctccctgcgtataggaacgaatcagaatttggtttttctttatttttttctttacttcatgcgatgggattttgcatggtggttctgctccagatctggaagcttcaatggcatgggtatcatgtgagaagctccttgctggtggatgccccttgttcttctgttccagatgtacaagctacagggcgacacgagctcctgctccctgcactccataggttagcctgcatcgacgaggaatacttgaggacgccaggggtgaagaagggtgtagcctttgggagccttgccgccagatccgccgtatccagcggccccgcgcgtccccgacatccctcttgccgtggtctagggtgctgcgatgtcgtcttgccgtggtctccattcggtttgttctccatactattttaattggacatagtttttttgagtaattggacatagtttttttgagtgctcagactgttgtgggatctattcaataagctgtaatgacttgttgtctttccaattgctgaaatcttggaggttttttttcggttaatttggctgaataacaatgttatgcgatgctgtttgtgctttgattcttcaggtactaattagagatattggagccattgtttaattactttacgagcagttcaggtactttactagcaattcaagtgacaaatttggttcactaatctagttctagcagtacaaacaatttcagcttttcctagttttagagttttgattctggcatgaattgtatggggaatatgattaattcctgcacactttaggatgaaggtctggtctcatttcacttgagcagttcttgcacttcttttctttcaattgcgggaatgttcagatcattttttgcttaaagtacctgattcgttcttagtttgtgtgtttgttggcctaaatctttcttccaattgcacagctctggaactcttgctgaacagaatagcatgaatgattctagtgtagggaagttcttatttttattttttgttggatcatggaattcagcactaattatagactaacagtgttcttgagttttcaggcatatctctgataggctagtgttatatggttattatggggctcatgagttttgaattttggtcacgattttcaggactgcaaaatatgcagtgagatgtgtaaactctgagatatgtcatatttttacagcatgtgtacagtattcgtcgtagttttctgaaattagtactgcatgtcctgtgagatgtgtaaactctgagatatgtgatatttttacagcatgtgtacagtattcgtcgtatttttctgaaattagtactgcatgtcctgattctgaattttcggatagatgaaaactcaaaaagctcgatcgaatagcagttttctaaatttttgttgttcaaaggagcacatcaattgaattctttttttctgaacttctgactagatatgttcgctgttgaacatacccttttttctctgtatatttttgacagaacagacatcttcagactaagactaaggtctaaattttactgaaatgattaacttctaatttttgcaggcatcagcatctacagtgtgcactcttgcaggtggatgcacatcttgatggtatggtggttggtatttgctctgctgaagatgtacatgttctaatttttttggttgctcatctatatctgaattttctttttaattgtgaattcatttgtgttcaggaaactagaaaagaacatgagaagattatgccagtggtgatggtgccactggaatggcatcctcgacatgtccttcgtcaacgttcgtcgccggcagccaacacaaagggtcagcccaggacgaccacaccacaattgatgacaggcttcggtggcaggcgatgcgatgccctctggattgtgctttttttttgggtaccgggtgtatatgtgtttgtaacgatgatggcacgatcaattgtaaaaacaaagtccattatacccgtattcgtgcagtaaaatatttactaccttatatatcaggcccaatcaactactaagtaacttttttactccctccatgattggataatcccaatacatatcaataattttttttattccatgaatatgttgcttcttatctattagtaaatcatttactcatgggcgagtctctattagtaacgcatgtactcattgccaatatgagatgtggctagcaaacgatattcttatctgttagtaactcattgtgggccaagtctctgttagtaatgcatttactcatgggccaataagggaagtgccaaacaaatgttactcttatctgttagtaactcatttactaatgggctttgtctctgatagtaactcatttactcgagaatagtaactcgattacttatcaaaaacatactaatagtaaatgaattactaaagtcacacatattattgttggtggctgggctagcaaaaggtgcgggattgatacatcattcaatttttacgtatagtaaatatgttacttatcgtatattgcgccacaaacaatcatttagtaattaatttactatacgttatttctaaaaggtgcagggtgagggatgtggggtgggtgcagctgggggggtaggagggagggtgggggttgggggttgtgaggggagtagtttagttataacgcaccctaggtgccgtttagcacatccctatatatatatagacatcggccgctgggacaagcatccaccagagcttgtccgccgggtgaggtagcccaggttgttgatggtggcatcactccgccactccatgccatgacaaaaatcgtcagggctccagcggcagctcagggctcaggtagcggcgcgaggagcgcaaacaacggtgtgaatcctgctggagcgctgccgcaacgagctctgccgcctcatgcttccgcggccatgccgctctcctccgaacagaagtgggagagagagaggaggaaggttagagaagaggggaaatagagagagaggatgatatgggtctcactgcatatttttatttttatccgaacacacgctgatatgtgggtcccatgttttttctgactttatcaatgtcacgtagacgccgccacgtcaaccaaactgtcttggactttctttgcaccggttttaagaattaagggactcgtcatattgcggttcagggacgaatttcggatttggcgacaaattgagggacgtacaatgaacttattccttgtggcggagtcccttcctccgatccggccggcccgacctgtgatccgacgcagctgaagcacgcgggcgcgctgcccgccaaaccggtccacgggccacaacgtcacgcgcgagtactctccgtgcagcccgcgcgtcgtccatcccgcgatacgatcctctcgcgtggcgcgcgcgatatccccccgaatcaccgccaaacctgcactggttctctcgcgtggcacgcgcgcgttgatccaaacccgttgttgtacgtggtttgcggccggcagcttgcggccgccctgcgcaagcgcacacacattatgcatgcgacgcgcgcgatcggtgacgagtcgacgacgactccgcgggagttgacgataagagatcgccgcccgcaggtaggcatgcgcgtcaccatcgggggcggtcgtaactttgtccatcctcgcgtaggcaaacaacatggcaagcaagcaggacgtgtttgtgaattggctggcacaaataaaagcaagccactttacgtactcctccagctgttacgtaaaggacggacgccgcggtatctccgtgtactgtgttgtaaggccctctttgattttgtaaaaagaaaaacaaaaaaaaacatagtgattttttttttaaaaaaaagtttgagtcctactttattttcttatctggtccttataaaatggctcgagagaaataaatgtgaggaaagttaacacatgatatggctaactttatgggaaattttctttgaacctttttctctcctctagtttctttcttttgtttcctcacgaccaggagcggatctacagtgttatgacctgtctcagacggcaccgacgtctttcgacaagctatgcttaaattgcttgtctatatattataacactatattctaaatataattagtatgctataacaccaatgaacaaaattatggatccaccactgctcaccatctattgcaacgatatttatttatttatttctgtattttgcaattctttatttaacaattacatttatattataatcctaaccttttcatgtctgtttttatcaattctactacatttttaaaggggcccacactatatccgtgcatgtttatttcactcgtgtctttggtccctttttttcctcaacttccgctacttgcgcgccaccacacaatagatacgcaatcccaccacagcgatgcaaacgttcttacagttgtcattgtccaagcttctttaatttccacacatgctttaatttgttgcgcactgcacttacgagttacgacatctcgtatgatctatcttgcactgaggtaattaaactcatttccagttgatttaatttacatatttgaagctttcagttcccctatgtatgaaactgattataagccgtaatacttattagcgacttaaaaactaatttatcgcggtttaaattttatatatgtattttttgcttaaaagtcaacgcaagtaaaacaaacaattaaaaacagcaaaatcaaccttaaaactaagatttaaaatttaaattaactactaccgaagagtggaagctgtactatttagttttgatgaactctctctatatactccctccgggttgataatacttgtcgttttaggcaaaggcacggtctcaaaaaaacaactttgaccattattttctattataatatgtaaaaaagtgttaataaatatattattttattaaagtactttttaagacgaatctatacatgtggtcaccatatttgaaagacaaatattttaaaaataattcataatcaaagattctaaagtttgatctcacccttgtcttaaaacgataagtattagcagcccggagggagtagcataaactactcgctagcgtaaaagaaagctacctgcagcatgcatgcacccatgtggcaactacgtgtgcagattgaagacaaaaacttgagttgcttaattagaagctaagctctcaaacacatcacacgtgtgacatcatgtagagtaagtagctagtgcaatgcactttcacgaatcaaacgagttgacacggcttgttcgtccagtctactcaaattattgccacatgtgccaatgtcaaaccatgcaccagtactagtaatatatccaagtggctacatattggagttagctagctacctgatgatcgacaggagatcgatgaaacaactcaggcatgccatgataagataatgatgcatataaacacgtcgtattcatttgggtagatatgtgagagctaccccagtagtcattagtggcacacatttggctagaagatcgagagcttataaacccctcccctcccattggggactgtacgatagggtctaacattctagaatgagagagagagagagagaggttggatgttgagaggaccgaaattctgattataacagtttcaaaaggtgtaataattaattttatacctgtaattaatttgatgtaacatcaacaagaagttagggtgcttacattaacttagaacatgtacaataaagtaatgtacgtgggttgtacaatttgtacaatttgctacatcagatttgtgctagaggagagaagatgagagataagaaaaacgggatacatatttatagtcagatatagcacgaactttaataaactatgtgagagagatggaaggattatgtattaatgatacaatatatatctacatctaactattgtatgagcgagctaacaggttggctattggtgatattttaatttttggagctagttgttagctatattattaaacttgctcttacattgatcaattgtaaaatgtttttcataggtggaaaataaccgatgtgagacacaatattattcaagagatatgtacaggtttttttatttttggaaaaaaaaaatactatagctagctaggtgcacgggattgggattaaatccatgacccgttgaatgaaacatgcgtggactaaccaacgtacgtagcaaagcgaacattttacattaaacagcatagacgacaaccaaatattccatccgtttcaaaatgtttgacaccgttaactttttagcacatgtttgaccgttcgtcttattaaaaacttttatgaaatatgtaaaattatatgcctacataaaaatatatttaacaatgaatcaaatgataggaaaagaattaataactacttaaattttttgaataatacgaacggtcaaacatgtactaaaaattcaacagcgtcaaacatttcgaaacagagatagtatttgagtattgagctaatatgttggttaattaaggggcgctattgggcggggggaacctgaatcaaatcactcttttacgtccagatactagatcaaccatggatagtgctaagctatgacctcaagagattgatgcgtcaatgaaatagtacaaattaaagtaaattttacggtctttctatagtgtcattttaatcttttaaattactgagtgtactcataggtacaacttaatatgctatccgagttaactttcttcgcgaacgtgcaactatccgagttaactaaaaggtatcgagttcaaatattgatcaatgaaactgaacaagaaaaattgtcttacatctccgtttcacttgttaaagtaatcaaatcttaatcccgcatagacaagtgaaaaccacgtctaacctttttttgagagaaaatatattttttttgagagaaaaaaccacgtctgactaacaaaaggttcctctccgacataactacatgatgtgatcgatgtgatcaatgatagagccatccacccgtaagtccatagtatgttaatgagtcacaatgtcatggcgatattacgtcagaggattatgatacatggcatgactggcaatctgttattagagtcactagtacagagggtatgttcggcaggccaactataactgctgtgtagggcggctgctgctgcggttatggtagaaattgtatgttgctactgtagctgttgattgccatctagtcacaccaaacacccagagtaattttactcatagttttgggtgctcaaaattagatagtagctaaaaaaatcaaagttttcctcgttaatagaaaagtaatattggtaggtggatatgtgtaagggttgatgagggttattagaggaataactcatcgatttgcggactgatagaggataaaaattaatttattttgacatatttagaaaataccacacgttattttgaaaaacacagaggttaccggaggagagttttctcaattttcattggccagggatgcgtcaaggcggcgtacgtacaaagcgtaagtcgttacactgaaaatttacgctagtgctgtagctgctagttgaggccaagttaatcttgcatatgcaagggtacgtagctagccgtgctggagaacgtgcgcgcgcgtacgatcgaattaacagcagcaaggggcctcgctctccggtgtcttttcttgccggacaaagtaggtcgccacacctctcgcgacgtgcgtgcattccatgcatacgcatgtcgtgagctagctagctccatctatatattgtccttgacgtgcatcgcggcatctagtacgtaccgttgccttgccttgcctggacgaacggaagcaacagcaacgcatatgagatctctccggccatgcatgaatgcggcccatccttgtgccaattgtcggccaatggtgtacctagaaacccaaacggcgtgtgggagaagcatcaccggatttaccattgttgtcagtctcctttaagcatctgctctctgatctcactgttaaaaaataataattctaatttttaagatgagtctgaacatatatgtcaggctctaaacacttcaagcagtagtagtacgagtttgtaagctagtactctctatgtctcattttaaatgtaaccatgattttccgtgtccaacttttaccgtccgtcttatttaaaaaaaattgaaaaaaatttgaaacataagtcacgtataaagtactattcatactttatcatcttataacaataaagatactaattataaaaaaaatcaaataaaacggacgatcaaagttaggcacgaaaactcatggttgcgcttaaaatgggacgaatggaatagttgtgttgtgcctgcgcatatgcacgttgattattactccctccatcccaaaatatagcaaacctttgagggagtaatgattataaaggattgatgactgatcttgaagataatatatatgcacacacatatatatggcgtgtttagctaggccctgtttggaagattagcccagggctaattttaagagctaatgtttagtcatgaattggtaggctaaacattagcatagggtggcatgtttggatccatgggctaattcaaggctaaaagatggagagagagagagagtagaaagagaggagagagaaggagagagagagctatttttttatggttcccacacaaaattagcctcattagcaccccttggaggggctaatgttttgaggagggctaattcatattagctcaaaattagcccacctgtttggattattgagggctaatttaaggctaaaaggtgagggctaaacattagcccatggaaccaaacagggccctgcatggtacaaccgctgtgtagcgcagcacagcgtatcggttattacagccacacaaatcactgttgaggttgttggttgcgttgtggaacatgcccatagccatttaattacgggtagtggttttgtataaagctatatacagctatattatcatgctaagaatggtttctttatgtggttttcgtaaatggcaaactattggcttacataatagttgtgaaaatgcagtaggtacagtggcaaagctaggtgtgatgcacttgatagggcagcaacaagagatgtatgattttaaccataagatctcatatttaatccgtaacacactcgtattttttttcttaaaatatgttggagggacgtctcttccttcaaatcttgaaaaatgccatagttagttataggctgttctcggctttcactggtttattcaaatgtcatagtccagattttaaaatacatgtggacagcaatggaggtagcatacacagtagtatttcgtttttttttttcagaatagtaagcactacgagcctgcaaatgactgaagctgtgtgtatactgtatagtgcatagctatgtgtaacctagctaaagcctgaatgtttcagctctttcatagtctgaaggtttatagaaaagcagagagtactgcacagatttgaaatttaatctcagccccgtcgtaaatagaactttgcatgcattggaaaatattgacgtagttcttcagatcaacagccagccttcagccacagctcaaagcaagtacagataaactgaacagtcaagctgtacgaaccatggattatatatgaattagtgcacgtacatggtcaaacattgagacggggtttaatgattaatctaataaatcaacactgcttaattcatgggacatcttttccgaatatcgaatcctgacagatcgggaaaatggcatatttcctctgctggtatagtaactcctctgtcagatgtcaatatgtcatagatcagcagcaacattgtgccattttgtgccatttattgtcgactcaattattcagtaattagattctgtattttgttggcacaatgttattactgaaagatgtaattcaaaaataggaattacatcccacgaaaattttggaatcgtccttgtgtcatcatgcagagagaatcaataactacaattatctgaattttttttatcgaaacacatacaactatctgatcgaaaatgcttccgctcgggcgtctgagaccaacaaatcgaacactgtaccgtagtcaattagactgcagggattaacccttgtgaagtacagtattttcagtcaccctagcctctagtgagcagaaaaggattcggattttacagtcccctaccgaaatagttacccttatttcacaaacctacccttaccatgtcacaattttacagtacaatctcttctactcaattttagtttacccctttcaccacaggatcacataattaatgattttttttgaggtgaaagtgaaaaaaagagagaaatactgtagttcgagtggaacaccggagaccggacgtcagaactccggcaagaactccgtcaactcctcctcctccggctccggcgaaggctcgtgaagcttgttgaaatactctaccacgctgaacccctcgcacgcggcaatgtcgtcggccggcggcgggatgtacggcggccgggagagctcgccgagcaagtcccacgcgactccggcgaagaacgggtgggcacggacctcgtcggcgccgccggcgaagccgagcctcttcgtgggctccttgtcgagcagcctcgcgatgaggtcggtgagctccggccaccgccgccgcgagtcggcggagaactccggctcccggaggagcacgttgcggaacgtctccttccggctccgcccccggaacggcgtcctcccgtacgccatctcgtagacgagcacgccgagcgcccaccagtcgacggcgaactcgtgcccctcgccccgcaccacctccggcgccacgtactcctccgtgcccacgaacgagaatgacctctcgcacgcggcggcggcgccgccgctcgcgctcgcggccgagcagaagctcgcctgcttcttgccgcggcttaccggcgacaccctcgccgacttcgccttcttgaggtggtcggcggcgccgccgccgccgtcgcttctcttgaggaaccaggccaggttgtgggtgtactgcccgggcgacgacgtcgatgtcgtcgcggccaccgacgactcacttctcgcgaagattcgcctcagctggctccggccatgtccctgcagctgcggcggcggcgacgacgtggccgagcacgacgacgacgaggtggaggtggacgcggagggggagacgggcgggagcagccgggagaggtcgaagtcggtcagcgtgacgtggccgtcggcgcggaggaggacgttctcgggcttgaggtcgcggtacgcaatcccggcggcgtggagctcggcgagcgcggagacgagctcggcgacgtagaacctgatggccgcgggggagaagacgcggtcgggctgcgcgtggcggagctcgttgaggtccccgccatggcagtacggcacggcccacgccacgaggtcgcccgtctcggcgcgcccgagcagcgacgggaggtgcgggtgcgcgagcccggacagcaccgacacctcccacctcgcccgccgcgccgcgtccccctgcctcgccgccgacgcgacgacggacctcttgtcgaagaccttgagcgcgtagtagcacgccccgccgccggcggcgtcgtccgccgccgcggcgacgaggaacacggtgcccatggcgccgcggccgagcacgcggacggcgcgcacggcgtcgaggtcaatgtccgccatgcgcggctgctgctgctgctgcatgggcgcgcgcgcgcgcgctctgtgtgtgtgcttgggagtgtgtcgcgttgtgagcgacgaggacgtggaggcgagatataataagctggtagtagggggccgggctaaacccgcgagacggttgcctaattaatttgttgtttttgtcttgtttaacctgcagagattaatgaaacaaagtggcaacgccacttcaagatttatactattgttatctccggcacagctttggcgttttctcaattctcatcggttctgtcaaagagacgatcttcggagcatatactggcctagggtttcaaaaccggctcagtcatcgaataccgcacggccttttttttctgtctatatatcatatgacataaaatctcacctcctatcatttgaattttgaaccattggatgtgctttaagattcgcgcagccccttaaaccctaactcctattcctccttccccggttccagatcatgctgccaccctcctcctcccgtcccacacgcgatccgccgccaccaccgccaccgccacccccaccgcgctgccgcccgcctcgccggctggccggaaaaagtcaacggccctgcaagccccctccccctccccttcccccctcactttgtcctcatggcgacgatgacgaggtgcccccgccccgccggatccgttacctctggccgccacctcctaatcccacgcttgctttgacccgccgccgacgccggctcaccgccctcctccatccccgcggctttggcgatgccgccgccacctcgccgctcgccggagtccaccgcccaccgccagttctccgccacccacggccatccctctaagccccaaggaaacccccctcttccccctcccccaacccccctcctaccctcaccccaaccccaaaccctaacccgccggagttggaggagagaagccgatgcacgaatcttggcatggatccaatggtccaaaatctgtaagatttcatcctcaaatttcattcgaatgccatatagcaatcccctttttttcgataaacgcgattactgtatagtgtccgacaaaatttgaacaaaggtaggagtatttgaaagttattcccagtgaaatatactatttttatatttccatcttttatatttccaaaggtgccatataagcaacgagtcatgtaattgatgattgaaaaacacatggttttatttttgttgtttcataggtaatacatgcaagaaactatatattataaacaatttggacatggttttatcctctgacctcttggcacgtcggaacaatttggacatggttttatttagatgaaactcatcgatctcatctctcactttattatatttcttaccacatcattaaaaaaatactaacataacaccctatttaaatagaatgaaactactatattaggatgggccttatcttaacctcggtcgtctccttcgatctaatggctagaaaattgtctccaagattcagccaaaaagagagcagggagatatggagaagaccgactccccggcaatgacagtgttgccgctagagccgcgaggtcggaggagggtagtggataagtcggcgatagaggaattagatcagagtggtaggggagctaatgggggcaccttgccgtctcccatattgggtaggaggagaggcggggagggaaggggaaggtcgattggcgggtcttgttggcatgctgagggcagggatcgatgtggtgacacgagtagggtcaaccaataagtcaccaacgagataaaggttggctggagctgaagggcaccctgaaagaccttccagggagaccagtgaccctataacgatataagtctaccctatgaagaccaaataacctgaatatgttgaagaaggggaaaaaaccctcgtaaatgtttctatcaaggggttatgcatgtaagagtttgtgtaagcaaatcctaaggttagttagcaaggctaaaaacctacaaataaatcctaaggatatgatgcaagggcatgttgtgaaaaattaataccgtacactttactgtttttgtctatatttttaagataagtgtttatcttttaacagccatatagttatttaatggtcccttcaacaaactatactgaacttttgaattctcttgaactataccagtttactgactcaatacttaattcctacgcgctcaataagactgatgataactacaataactgaagtactgaaaatttaccgtcgcattttcaaccatacctctggcttgggttttagcatttctaagatattgtatccgaggaaaaaatgtgtaattgtttctctctaactctagtcaagaaaatacattgtttgaagatatcttaaaataaatctgtcatgatttacatgaaaatcatatggtggatttaaataaaaagcagtttaatatagtactatcatgtagagctgtttatttgtggaagatttgaaaactagctttatcacttcagcatggagtaagtgggtggtggatgccgttggtccactcactaatacgtgtgcatgataagctaaattatgtcaattttgtgctgcttatgcctcctccaataaaggtgagtcagctagctaataaatctccatatcagcttttgtatgatgtggaagagagagaagataaggagagagaatgcactatctcttcttcaagagctaagcttctaaagaaaatatgagaggaattgtgaaacccaaagcattttaaataatatgctataaaataatttattggagagttaatttttttctcttgtataaggtgaacaagcatatccattaaaggaggcgttacaagagagatcatttggcgtggagctcaaggtgagaaaggtgagctttacacgtgtgcacagtatcagcaaccgaagattttttttttttttacagtgactctacaaacaggcacttcacatagtagtattcaaaacaaaatttaaactgctggtcatcaatcatatgatgcaacggaacgggcatattccaaatcggacatcgtacgggattatcgagagactttgtgttgcgattgtacatgacaaaagattatgataccgataggacgaaccgtaccattatattgtgcttgggatgctgctcatgagtcgtagcttgtgttaattttgcatatttgtacgatgtacctaacgaattttgaatgcaaatttacgagctaaattaactggccagagcagaacccgtccttcagcgacttctgcacgtcgccaatattgacttcgagtcaaaatttgatagtacgaattcggtttgattaatgagacaaaatagagtgcgattgatgcttccctcctaacatgataatattttgtttaatgctgaaatcaagaaagtgaaggtcaaaacatatcttttcgtgaatcagccttgtctgttggtgcttgtttagttcgcgaaaagaaaatttttaagcgtcatatcggatgtttaaccggaatttcggatacgaataaaaaaactaatttcataactcgcctgaaaaccgcgagacgaatcttttgagcctaattaatctgtcattagaacatataggttactgtagcacttatggctaatcatatgtactaattaggattaaaagattcgtctcgtgatttctcccataactgtgtaattagtttttttagtctatatttaatgctccatgtacatgttcaaagatcgaatgtgatgttttaggaaaattttttggtgaactaaaccaggccttgtttagttcatatggttagctttaccttttgaaagtgctactatctttttttggtgaagttcgctcccatggtgagctgcatgcatgtgacagaaaaatcagaattgaagttgacattgtgcttactgcttacgtgccaccaaattacagtgcttaaattcagaattgaagttgacattgtgcttactgcttacgtgccaccaaattacagtgcttaaattcggttataatttagaataatcagggatcatattggcttgcttcaaacatgtccaacagagaattgagcttgagtacttggactgtagtttttttttttttactttcatacagatatttatagatttcttcagttagttctttcaaatgtgcaatacgaggagcagtataccatcagtatgacagtcatcaactggtgagcttgtatggcagaaatgggtcctatataaattgaattactaattaattttagctgcagtagtgccagggtaccacctggtccaccagtctaccaggaacactgttcgtccgtaaacatgtgtgtgataaagaagatactcagagccgtatttatttcagtatggcacaggagccatccaaaatggcctaaaatccagcgtcaagttgcaaacaaaaagtatatatattcaactaagtttgctgacaaaaaccaacataaccatcagggaacataagtttatatatgttaaagggtgggtggttcgtactacaaagacggtgtacttctatgaagaaaatcttcatggagtcatgtttaagttgagtgtgttagctacttttgttctcttttgagaggaggtttgattgctaagtggcagcaatactaattgctccaattctgtcgtttctgaagatatataattcttcgtggagcccagagcctgaatttgagggttgccttacataagcacattagaataaccaagaaacctgtcccatggtcaacaatttgtatatcgacacttcaaccaacaaccataaactccaacagtgctaagttcaaaacgagataatgggtaaatggagaacagagttcctgaaacactacctgattacctgctataaaatggaatagtcactcctagttcctagtgttgcctaactctagaaaatcttcatccgccgtcgatcgagacagggacggatgaagcaatttcacaggaattaaactatctcctatgaaattcctccaaaatttctacgtttcaaaggaaccatgagtgtgtggacggaggacacccggcagtttctgttgtagatcatcccctgagtcgggatgtgagaaacatcacgtggcataggcaaaccatcctatccaacaccatctgtgcggcacatgtatgatgaaattatcaacagtgaatcagtgtgatggtttggatgatgctctgaacttgagccgtggagagggaccagttctggatgatcacttttcttgatcaggcgccggtccggtcaaggcctcgatcgctcgtttcgtttggtggttgtctaccactcattaccaaagctctgggacgagaccgaaaacttctttgttttctccttaaacaatgattacctgaaagcaagattagctataacaaacgtaacgtggctccctggctaatcaaagcatatggcgtcttgtgccgttgttgcttcatgccactgtgcacgcaaaggccattccttcctgccaagggatacccagctgggaatgtctctgacagaagagaaccaaaatggagacgtgaattcagacgtagtatctgaacatggagaagaattgtggattttggtgtctctgcagatgcagagaccgacagatacacatatatacgtatagggatatgctcagtgttcagtgttgttgccacctgccaatccgtcaggttaacgatccttttggaaattccacccgtgcattcttgtgtgactgtgtgcgcgaatcatgctctgctccattattggagctgagcttggcgtttggcatcttcctgtttatctggttaacttcgtcgtcacctactggctactcactccccctagtctttaacaagtcgtaaagctgaatagttgctaacatgttagcccacactgatgcagggggttaagagtattcaaatcggagcttgtcacccatttaacaataggtgtctaacttggtcggccattacacgggagtattctagatcaaagtgaggtaatcagcactaagtaatttcatcaacacaagaacagatgcatcaacacaagaacacatagggacataggataggaggcccttttttgcagctcctgggtgcgtgatgaaccgatgattagtgaagctcaattagtagctccttgacctttgccgccaacgaacgcagattcaggcatcgtttcagccataagagccactaaactgaacaataccacttttgttcatatgggaagttactaaagatcacccctgtgtgcgatcacatcagagaagtgaagtcacgtcacgttggattgtggcgcagattgctttatgcaaaagcgtctcactctcacacaaaaagggggtcaaggccgacgcttagctgttcaactcttggcgagggcgaggcttcagatcagatcagatcaaagatcaagatcagaactaccgcgatgaactgctctgcaacaaccgacaaccgcggttaatgtccacaagttgtgtgagcactgttcggcgacgaagcagaaacgaacaacgatccgtgcagagagacgagcgacgacaccaccggcgccgcgtgaattcgcggtagccgagccggggaagccgtgaggcgcgacgaatccgcgggggatgtgatcagccgaccgccaccgatgggccgtgcgaaacggcaaaaaaatgggcgaaacggccgaggccgcgcgggacgggccagcgctcggtggagttcgtggaattcacgggatttcacggggaatttggcccgcgtgcgtgtgggtttacgaggccagccagccagcccaccgtggaaagctactggctggctgggttgatgccttgatgggttacaagtttacaacggttgttgggtttggattctataatcaggaggacgtgtcactccgtgtccagttctactacttttttctctttggaagcgcaaggtgcaaagcatgtgtactctatcgttcatgtcgtgacgctatacaggtcaaacatggagaattggagataagagattatggtgttctgacagtacttttgtagtccatctgctccctgtttgttgatggtgattgttggtaaaggtgatctgggtatacagaaaatgattcagaaaaagaaacacacactaaaagttgctgctatgtttcttttttcccttcagttactaccaacaacagctaaaaacacttgctcaaaaaaaactgaaattgaatttggcatctagatgatatttaaaattaaaatgttcattttgaactatgtggataatctcaaggaaatactgatctaacggtggaacaattaacatttttttttgcaaggaacaatgaacatgattgcctgattgggagggagtaagaaaagataacattgaactttcctcaccaaagacctcgatgagaataccatgtgctcatccattttgcccgttctccgtactgccacatgaagcacgctaaactccatttcaacaacaaaaaagaattaagtaatgtaaacctcaagggatcagtttcggcacaaacaatagaaaagcccaactggcaaagccaaattaacgagaagagagaactatatcacgagaactcttgactattgattgcgcatcacatcgagcagcctaaggaatcctaatcatcatcatctacaagaacacaattcgcctaccatcacgtatactctattgctaacagttcgtgttagaccaaataaaaaaatataatcagaagtaatcaaagacgagtgaagaacaggtcagagtgagaccacaacacttgcgagaaagaagacgactggccatcacgagcagaggatgtggacgtggccatgtgaagagtcaggccgtgtggcctccacgacagtataacccgtgttcatgcacaaatcgcgccgtatcttttactactcgcacataatttctccgcacaaaatgacttatctttttgttgagaaaaatgaaaagtttattctacttgggtagtagtactatgttggctgatctttttttttctccctttttagcggttcatgagagacgcgcacgaattgatgattagttgcttggttggatgaataatttgcagtttacaaagtgtggagaaaggttccagtttgagatgaacacggaatgtgtcggaactggaattggatggattgtttatagggcagcaaccagctaccaagtgattgctaatcaagctactcaattccattcctttcatttcaatgattgagcaataaccatatgccgaataattttgtaaaaatggagcagaaagtgcgagacaaatacacacccaatccatttgttcttcgattctttttccctcaaccacctcacatcaccattattgttacactattccttttccaccacttatcctcccgtttgcaattaaaaagaataaaaagggaaaaacaattgcgagaagagaacagcataataataacatccacaccttcaattcccaatttttttctccatttcttgctaaaacagtagattttttttttaattttgtttgcctctcagaacctaacgatcttggccgcgcgcaccaccgggttgtccctggcgatggcgtccctcgccgccgacttgtagtcgtagctgcagccgtggcggtcggagtaccggtgctcgccgcagaacaggtggccgcaccggcaccggaacccggtgaggccgacacgcttccggcacctggagcaccggttcaccgccgacgtcttggcgaccggcgccggcgccgtcgcgagcgcggaggccatctcctccacaggcggtgggagaggagcctgaggctcaaccagcggcgccgccggcctcggcggctgcttgtcgagcaccggtgacgacaaagaagacggcgacgaggtggacgccgtggccgccaagaagcagttctggcagaggttctgcgtggccgggttgcccgggaatccgcagctgttggcgcacagcgtgatctccggcgccctgagctccgtcggctcctgatccttcttgtcgcgctgcgccatcgtcaataaccaaaaaagaatccccctcttggtctcaggctctctcagcaggctgaggattccgctcgcggtttgggtttgctgtgtgatgaggattgcaggagagatcgaggagaggatttgatcgggaatggcggcgaggcgggggggctttttatggacgcggaggcgcagcgtgtgtgggggtgggggcagcgacctgccccgcctgccgcgcgggcgcgtgttatttccggtattggcctcgttggcgtcgcgcgggaagggggggggggggggggggg

SEQ ID NO: 8892 - DNA, 86320 bp, Oryza sativa
ggggggggttggcgcggcggcaacgcggccctcggtttcacgggtggattccgcagccaaaaaagcggtaaacggcgtgcacggccgttgggtcggtcgcctcgcctctcccacgggcgtagtactacggtagaatcgtcacggcggaacgtgacatgccgccactcatggctcgctgccggccacagttcggcgctgggagtggaggagctggatccagatgggtagccgtggctcactggctcctgtgaccgtgtactggatgagtagtacagtggagctatcgttccgcttatttcatgaataaacgaaatgacatatttacaaacgaaaaataatttataaataaaatttttatatatgtattcttaacgatctaaaaataaaagatgaaagataaattttaataaaaagacttaaaatcagttttaaatttaatattaaaaatttaaattttaagtataagtataaacgaaaaggtgaggccctaagcgtgtggagacgtgtgggtggaacggtctttttccccgtaagatatgttgtgtttttaggacacgggacccgggcaagtagccaagtagcccaccccgcggggaggagatatgctcgaccgaaagaggaggggagggggtggaaaacgggaaagcgaagaaccggggcaaagcggtaaaccaaaccatcggcaagccgcatcgccgtctcgggtcggctaagcaagctctcgttctagctgggaattggaagttggaacccgtcgtcgtcctcggcctctcgacccgtcgcgtggcgtggcgcggcgtgcccccgttcaccgcacgttctcgttctgccgatctgcctgacgccgcgatgagaaaaattaaggaaaagatcccccctttctgctgttgctgccgtggagctctcctcgcgtcgctttccgcccgctgagctgtctggattagcatggccattcctttccttccggccggccttcccccccccccccccccttcttcttttctccccctccctccctacgtagaccgtgcccatgtcactgtcacacatacgtacgtacacactcaaaagccaaattgcaatccgagaattgagaatactaaatcacggcctctctctctgtatatgatatatgcatcggctgtacgcatgtcgacatggagaaggacgattcgtggaccggttttggtccagctacgtacgcaatacattgccccgtacatacgcgccgcgcagccacgcgctgatggcgttttcatgtgaaatcacggcgtagtttgttgcccgattttacagggaaacttcacggcctcgctgagcttaactcgtcctgaattaacaaagtacaaggcggccaaccacgaggagacacgcgaaccggagcgcacgaagagaatccccggataagcggattccctttgccccagagaggacggaaaagacgccggaacagcacgcgcgacgccacgcgagagacggagcgaaccgaaactttccccacatgagtacattgacaattcggcaaccgatcgattgatcgatcacctcacccgatcgaatcgaattggggtaaaggagagcgaggaaaatatgccggaatgcgcgaaatatctctctgcccttggataggtagcagcaaaagcaggaatggatggatggatgatccgtcgggtactttggatagagcattggagctaacttgcagaggttggaagatgcatggtcgtgatcatatgatcaattgatcattcaggggaagcttaattgcgcacgctgccgacaacgggtcgaccggcagccggccggccggccgcccaatcgatcgaccggcaaccaactcgaccaatgatttgtcctgccgatatatatacacgtaattgttcggctaatcatgagctacgaacgaaccgggctgttgacgaacacatgttatatatacctacatcataattcgatgttaattgagcttaattcggtccctcaaaaataacctaagatgcttaatgcttaatccttcatggtttccattgaattagctgttccctggaaaattgaagtcggcgtggaataatatccatgatataaaggcatcgaaaggctggaccattgctcaaaaggatgaggtcgagtaccgctcaagtgactgacaggacaatgagctagtaccagaaaactagctgcaggtataacttttgaaagccgccttggctggctgtaccaatcctttaccggaagcacgacaaccaggaaaaccacatccaaccgaagatatcaacaggactgtatattactgccgcaacacgtcaccgtccgtcttgcgggcaacagagagcgtcagcgtcggtgtgtccgttccagtttgcggaccgacttgatatttcgattggctttggattgctatcccttgaccctagaatcacctttgccaagtgctcctttttcgctcataaagttccagttcaggatgatgctactagtggctttgcacttcaggagtttactacataattgtttgtggagtttagacgtggcgattgtgggtggatggccggcagctggtgtgatatcctccgtcgaacggcggcggctgtgatcgaacccggcggcgacgctgcgcttcacacgtgtgtgacgctcgccaccgcgtgtctcccggccactgagcacgagcgccagcccagcacgggacagttcagggtcgcacacgcgtcgagccgtcaaccttcgtttactcgctcccggggccgatgtccgcttccggacgacgccggtttgaccgcaccttccggcttccaggagagtcgtcgtgatgcccgcgtgcgcgttttgcagattgggccgcgtaggggacacgctgaaaactgggctgccttttttggtccaacgtgaaaggaaaaagtacatcgaaggtccctcaacttgtcaccgagataaaaaaacgtcctcgaaccataaaaccagatatcgaaggtcccttaacttaccaaaaccggtcacaagtagtcccagggcagtatttcacacggttttatcctacgtggcactggttttgtccaccgtggtgctttaaccttggtcttcgtcgctgagtcaccagcgccacgcgaagctggcgcctggcgggacggagtggggcggcggtgagcagacgcgcgggcggagtgacggcacccgaagccgacggggtggcggagccaagcggaggacgccagcctcgttgtcgtcatcttccgacatagggaggaggcgtgggagctggagccggaggaggggctccgctagaagccgctactgtagaaccaggagcacatgatcttgagctccagctccgacgccgcctcagccgcgtcagttttgccgcgcccccacgctgtcgtcgacgccacctcgtcgtccatcatatcgaacattgatgcggccgcgataatcgccttggcgctccccgacagcgactcttccggggcggccctcctcttgccccctcatgtagccacaccgccccctgcggcggcctcgactcttgcgccgccgcttcatgactcactgcatgacgccagcagggagcctgacggtgacgaggagcaggatcgctgctcccttcctcctcctctctccctcttgtctggggagggcggccagtagcggtcgacttcgtcctcgaactcgccggcggcggcgagctgttctccctgccggcggagaaggatggagaaggcagtggagcggcaccgcccgggctgctgcttcccctgccgccgccgcccgcccgcgcgccgctccgctgcacgccgcctacacgctgctcctcccccgccgcttgcgctcgccggccgtcccccgtgcagctgcttccccgcccccgcgcgcgcccgcaaccacctccgccttcgccactaaagccgccatcgtcgtcgtctacttgtcttcatccaccccaaaatgtcgtcgcacctagacgggcaccgccgagtagccaccccttttccctcaggcgccgaccgccgcgccgcggcgatgcgccggtgttgatgaaaaacacgaggcctgggtcgttaatagccggccatcacccaatcggagccgatgccgccgctggcgccccctccaattggcgccccgtccttctcctcccggcgccactcccttccctccctcctccgcctggcgccacctcgattcctcccctctgcgccgtctcccggccgcgctgccaagccgccgcgcctcgcagcctctctcctcctgcgtgcaaccgcgccgccaccaggctccctctccttgccgccaagctctcccccttccacgctgccggcccctcttccccaccgccgccgcccatcacctgcgtcgctggcgcccttcctctgctgcgcgcgtgtgacgcgtgaggaggaaaaaaaaaggcagagagagagaacggcgaagtgaagaaacagagagaaagagacaaaataaaacaagaaagaacagaaaaaggaagtggaaccccccttgactcctccccgtgaaggaaaaagtacaccaaggaagagatgtgacgtggcagtctgacacgtggggtacatgctgactcagctgccacgtaggataaaaacgggctcaaaaccaccgaatgagttattgtaaccggttttggtaagttaaggaaccttgatatctggttttgcggttcgaggacgttttttatctcggtagcaagttgagggaccttcggtgtacttttccgaacgtgaaatgggtggtatcatgatgggctgttcaatctgtcgatatttatgggctgaattaggcttacaggcttagggcaagccgaatttcgtgggctattatggcagcttttctcgtgcacaaatatggatctttatttggcccaccgcgaccccacggcataacgaaacaggcagagcccctggaaagatttcagcaatacctgttcagacgacgacgtctgctctgttgttcgatttccgtccgcatattcgtcgtgtgatcgtgtccacgcctggagttttctggcacaggccgcgctcttctcacctcagcctcaggactcaggtgatcgtgtcaacgtccggagctctcaggcgatcgtgtctcacttcacaggttgacaggtcggcgcattcgatgccgttccaaacgcagaaaatttagagaaacatctcgggacagagcggcgctcccacgcgtggaatcccgcagatgtaaaacttcgttacaatttacagtgttcgcaacatcaagaaacgacattttttcattcgaaaatgctgcaaatctgcaactggcaatctctagacaaatcctttccctttcgatgccgaagcagaattgaagtttgagaatgttcttcgtctagaccgagcagtcagtgatctgcaagcgcgaggcgttcacagatcgtctcgacgacctccctcccctgggacgcgttctgcctgaacctctccgcgcaccgccgctccaccatctcggccgcccaggccgccacggcagcgagcggcgcgcaccgaatgctcgtctcctgccggaacagcgtccactcgtcgggccgctccgggtgcgggcggtagctgcaggtctcctcgacgtgcaccagcgcccggaggttggcgttgcgggagatcacccgcatggcccgtgcgggcccgtccacggtggtgtgctcgacgcagagcaccacgtcggcggcggcgacgaggccgcggaggaggagcgggagcggcggcgcccgccccgcgatggcgcgcacggcgtcgatgcgccccgatccagcgtcgacgcggcgggacagcgtgtgcacctcgaggatgtgcgacagcggcgccgcccgcgcgtccgcgtccgtgaacttgcgccacgccgccgcggtcacccggtgccacgggtggcggtacacgtgctcctgcgtgtacgagaccaccatgccggccggccggccgccgcttgcctgtgcgcgcgcgcgtcgcgtcgcgccgagatcgagcgaggctagcgagagcgatttcgacagcaactgcagcgaaataatgggaatatgagtgtgtgtggactccggactccggaggaagagaggaatattcgagttccacggggaattaaacccattattttgggctcaatttgcttggactgcaaagctaccagacctgcagcccagcgcatctacagatgggccaaattttgacatacttcttagtgggcctaagaattcatgaattggggccggcctaaggccagcagcccagtgagtcatcacctcgcgacctaatgtctcgatccaacggcgaagatcaaaaccctaacctgcgccatcgtcgactatattaaaagcccactcctccccgcgccgccgcccttctctcgagcaagcacccaaaccctcccctctaccccgccgccgccgccgaggaaggggcaagaggaagccggcgaagatgaagaccatcctggcgtccgagacgatggagatcccggagggggtgacggtgcaggtcgccgcgaaggtggtgacggtggagggcccccgcgggaagctgacccgcaacttcaagcacctcaacctcgacttccagctgctggagggcggccgcaagctgcaggtggacgcgtggttcggcacccgccgcaccatggccgccatccgcaccgccatctcccacgtccagaacctcatcaccggcgtcaccaagggctaccgctacaagatgcgcttcgtctacgctcacttccccatcaacgcctccatcaccaactccaacaccgccatcgagatcaggaacttcttgggcgagaagaaggtaagaaacccacctttggatcacttccatttgcccgctgttcgtggatcatcctagatctcccccacagatctctcaaatctgatgcgtctttctgtatgctttgtgtttcaggtgaggaaggttgacatgctcgagggggtgaccatcttgcggtcggagaaggtgaaggacgagctcgtcctcgacggcaacgacatcgagctcgtctctcgctcagcagccctcatcaaccaggtgaatgatacgatcccgtttcttctccctatagattggagatttcctggtcttctaatactgatatgatgcaatataacctaattagtcctgatctttgcatgtgttatgtactcatgttgccatggttgtaggaattagttctctttgctccaatgatatatctaggtttgtaattgtttaacaagtcatgcctgcctgcttgtttctgttgtttgctgcttaaggttatatgttgaaactgctaaggcggcatgatgttctatgtccttagtttgatcattggcagttgtgaatgtcattatttacagtgctctacttaggttttaataaccatttcaccatctgtctgttatgtcagtactgaagttacgttaacacatttgtgacgaacaaatccatttcttgaacaaccaagatcccttttgtagttgggctaattggcattgctaagttcttggtttggaaaccatgagtggtgtcggtgctcagggtacagtttgttatccactgtctgatccctatttgaatttggcgtctgcacaacaccatgattatacatcaaacctttttgccaatgtgatttatcttctatttttcggttcgtcgagcactcttttttccatgctttcagtgaaacaagatattttatcaattatcgtgtgttttgctcttgttgatttgtttgtgcccttgttgtgttgttgatcaaaattccctttgcttgtaaacagaaatgccacgtgaagaacaaggatatcaggaagttcttggatggtatctacgtgagcgacaagggtaccatcacagaggatgcgtaaactcctatcttcacctagtatcatgaagtgctgtttcttgtctcccgtgtctgatcatcctctgagttgcaattttctgagagactgaattttgtaatggtgggttatttaggatgtaatggagcatggtatcttatcctacatattgtttctgtttgcgattatgaagtctatttatcatcccctaaagacagtttactggaagcattcgtggttagataaacagcataatgctacttaaaagtgtgagctggtatgttttcccctgcgtatgatggattgcaaactggaggagtgtttttcccctgcccttccactgttactggaagcagcggttagtttcgagacattggcttatctggacatagaggattccattgttagcatcatggatgcatgtgtgatttagagctgcaattcatttgattaccacactccgcactactgatctgacactgacgtacagaatcaacattgcgaatgctttttggggacttcctctcacattctcgctgtagagagtgcgtctagtagagggtgaaaccgtcgctgtacttaagagagagtgcgtctagtagagggtgaaaccgtcgtcgtaggagacgtggcgtccgcggcggcagggcggcgcgccctcgtcgcgctcctggcagcagctccacctccccttccagttgtctctcccggtgtttgggcgactccccctgtcgttccacctgtacacgatcaccccgctcttgtcgctccattcgccgtcgatcccctggtgcggcggcgacagcgagaacaaccccttctcccctgcaaacccgtcaaaagatagattcaagtcttatttaacagtaactagctgggtggtccgtgcaattgcgcggctagcacccaaacaaaatcatatatttttttaagtatgattttacttaaaatttattaaatagctatctcattgtcttaagattttgaaagatcaaactttatcatctccgtgtttctaattatataatttttaaaagtcacactagttgctacttcttatgtcatctccttctttatttgcttgtccgatctaccacaatttctattcattctccttggaacctttaaaaattggatcttatatttttttagagtttattgtcattttgggtttcgtttttataatttctagatgtcccgtcaaacgttgccattatactcctctacggcccgtccactgtcttctctttattgccattgagattttaaaaatcgaacataattatcgtttgggttcatttttactttctagaagtcccgccaaaccatcagcggctttgctattttactcctctaccactcggccgctgcctccctttttttttgtcattgagattttaaaatcaaacatgattatcattggtttttttttactttttaagaagttccgaacctttaaaaattggaccttatagtttttagagtttattatctggttgggtttcattttttataatttttagaagtcccatcaaacgatgtcactatgctcctctacggcccgtccgccgcctactatttattgtcattgtgattctaaaattcgaacataactatcgttggaattcattttttattttctagaagtcttgtcaaccgtcggtggctctacaactatactcctatacaccccgcccgctgcttctcctttttattgtcattgagattttaaaaatcgaatattattatcaatggggtttattttttttactttctagaagtcccggcaatcgccttgctcgtttgcttcacggcctacatgtcgtccctccttttaatcatcattaggattatatttggtgttttattaacagtttttatatgtcgtatcaatcgtcaccactctactcttttataggtctgttacttaatttatcttgtcatgtgttttagatggttttttctttcaatagtctttattttatcccaaattttagttatttataaactgtattcataattgaaatcttatttttctttttctaatttgagaatttattttttccaaattttaattaataccatattgtgttattttaatattcttattttttattttcaattttagttgtttcaaaattgtattccgaactctctgttagtttttctaattttggatattattttattttttattctgaattttaattaatgtcgtattgggttcttatatcatccttctttcaatattgcttatttttaattccgaatttcagctaattttaaattgtatttctacttgaactctttttttttctaatttcagattttatttttattttaattccgaattttaattaatctcgttttgagttcttatatgaactcttcttttaatattccttatttttaattccgtattttagctatttttaaattgcattcctacttggattatccttttcttttctaatttttgtttttattttgaattttgactaatctcgtattgggttcttatatggaaacttctttcaatattgcttatttttaattccgaatttcagctatttctaaattgtatttctacttggactcttcttttcttttctaattttagattttattttatttttattttgattttttattaatctcatattgggttcttatttggaaacttctttcaatattgcttatttttaattccgaatttcagatatttttaaattgtatttctacttggactctacttttcgttttcttcttttttctccgattaatgtggaaatttctaacccccacggcaaacgtggtgcctcctttcaaaactgttttaataatataatagatacttatatttacagctaattattatttcagtgctatataatgtatatttatataaggtcatttcgttaatttcaaaatacgtcgatctaatcatttgaagatgcttataagtgttaaaatgttgtgggcgtctatccaaaatgtcgacacacttcacactacactagcccaagatagccacgaaccggagaaagaagaagatatttatcgcgaggttggctacctgtgacgtggccgtggaaggcgcagtcggtgggggagttgtcctcgtcgagatacaggctcccgcaccgcaggcatcgcttcctatccttctcctcgctccgactgccctgctccaccgcagccgctgctgccgcggccgcgccgtcgcctggagacgcgccgatccgcgccgtcgcaggccgacacggcggtgccgcggcgttccggtggcgagacggcccgcgcggcggcagtaccggcaccgtgcgggttggtgcgagagctgggctcgccgccatggcgtgatgaggcgacgggattggcatcttgtgctaatggagctcgcactccacacgcacacacagacattcccgctgagaattgctgcctcttttcaggttgtggcttgggggtaatgggccaaatacaaacggcccaaactacactggacgacgtagtagtgatgcaggggaagagatctggcccaaattgaaactagcgatgtgagtagtgccgtacccgtactgccatgtctctctccacgccaaggacggcaggacgccaggaccaggagagtacaagcaacttccttgtgatttttgaaccaaccctaataatctccacgttttttctagtagtacagtacataggtagtacttacagtcagtcgttgacgtgctaataacggtggctgtcacgcagtgtcatcatggtcctcatcacgcagtggaggtggtccaaacatgtatcataagcatcattcagaaaactctgaagaaactgcgattagttacagctcgccgacgacgacgggcgagcttccgtcggtccgaccggccgcggtcgcagagcagagcagggagggaagctgctgacttcgccgcgctgcgtcgcgttcggttcttgccagccttcccaagtgggttcctgtcagctttttcctcgcggcctctgagcctctctctcggtcatcatccttcagctcctgcggctttgctgactggagttgctccaactgtttgtttacagttttgactcttggtctccacatttacatcggcggctagaacacgcacatttcactctctcaaagaacttttcaccctatcacattaaatgtttatacacatacatggagtattaaatatagataaaaaactactccctctggtcctatattaattgacgttttggacaaggttgaggttaaacttttataactttaaccatcaataactttaaaaatatttagtttagaaaaacatatatagatttgtctttcaaaacactataataaaagtaaacatgtatttatttattgtatatattataatagaaaaataaggtcaaaggtatattttgtagagcgtgtaattgtccaaagcgtcaattaaaatgaaactggagtgagtaattacacagattacgtgtaaatgcgagacgaatcttttaagcctaattgctccatgatttaacaatgtggtgctacagtaaacatttgctaatgacggtttaagtaggtttaataaattcgtctcgcagtttataggcagaatctgtaatttgtttggtattagtctacgtttaatacttcaaatgtgtgtccgtatatccgatgtgacacaccaaaacatttcgtctcgcgaactaaggccctatttacttccaggggtgaaaagttttggcgtgccatagtgattaaagaaccaaactctgaactcgtagcacctgacatctttgtggcctcaaaatagaagaacagaactgtggcgaatgcactataccaaaacatttgggtcagggatctgaacacactaggctgcgtttgataggatgggttgggaatccatcccctccgcacgaaaaacggagcagtccattagtgcgtgattaattaagtattagctaattttttttaaaaaaatggattaatttgatttttttaaagcaactttcgtaatttttttttgtaaaaacacaccgtttaacagtttgaaaaccgtgcgcgcgaaagaaagtgagagaggttgggaaccttgaggttcgaaagcagcctaaagataaccacggaggaccatctgtgacaattcatcaatctttggacgaaaattcagaatatagaccctcatcgtttgggtgctattatgcgagcagaacactagaatctttcgacacatcgccatccccaacctccgtgattgcaaaatcaaataggaggctggggcttgggtcaaagtaggagcgtccaagttctaagagtttctatttggggggagattacgtactttgacctttttaagtcgggcgaggactttcacacgtcgatgtacatactttaattttgtttactccctcactatggggtgtttggaagagaggggctaaactttagcccctctctcaaaaatataagtctctaggagatggacttatatttttgagagagttagatttatttgttcaaagaaaagacgcctaaaaatcattcagggctcttggtatcctttaccacattcactttccatattccctttctttagttcagacgctatcatacctcagggaaaaaaattttctatcaacgattcccacccaactctaaaatgactctcccctctctcccttaacatatcgaaggcctcttatacgtcaactagaccttaatagctcagacttccgagccttgctggatgatgcagaagggccaacataagaggatcaaatagagcgacagtccagattcagggttacttgtccacaccaactaatcaggtatcggaaaatagggcatatttgtttcagccgggagaccccctgggggtctagttttaaggcgattaggcctattgagatgcacatactaccttctttcatcttatcaccccgcctagcgactttgcaagcattacaggctaggcaccgccgaaggtagtccagtccgcttgttagattgaattgaatcttatataacctacgtagctaaagagaaaatcataatagtctaagtggacctctcaaaggtataaataagtatacattagtcttactggttcgatctttttctttttttgttatgatgcccacatttcatacttctcaattcttatttattcaagggttcgtatgtactgagtttagggtttagcccctctcttccaaacaccccctatatatacaagatgtagcttttgccttcttaaaaaaatttagatcaggaagaaggtgaaagagaggagaaaactaatgaagtgacatgtcggactcgccctcaccttttattttctcaaaagatcctcttttttaatgattggagtcatataggccaaattaggccggttcgagcaagggatataacttaaacagtttgaaaagttaaagaggcacaatatatgatttgcatatttaagattgatgttagtgttccatggaattttagggtgccgttttacacatgcagttgattttgcttattttgttcctacaaaaatattttctacctgtgaattttgcatagcgtagctggttagatttcatttcgtgaaacatataaactatggttgaaatcttagatttagcatgggtacccgcatttatggctaatttttccaggtgtaggtgatgtatatgtcaacagcaaggtgctcgtgatgatttcatcaatcgcaaggtacatatcgattgtggagtgcttgtagtgtcttcgtaagccttaaggtatatgtcgacagcgaaacgttggtggtgacttcatcaatcccaagatatattggttgctcatagagaaaagatgtgtatgtattcacaaggtcaactgtgtgcgcgtgtttataagcatttgtgtatgtaatgtgtttcaaaaatatatattcccttattcccaaaacaagcacaactatgagtttctgtgtcccaactttaattgttcgtcttatttattttttttaaaaaaaactaaaaaatataagtcacgcataaagtaatattcgtgttttataatctaataactataaaaatactaaacatgaaaaaatttcaaacaagatggacgattaaggttggacaccgaaatttatggttgcgcttattttgcaatagatcgagtataaaatagccagctctacgttttttctttaaaaaaaaagaaagatgttttttgtgttgaaggaaaattactgggcgcgggagggccggcctggtcagccagccaggccagcggtagcggtaggttgtactttggggcaccggcatatccaacttttcaggacaaagactgaagctgctgctggtgttgattagactttgcatagcagggcaataatttccatatctcccaaagttcctccccacgaattattcaggcagctaccgatacacattttggcagggcgcgaaaaagacaccaatgtacttcagtacttgcagccaacgcagtactccgtctgtggccagtggccagcgcgcgtgtgtgtgcatgcgcaacgcaagagagcgtcgcattgattgtgtgtttctgcgtggcagatggtactacaaggggtacgtggagtccgggtcacgttgctggcctgcccggtccggccggtctcccccacctgcaaaattctcacacacgcgtgcccgttgaggtgacccgtcctccagcagctaccgcgcgccgcgccgatcgactgctccccctctcgtctcgtcctgctttcgcacgccggatcaaacgcaagctagcttcccatggtattcggtgttgttttgcccgaaaagcaatctatttacacctgcaaactgcatatatgaaacgcatgagtttgtggtaacgagggccgggtaagattgacaaaaaaaaaaaaaaaggggaggatatgcatgcagtgcccgtgaagtgcacgttacaccaaccctccatctatcgatccgtcgtctagatgaagctaaggccctgttttgggttgaaagttttgagaagtactacctccgtttcaaaataagtgtagccgtggatatccgtacccaacgtttgaccgtctgtcttatttgaaaaaaatatgaaaaaattaaaaatatttagttacacataaagtattatttatgttttatcatctaatagcaataaaaatacgaatcataaaaatttttcaaataagacgaatggtcaaacgttgaacgtgaataatgtaaaactacacttattttaagacggagggagtaagtcaaaatcaattggcaaggggccgacgattatgagaattaagaaagttggttttttagcaccgggcctagcaaaagagaaatcgccatatactagccattatttagatatgggtggagcccaagaatatcggagagggtctaacaccctactattcagtttataattacctaattagttagatggtcctattataaaaaaagaaattatttgagggagctttgactccatccattccccccttgtctccgccatcgcttggtgagtcatcagctagtgggagtatgtcaaaactagatttcccaacttcttgctgctagctgggttcattctgaatcctatagctattgattcacatagtctagatgagtatatggaccacttccctcggttccaaaatgtaaaaatttttaggtttaaacaaatgagcaattttattgtacttgagagataccatggggtaccaaagatttagtgtaaaatttggtatatcatagtacttaggtatcacgaggtatcaaatttacaattgaaaaggcagtacctcatggtatcttctcaagtaccgtaaaattgttcttacacaaatactaaggttaggtcaaaagattccatgtaaataacttcagttgtcaattttgaattgcttagtttttatttcaagcatttcattgtcttaggaatcatcaatagaatgatatgaatcttgggaataagtgcatgaatccttataatattatgatgtaaaatttgaatcatagaaatacttactctctccatcccaaaataaatcaacttttatacgagaatatacatagactatatccagattaatgtataaaattttatattttatagggcagagggtttatattttaaattggatggagcatttagaagaggtggtgattctataagaagctgtaaccattggaagctagaattaagggcatggtcgtttcaacaactcaggtgagatttttcatggcatgaaaaagaaaatcattaacgagtaattaattgactattaattatataaacttagaaattgattgatctttttaagaaacttttacatataaagttttattttacgaaatgtaccttaaaatagtttgataagtatatccacaaagaattaacgagggagttgcttgcccgagttgcagaaacgaacggaaccccaggcagcacaactcgtaagataggcaatcgcatacagtgtgtcgtcccggcctgctctggcagaagagcaacttcctccatgcctgactagcggcaataataatattccaggtccccccattgattccctctcatgtatctttccctttcaatccaagagatgcatgagaaaagctcatcatttgacatgaacatctcatggtatttgtgtgtgcagcagcagcagcaggtagcaagcatgtacatctgatgttccatccatccatcaaccttgcctagacatacttttgtcggccattccgtggtgagccttcaagtgcgcccaaaaagttgatctccatctacacacatatcctctcctcgtgaaaagaagatccccaagctatttgttctctctcacttacacacagtgacacacacatactactcatctctgtgctttgtttccctctctctctctctcttgtttcttttacagtacatgcaatgcacaggtaggtcacagctccatccaattgtaggataggagtatataaatgtttgggcaaggaaacatctttgtttttggaagtatctccagctacaataccccattgctcccttttttcccttttctagggcaaacaaacaactggacatgtctctcacagcctttctgcaggggaggttcggatgcttgcacaggaaagaacacatagcaacagtagaagcttgaccgatacagggttgggaggttattgttttccagatgtagacgaagagatggtgataaaattggccccatcccaaacgcatagcgttagctctagcaaaacctggcgttgtttgaaccgacaggttcagttgaaattaaaaaagagagctatatggcaaaattatccactcctagcttgaatttgctgccacgagttaattaatactagtactagctggtatctaaaatctcaaaaatcttgggggaggatccatttattaattcttttttttcctagaaacccctttaggactcatttgcaatgtaaacattttctagggttttgataggatgctagctcaatttcctctagctagtacaaatccattagtattccttcattttcaaaagaaggccatgagtttttaattaatgggcgaagataacaaaattccaaatcttacaacacaatgctaaaattgaaaaaaaaaacaattccatagagaggacctagcaagaaaaactaaccccactcattaccatgcgcaacttttttccctccactcacccgaatcctcattttcccttctctcccttcgtttgccctgtctccccttgtgatacttcacaattgttgcctgcaagtaattaacatcctccctcatgacgcaccatatctcctaggcaaaatttgccacaggacatgcaaaaaaaacgtgtaattggctaagagacaccgtgaaaacatgacacggctgatggacagtaaaaaaacatgtaattggctgtaggacaccggtcacattttttttattatttccaggtcaaaagaggtgagatatttttctaaatgcctgacttgccccttctctttccttctttaaacaccggtgggtcccatgtgtcatggacagtgtatgtttaatctaatttttaataggtttttaaccatcaggccccacgcgtcatggactaatttgttcctaattagtagggtgattactatttactaaccataagtggggcccacatctctctcctatcctccttcttcctcacgcacgcggcggagcagaggaacagcagcctgagctgggacggctcggtacgcggcggaaaaagcggcggcgctccgccggggtatcactgccggcgacggcgaggaccaacgccgggatctcctcattcagcgaggaccaacgccatggcgacgagcagcgccgggatctcctcgttcagtgaggaccaacatcgacggtgacgaccaacggccagcctcacctccatcctcatggtgcagtagctgtccacggacatccagggtctggacggcctcatcgccagctctgaccccatcggcttccaggtcggctccttcgccaagagctacctcatgcaggagctgggcgtgcctgagtcccgcctccgggagctcgccatcaccgactactcctccagcctgcagagcggcgtcgtggcggccatcgtcgacgagctgccatacgtggagctcttcctctccatcaactgccagttcaggacagtggggcaggagttcacaaagagcggatggggattcgtgagttcttttccttgttggcttcttttcttcttctttttatcctacactacaaccaagtactacatatgcaggctttccagcgcgactcccctctggccgtggacctttcgacggctgccgaggaggaggaggctagagagcgaggtaggtgcggaggcaatccgatccgatgaattggcggcggcggtgctccatggcagggacaatctcgccatttgaaaaatattatcacctcttttgatctggaaaatataaaatattgtctccggtgtcctatagccaattacacaatttttagagtgtcaatcagccgtgtcacgtttttacggtgcctcttagccaattacacgttttttacatgtcctgtagaaaattttgcctatctcctatttgaccgatgtcatccgccactcctcgactgctcttatgacgtttgctttggtaccttttcatctactctagtttgatatctatgacggtttgtgcgctttcgacctgtgttaccgctcattagtttccatctcaagcacatcatcaagggccactttccatgcatgtccaggtgatggtacattcttggtggttgcttttgtccagacataaaatgccaatgagaacactgttttggcaaacacatggaacccacataaacacacatgccacatgtatacacattagctagtgacatgagccatgtccccttaaggccttaactaacaccctcaaggtctcaacagacaatgtccatgaacaaatccactaatctcataaaatttctcaattgtactatatcacatatttataaacgtgagcacccaggacctgcccgtatataccaaatacgtgttttgcttatggtagtatatggaaacaacatgcaaatgaaaaacagtatgtacaagcttgagccaaactctgtacaaacatttcgtctgaatgtgtatagtatatatgatggacaaacaagaataaaaacgccattattttcaatttgcgttagtcaatttgcgtcagtcaattttccatgtgtatagtaagcaaattgactgacgcacacatcgcgtccttgtaacgcagcatctcatattctagatgaacgaaagtacataccactgtacgaggtgatcgaaacaaatcgatcgagaatatcagacccgctggcaaatacgtacacacattgcattcacaggcaatatatgcagcttacagaccactccacgctacagcacccaaccaattaaacaagaaagatgataataacaaaacaaaacagaaaatctagacacgatcgatcgatcgattccttgatcgcgacaaagctacgggcgcgatcaatttgagatatcgccctagcaaaattaaagctagcctcctactataccagatcacggagttgcactaataatcaacaagagaacaaggcgtgtacgtcccaccagatggcgacaccaccaccatcatcaacagtgtgtacgccgtactacgtaccacgaagaagaagaagaagaagacaatcaccaacagcgagcgaaaccgatgagcaaactcgtatacatccacggtagaacgtagtagactagtagttcatagtagtagtgttgttacaatgaagagattcactctggtccaataaaaaaatacctcgaggttaccgatacattatggtaccaaattgtttccaatcgctggatccaataatacatatcttatccagctaaatccaacgatcagaaacgatttagtaatgtgaggtactagtacttcgagatactttttgctggaccgaagcaggtctttgcgattagagggatcgggcggcgggggcggtggaggaggagtcgtggtcgaggtcggagacggcgccgtcgtcgtcgtcgtcgagggcggcggcgccgccgagcgcgccgtggccgtggccgaaggcgcgggcgtggtccttgagggaccgcttgtgcttgaactcggagccgcagaggcagtaccagagcttgccgcagttcttctcgtgggtgcgccagtcgcccttgacggcgaacgccttgccgcacttgcggcacaggaacggcttcagcccgtgcttccgcttgtagtgcgtctgcagcgtcctgaagtccttgagcggcttcgcccgcgggtggtcgatgttgttccggcagcccgccgcgcagcagtagcacggcagccgcagcatcgccgtcggctgtatcccccgcagcgactccggccccttcctgtactgcgacccatgcccccacatatgcatctgcatattatcatattgaactcatcatattactgtattacgtatatactctatcaaataaacattgtacaatactactatatacgccctaagttagaaaaacacaacacacaactcctgaaaactactccgtgtatatgtacgtacaccgctagtaactcagaacgcagatgtcaggttgttgtctgtatgatcgtatgctggatttgcaggctgggttcaggcaatggtggtttccatgtgaacatgcagacttgtactgttactgctgctgttcatttcagtgtggtactaggacaccgtatactggctttctttttaatgcgtttgcttatcttgagatatttgcagacatctagtacggataatcagaagggagtcgatctggctggacctggccggctcatgcatcaatctctccttgctctttctcacacaaactttccggctttccccatgcatgcagctgtgataaaccggagaagccgcatgagcgcagaagaaacgccggccttttgaaagtgagggcgctatatatgtagctcttcagatcagacaaggctatggcttagctagtagtaggagtagaccattgcttgtgtgtttgtgactgttgcttgtgagatgagagagtgtgtggcgtgcttgtgcctgaggagcacagtgtgtgcgtcagggacagtggagctaagctacagcaagaacactgcacatctcttgcagttcttgggagaggtaaacggcagctgtagcaaaaccactagctcttgacaagtgagaaacgaaggaagaaaaggttaatgtggcttgatcaaacatccaacctaagctagcttggcaaaaaagcttcatcatctgaaagctagagagatcagtgtcatatggtagtggactgcatgctggctgctgtgagatactaccacacacacttcacaccattggagtagaagaaagtagctagcaccaggaacacctggcccctgccctgcctgtctgtgcatgcagctgagctgagcaaagctaagctttttcatcagagatatcatcagacacacacactatagctagctgctgcatgcatgctaatgagatctctttccatccatcaatagatacaccaggactcatctaatctacttagtacaaatcttattcatgcagatcatgcaaaggtgaagtctctggagaagagatcttcactgggatctctgctagctctgacgaaccaccactctaataatgcgcgcatttctaaagagagccccctgtaaaaagcaagagcgcccccagaaaagcataaaagtcgcatgcatgtatgactgcatttgcatttgcatggcatggctgccccggcctggccatatctgtcttgttcaatcacacgaaaaggcggccactgtgcgtgcacaactccaaccctctcctcctcatctcagctcagctcaatctccggtgatctcagagaccagaccagacaccagcacgtgtagcttgtatccactacttctcttatgagatttgctctaactcaaggtagcggtaactcacggtattaaatcatttccgatcgtcggatatagctgggtagtatgggtattgttagatctaacgatccgaaacgatttggtaccacagggtaccagtaccttgaggtaacttttttttttttttggaccggagcaaatctccttctcttatagcttgcttgctagcagttgctagtactcgtcgtatttcaacgataagctaaacaaaaaggtacgagctagcactagcagccatggaatcgaaggagaactgaactgaactgctctctagctttcatgttccctccgtttcaaactagatggctttgaaaataggtcgccagtttcaaaatatagctatctcattgaatggattttttttttcgaatggaaaaaaaatagctatctctgtagttcaaattatatggctttggaaataggaccttcatactttgtcgttcattaaaaatatggtgtgcgtgtatgtgttcatatggatgaatgtacacgtgttatgagcgattacgtttatactgtgtttctaaaaaaaattgactttggaataggagcttcatgcttcatcgttcattggtctgacagatcgagcaaaagaacaaattaatgttcagagaaagaaaagacgggattcatgttcttaagctagctagcccggctatggagtggcaagacacacttgataatcgagatttactagtgtacgataattccaagatcagctgcatgttgtgtgggacgttttttgtcaagaatttctcagataatatgtaggtttagcagctagcagagtatctataatgcaaagagaggttggtgaatatatggatatttttacatagatacatatgtatatcacttaattaatcactgtaaacagataactcttaagtaattaattaggttcaggctttcttcttaccaatcctaataaaattcggtcggcctaattctttcagtcaacccggcaaaaataaaattcagttttttgtttttatataaaggtagtgcaggttttcgttcgcatgctgatcgaggctgagtaactagctaagtataagaagcatacgttaatgggatcaagaggtatatatagaacgagtgagacgcattgtcaaacattattccgacaaaagaactagcaagtaattacacccagctagatatgcagcgttcgttcaagagccataaagctttcctgaactactactgtagaaatttttcatagccagatcttagaaagaaaaggtaaaaattgcgtcgcctactgtcggtatcatttatttgttaggtgattgcaattaggatatgcttgaaagaaaaaaaaattagttctagctagatcggatttattctagcctaagaaaagggatttatcaatctactgaagaagacatatgctttgtcataccatgacgacaaaaacgggggaagacgaacaagaggaccactagtggtacagtttggggatcacgcatgatgctatgtctaattctaagtaaattaatcacttattagtcttgaattgcgacaaaactgaacagcaataacccacaaagaatcgcaaaaaagaataaaattaaatggagcagcgataatctagagcaagcaagaacagtagcagctagcagaattaagctgtgaagagaaatgaagaaattgctggctgacctgcatgttgttgtatcggttgaaggttttgaagcagacggggcaggagaactgcgtggggccgatgaggatctgcgacggcgtcgggatccagtactggcccttgttcagacgcccgatcggcgtcgacgcgaaccctagcggcgccgcggcgtcggcggcgtcgccgccgtcgccgtcgtccctgctcgcgccgccggcttcctccgcctcgtcctcttcctcgtcacgacgcgcggtggaggatcttctcccggctgctgacgagagccccgagatgaggtcggcggcggcggtcgggctcggcaggccgatgtgcagcgcgaccgtgacgtccgcgtcgtcgtcccccgccgcggcggcttcggcggcgcagcagccggagccggagccctccacgtccatcgggtctcccgccgcagccttggtgttcaggtcggcgaagagccgccccgcgcggcgacgacggagctggtggtgtctatcgccgcctccaccgccgccgccgccgggcgtcgagcccggcacgtcctcctcgtccgccccctcctcctccgcgccgtcgtcgtcgtcggtgcagtcctcctccccccgctgccgcgcacgctcttgcgccgccgtcgtgccgccgcgcgaggcgggggtgagggacagtagcggcaaggcctcccggagcggaggcgacggcggggcagtcgtcgtcggcggcgtcgcggccgtcgtcgacgtcacccccgccgtcggaaagaacgggaaggaggaggaggagtaagcgccagccggcgacggcgacggcgacggcggggtggagaagcagtagcggcggtggtgattcttgaggaagctcgcgtagtaggggttctccatggctggcaaggtagcttgcgcctcttgctatggagagatcgacacagctcgtgtgcgtgtgtggtggcgtgggcgtggtagttggcgaggggttattatagggcgtgtgagtgtgagagggaaggcccccgaaggggattgggaatgagtatatttactatttactgtggaggttaattagctaatgtgtgcatggaggacgtggtacgtacgtacgatgtaccgggagataactcttgttttttcggattactaagatggacgcacgcgcgcgcacaccattatacactctccaagagtcggaaaccaacagcgcatctctgatctcagtaaaaacttgttggaagcccaactgcatgtgcatagttttcttggacatcacgatttaaaccctggtgggtgaaatcatgtgcatacgacttcaacaccagattttctacttcagcaccgcaccagtggtgcttcccctcttggtttttttttctttctcgtaaggagggacatgttctttctgcagagtaaggcttcacaagctcgatgaattttgatcggatttcgggaatttggatcatctcgagttatcatgtttggagtttatggaaattcattcgaaatgtgtcgatttttctagattggcgaaaaatcgatgtctcactgggctcgaatttcactggccaatcaataccttgtgactttatcacttaaattttgtattttatatattcattaaaaggttcatgaatagaatcaaaatatagataagaaatatatgccctctttagggggcttctagcagccatagatactccgagaatctcggctagctccccaaacaatccaaatgtttactcaagattgtgacacttagtaaagctaaaaatccaggaattaattagtgctataagctaggggattatatatacttctctatattctcaccagctcgccagatatattataagaaatgttctttttatgggaaaaaaagatttgtagtcaaatttccattgatcgattcatttttccatatgtccttatttgaaattaacgaaaacccatttattgtgtgtgcccatagttacaagctagtgatggtacatgtactattattatgtgtttggtttataaaattttgatggagaaatcttgtccagatgggttttctttctttcggcccggtactgttgttccttatatatacacattattagcattttgttataggtcaatttgttttgtccggggccacaattcacggattattgatgctgctatttaaagatgagcaatagcttgtgtcaaaagacaactaagaacatcatcaccggtcttgaccaaactacaaacgtgcaactttacgagttcttacattaatttccgaaatattgtaataatggaaaaaagatgttttctgaatcggttaaaaaatgaataaaattaactaaattcaggatgtatgaagcacctagaatatgaatatatatggaatgagggatcctaaaggacaaatataggaatcgagacgagagatccgaggatgatatgggagcctagagaacaaatatatatataggacccaagaggataaatatatatggcactttagaagaaaactaagaggacaaatatgggactttaaagggaaggctcaagggatgaataagaaaatccggaggaagattctaagggcgcaaggccttgttagtagggaaaaatttttgggtttggttgtcacatcgaacatacggacacacatttgaagtattaaacgcagtctaataacaaaacaaattacatattccgccaggaaactacgagacaaatttattaagcctaattaattcgtcattagcaaatgtttactgtagcaccacattatcaaatcatggcgcaattaggcttaaaagattcgtctcgcaatttacacgcaaactgtgtaattgtttttttttgtccacgtataatactccatgcatgtgtccaaacattcgatgtaatgggtgaaaaattttgttttgggaactaaacaaccccctatatgaatgtggctacaaaataacacggatattaattcttacaaattttttttcgatatgcatctttggagcaaaacttttattacatatgtacacttgtcatataaattgaatatatagcaaaattataatctataaaatatttttgtagaggaagattcgcatatactgttcttgaatgactaatctaaacatttaaaatatcccatagtaaaaatgtcaccacatcacattttctgtacattagctatgttttagtgtggaatttgcgcttgtcgttccgaaatgatcacaactttgccctttcgagggaaggtgttgggttcctgtccatcgattcagctagtatcttcttaatggcaacatattcaattttgcttgcttgaaattatgaaatgttatatagcatataattataattaccgtttcaagtaccaaatgttgagaggctgatttaaatattctttccgaacttcaaaactttggatattacaatgcgaaactgccctatataaacacatagtatattgtaagaatatgaaaagggtgtaaaatgtgacatcaatatagtatttgtattttttggagaatccattttgctattgttaattagagtctagacgtcataacactcggtgagaaaaaaaccgaagtatatattgatgccttagacctcttcttgatggcattttccaagtaattgatttcatttactatataaacataatgtaaattctccttttatttttaacatggctcttgatgcagttactagtacttatgttcttaagaggatgatttggttggacattgacacagtctccaatacattttatcattactatatcaaactatataattataaaagataaattatgaaagagtttttcatgacacaagtatgtcaacatttttcatattttgaatcatgatacctttgaattaatctattaataacttaagattttgaggtttgactgcacatattttaggacgtttctaagaacaggacatatataagtaataaacagggaaatatatatatacaaataatgtaaattctccttttgtttttaacatcgcggtgggagatacctgctaattgagggagctgagagtaacctgatcccgcttataaaaagagctagctagactaaaaacaaattaacaattgttagcatgattaaccggcagaatttaaaacattattctcgatggaaatttatttaccttaattaatttggctacggtacgtagagatgtagagagaacatgtagcaagattttagctacggagaatgaatcagcaagggaccaacactgaattaatgtgggtttccgtcttttcgccatctgaaagcaaacggcgtacgtggttcttataccgggaccatttgtgaattgtgatcgtagtaaatatatggtcgacgcgaatgtttcgcactttcgctggccgcaccacagaaatcattggattataaggcacatgcagggatagtgttttttgcttacaaattgagaaaaaataatggaaattaatctttttggccatcaagttgtacaattccaacctgatcgtagacattctttggtacctaagtaggagtaagatatatttacaaaaaaaaactatattccttacgattacacaaccaacactcttaattccaacatgcattgagggcaggtcattactccattttattaagataatgaaaatggactataatgctatgacagattactacatatacatcgcttaaacaaattatagactaacaattcacctattaaagttattcggtggtggtctttattaataggttttctttctctcatccttagcttggagagaggtatatatttccttatatttgatatttacctctttgtgaaaggaggtatcataattaatcttatagattggagttaggataagattgaaacctcatatttatatactcactccgtttcaaaatgaagctatttctaccactcgatctttgattaagctatttcttcacctatctccttctctcaaccgatcacaatcattctctattcaattttttctactttctcttatcatctaatcttaacattccccaaattatttccacctactttcttaataatcgtatctagaattgcttaattgttttagacaaaggcagtatgtttttaatgttttcttctgtttttgagaggtatactacgagtatttgtgttattcatgagaaatataccttcggggtaaagttatataacactgactaggctgtgttcttttggagggattgggaacccttcccctccacacgcaaaacggaacgatagatcaacacatgattaattaagtattaactaataaaaacttgaaaatggattaatatgatttttttaaacaactttcctataaaaactttttgcaaaacacgcaccgtttagtaatttaaaaagcgttcgcgtggaaaacaagggagatgagttgggaactcaagggaatgaactcagcctaagagcaggtgcaatagcagactataagcctgctataaacacatttcgaggaaataagggaggagagataagggctacagatttgtagccagctgcagcacggactctaagatacatgtgtgtattggtgggacaaactataaatcatgtaatatatgtttataggtaactattatattaatcggctattaaattgactatagataatttggagctagtagttggctatactattaaacttgctctaacactggtttatctatacctctttatacctctcggaacaataattaaagtctcgtcattgtcaattgtagacttgtcttataattagttcaaccagtttatattttttttaccctcttaaacaataagatggttgcaccgttgcactacagatttcatttatatatagcctaattacctctgcccaattgtctgtaagatccagaatcatatatgattggccttttctggccacaactatgcatacatttaacacctgaaaagaagaataaatttaaaggccattattaattacacgtggaataggatatattcaaaccagcattcaaggagcgaacagtattactatagatataggcggccttaccagcaagttactgttcaattagctagtggcccgtgcaattcctgtagatgatcgatgtgagattgcgagtgagtgctaatcccaagccagtcaataaatcggggagcatggacagatccagtaccattcatgttcaataattatacatgcattgattggaaattagaggaattaatcttaattattgttcaggctaacctgaactcaattaattagcatagctaactattgagcagtacaataatactaataacaaaagatgctcacttggaaacttgccagtatatagaacaaacagaaacttgatagaactaatatagttaattaatgaaataatttcaaattaatcgggaaaaatcattagctcaagagtcaaaacctagttgttgctgaggaccaccactgattatattgactagtcaacccattccgtgttagtcttcctctagaaatagctccattaatatattacacttgccatacaatgttattattattgttacatttcaaatatacaaatatgttccatcctaaatataaggcacaacaattattaattatttatctagatcactctagtaaatacaatccaggtacccaatgggcttagagattttaagggtgccgaatttaaaaaataaaataaaaggagggagatgttctagctaattgcatgcatgcaatgcgccccttgtaatgaaaatggttacactttttattttaggatggagtagtattgtgtaagcgtacatagtattacctccctcccgaaataattgtattataaaaaaatagatatattagtacatataaataaccacagtaaccctacatgcatataataaaaaaaaaggtcgaggcagatgcgaatggaaagatgagaaggtagaaggcgggatacctccatctaaccaattggacgtgtttcaacttattataaatatatatttttagacagaattaatttgatagttaattacagatctactgtattaggatggacataattgcgccttgtatgactcgtccagttaattcgaatagctgtatataaacagctcacaaagacttaaatacattgtccacgcgattagctatctgtcatatagtatagtggtttctcatattctgccataatgaagtaacttattgcatgcatgtactttatagccaccctgcttgaacatttgatcatcgagatcacaagcaaataattggttaagagattattattgcattgggctatataattaagaagctatagacagatcgaattgtcggggaaggagcattgaaacccggtgcccacacacagtgtgtgcataggtggcctagctcgacggctagccgtctactgttccaattaattaggcagctggtgcgatctctgtacatagccggtggggatttaagaggtaattgatctgatccatgcagctagcctgaggaaacacatgcgtcttaatacatttgtgtgccgggtccactggaccaaaacgagatgccgccgtgtgttatcaattgggtttgggcattcattcatacgctatgcacacattgcaccacctgcgactgcgacctcttcgaattttgccggtatatatgttttttcttcaatttttgagaaggaaaaagtccaggagaaggtggttatattgctctgagtaattttcttgagcttttatcaacctaaaattgtagtgctccctctataggttctggacaacatcagctgtattttctttgttagcctagcgacggctagttcagtgctaaccttctcctaggtatttgcgttggtgttgtttgtgtttttttttggggggggggggggggtgggtgggttattttttcttcgtttttctggttgcgaccttctaaggttgtaatcgtgtaattttttttcctgctctatcaatataaactttacaatgtctggtttgagtcgttcaaaaaaaattgtagcgctccctgtagccaaatatttttgatatggagagaactaaattctattctcccaacgttaaataaattagcccagaagtagctagaactgctgtatggccaacaagataagttttagtagtaattagagcccaccgatgggcgatggtctgtatcgcagtgacttaaaaacgatatggagccactaaatttctgacagacaacatgtttgtaaagaaggaattgttgtgggttgataggtcgccaaacagttatagtgatatatagtttgtcagtataatagattttctctgaccaatgacatatggtaattcttggtcatggtgtagtgtttgaactctgtatttgtacggtcttacataatttgtattagcaatagggttattatcacttttcttatgtagtactattatggagtacgtcctattccacaaacataattattagctaccctcttcttcaaaaagttgaaatgagacagtctgccttaagtatatatatttattttgatttaagcatggcatccaatgggcatgctccatgcaatgcattaggtttgagaggtagaagatcccagcagacagagtgggttcaaggtataagcaataaaggacccaacagtggtggcattgaattggaaatagtggccagagaacaaggggtgtggtggtgtgatgcgtacaatagtaatgtggttgcacggtagggcaaatgggtgtgtgcatttaatcaaaggacatggaaaaggagaggggagaccatcgatcacaatccccttccccggccgtcgcgatccaggcaaatttcttctccgtttctctccggccttttctccctttttttctgcatggtagctaccaatacctgcctgcaaatcggtttctcatgtgaattgaatcaattggattatcatcggttgccctagccttgagggttatctggaggtttgtgctttgcactagccaggcatgccgatatatacaaatcttgtcggtgttgagacagcttcatatatggtctaactgtagaattcgctggcatgcatgcagggagatgatatttttagggttaatttggtgatggccgactagatagaaatcgacgtatttgacgtgacatgtagtctaaggcttcattcgcgtgtgtggtttggttgaaatttttggtgacacgcaaaatgagaaaggacattgttgtatgattaattaagtgttcactgttataaacttgaaaatagatttattttttaaaaaacagtttttacataaaagttttttttacccaaaatatgttatttaatagtttaggaattagctagcgcactcacaataaacaagaaaaaaaatgagaaagtaatccagccaggaagtttagaatccggccttagctagctagaatgaacatatcacgaacgagttcaggggcaaaacgccacatcaagcacgtaaaacatgcttccttgcaagttgcaacattccaagaggataaaaaaactcgtttaatttactgcatgtgccagaattggaggatgggaaattgaccccttttaagctagtagccgccatgatctattcacggtttttactttcttccaggaccattcaattcccttttctacgtttgctggagatcgttgatatctgaatttttaaggtgaggggcaattaatttacagttcgcaatacctatttagatgtgactaaaactttaagaaactatcacatcggatgtttggacactaattataaatattaaacgtagactattaataaaacacatccataatcttggactaatacgcgagacgaatctattgagcctaattaatctatgattagcctatgtgatgctacagtaaacattttttaattatggattagttaggcttaaaaaatttatctcgcgaattagcttttatttatgtaattagttttgtaagtagtttatatttaatactctaaattagtgtctaaatatagggactaaagttaaaattagtgtctaaatatagggactaaagttaagtccatatatctagacacccctgtgcatttgatactttgactgatgagtagatgagtctgccggcagaagggcacatcagaggaacatgctctccaggagcattccggaaagagaaaggattactcctattactgtactgtggcaaaagtatacttcagtgctttaatagttagccgccaccatctattcacggttttcccccttattccaggagtatttccttcgaagtttttagtagttagagtatcatattcatcgtgaagtgtggatgatacagatgcagaactatgtattctttcagtattaaaagatatcaacctgaacttgctaaccaatgataatcaaagcatggtcctcgctttgatgtaatccaatttgattgtaaatgctcctctttgttcccatgccatgttaaatttatttatttttactctggatctctatttttacatggacttaaaaataattatattcattcatcagtagtaacttccgaataataaaaataattgttcccttaacatgttaaatttatttaaaggtggattttgttttataaaggattgtgaattatgtcctctattacttaatagcacacttgttttgtcctcccctcacatgcagcgtgcactcgcataacaaaagaaaattcctagataaaaaacggttgtttactatttaaaagtggagtcgttggttccttcctcccctatttcccctcgtgcgcaacacactctctcgcataataaaagaaaattcccagataaaaaaggttggttaacaacaaaaaatgtgatttaggttcgatccgcacctagatcattcctaatggtataggtcagttgcaatgtatgaacatattactagtatatgtaaaaatgtatctccgctatttttcttcttttttcttatgatggttctctagttctttcagcacttgtttttacaattaaatatcaattgctagctaacttaagatacataattaagattcaaaaatatctaataaattcgatatctagagttagaatagctgctctacatctaacagaatgatgaaaaaaaataaataatctaggcaataatcttcaagccgcaagttctgtataattctgatactaacaccaaacttgcccaatacatatatgtagtcagcaataatcatgcctcttccccttttcttttacttttaagtaaacaagtgtattcatggatggcacgatgcacagtcactccgtccggacgcagcgaacagtaggaggagcacaatccgatcgaaatgaacaaacataccccctcgataaacaacaatcctattccattattgcccatgccattgcccataacggcttcggcttccatccagcagcgagctagcacggcatgtgatgcatgcctgcacatgctcctctcgatctgctctatatgcctcctctatcacatctgtcagttactcgccatagtctgcatcaccgatcgagtctgcagctgcatgcttctactcgtgacaccccccccccccccaacccccaaagaaaacgggtaataattagctcgttcttcctctgttacaaaataaaacaactttttttatataaattttaacataggtgaaggagcagtacttcgaccacgatagctgaaacaccttagcacgtcgaggaaatcaagcgtacacaccggccggtacacagatccaccgatggatggatcggtgaggaaatgaagcatgcagcagcagcagcatctgctgactgcaatggccatggccgatggctctgcatgtcctgtgccctacaacaccctgcatctgcatgctagctagctgcacgcgcgtcgttgcgtgcacacacacgctatgaatgcgttggtgcatggcgtgttaattttatccggagtccccacagacgacagacacatcaattatataggatctacagtgtatcaatcgatcgatcagcagacaaaaggaacaaattaagtacgcgggggagagagtaggtggctagagaggggcttcgccttcgctcctccccttcgcatgtagtatacgtacacacatgccgtctcgcctcctcaattatgagctgaggcgtgtacgtgcgtactctgctgtttgctgtggactctgtacgtggtggaaggcccacagacaagctcggcaaccaattaacgtttacatgtacgtatctatagttgatcagtccagatctccatgtcgatctggaagatataattagccctggttttgttcctaaattttttttccaaaaaaatcacatcgaatctttaaacacatatatataacattaaatatagattaaaaaactaattacacagtttgtatggaaatcgcgagacaaatcttttaagcctaattagttcattattagctataagtgttacaataacccacatgtgctaatgacggcttaattaggctcaaaagattcgtcaagcggtttcaaagcgagttatgaaattagtttttccattcgtatccgaaaaccccttccgatatccgatcaaacatccgatgtgacacccaaaaattttcttttcgcgaactaaacagggccttagttgagtagtttgcataggtgttcagcgatgtggagattatgggtaccccatatccacacgacatggttatcctactaattttaggggataacttatatctatgaaatatgtaacggatcatgacttgagtattacgttttcttgtatattacggaacggcctaaagttttggtttggtaatagatttaggaaaccgataccatattggttacattttttatcttgtaatcctaccccccattctatataagacgggcaggaggccctctagggcaagatgattcacaactgatcatcagatcaatactacacctggcggattcaaatccctaaacaggagtagggtattacctctcattgagagggcctgaacctgtctaaatccttatctccgcatccatccacttttaggtctcatgcactacccctttatattgtcgaaatcttgttttgacaagcgagacgaagaaggagaagacacaattatctgagcaagtattaaaaagttgccgcaagttttttgattatataaaatatttttaaatataactatagtataattaaagtgtagttatattctaactgtattgtaactacttttttttatactagaagaacatgagttccccgtatccattgaaagaaatgcagagtttacaattgtattataactatagtataaatgcattgaaactacgctctaactacattgtaactacgatctatactcaactatgtgtcgaaacatgaattcggcaataataaaagggggtagcgtacgagacttaaaagtggatggatgcagagacaaaggatttagacaggttcaggccctctcaatgagaggtaataccctacttctatttggggatttgaatccgctgggtgaattatagatctgacgatctagttgtctcatgccccctagagggcctcctgctcaccttatataggatggggggcaggattacaagatagaaaccttatccaatacggtatcggtttcctaaatctactttacaatcttatcaaaccaggactttaggccgttccgtaatatacaaggaaacgtaatacccaagtcataatctgttacatattccatatatataagttatcccctataactagtcggataaccatgccgtgtgggtatggggtacccataatctccacagtagcccctgagaccttcacaatcgaaaagataatcttctctcgaactagattactccaaagccgagtgcttcaatcatctttgccatggtctcccgagtacttttaccaaatctgaagactgttaagggctgaaaaataaagtcaggtgcatcgactagatgcacctaataggtgtagccctcgactatgtggttaattgaacaaaccaagcatatagtcaagtaataaataatccaaccaaccgagtggcttcgataattatagtcaaccaagcgacttgatattaatatgtagcatatgcggtgtgaatccctgaataacatgatccgagtgatataccgactgttttgtaaaatatgatgagtgtaacctaaagttggctacatcattgaaaattcacatagcaaaacagctataaagaagcttatatgttgtgaataaagaaatttccaaagtattgggcatacgccatgtgcacactgctttaacagatgtgcttaagtccctagaagacacatggttccaccacacctggaaatatatggcatatgtggtataaaatccgagtaaataaactcataaaggatttaccaaccgcctggaaaatgaccaaaatatataatcagcctaagccataatattggtcaataaaagtgcacacttacgtggcaaaaagcaatgatattgtatccaatcaattgctttatgaacccaaacaacaccttgacttatataaaaaagtcagtggggagctatataaagcattactgtttggcaccttttaaaatgcattgtaccaactcctaaaaaattgagtaactgcggtataaaaggattttaaggtattgggcacataatcacgcgcacttttgcctaagcaaaaagatgcctaagtccctaaaagaacgtgacaggccacacctgaaaatatgggctgcagacatattaggtctaggccaaaaaatatgccttcgacaccctttaaaggatgacgcatgtaacatgctcctgagtaataaatctttcgggtgatatagaccaagtgtaactcatatgaatagcttctgatctgagtgattatcctttatgggatactccaaaatagatataacaattgaattccgactagcgcaagtattcggttgataacccttacggggaataataaatagtccagtctttgagcatagaaaatagacccatgatcatcaaattcatgttgcatgtatccggaacaagtccaaattgaaggtatgatacttgtgtttgaggtagtaagcccctgagtatatagcttgtccttctgtcgtagtcacaattgtccattgatggtagctgacgcggttggcatagagacaagacgaccaatatagagataatattgcccaccagaggtggcaaaaatattggtagtagtgaagatagtgataccaatcaaaagtgatgaagttgcatagccgtggaggcgaagaaaccagtcggcaacagtcaggtcagccagcaatgaatatgaaggcgcccagcgataaagttgtgtagccatggcagcgaaataatcagtcggtgacagacgatgcagctggtgaagaagatgaagatgcccattagtggcgacataataagccatccatgaaggcgaggataccggtcggtggtgacgaaagcaagccgatggtgaagatgtagacacgcatcaaaggcgatgacgaaatccaccaatcatgaagatgaagaaaatagtcggcgacgacaaatgcaaccgatagtaatgatgataagtagcaatcatagatgatcaaatataatgacgaagttgcccatcaatagcagtagagtgggctatgttgaagaggcttgacaggatgttgatgaagataacgatgtcggtgatccagtcgatagcaaccgtgaaagtgaaataataagtcggcgaagacatagttatccattagcaacagagttgatgtcagggccgatgaagcagaggtgttggtgatgatgtcagtgacaataatccatcaaattgatgttatagctgttgcagatgcttcacttgaaggaaagtagatgatgttgtccaactcgtcgaaactgagctgattggttgataactctgctctaaagcaaagacgaagataatgactcctggaattgacttgttggctgattaattgattgcttcagcttgtcgaattttgagagtcttgtatttgtgtagcccccgactctttggttagttgggaaacaactgaacatagagtcgagaactgtaacttcttgtcgtcgagtagtcattgcttgagtgaagataaatattgaagattggaacaccacttgttgtaataaaataacacggcatcatatttggtgacgtatgccaaggtgttgaaactcttgtagtcgtcatggttggtgaagtagcaaagcttgcgaagtagaggcaatagagtttgccgatgccgaagataataaaaatgaagttgctccaccatagtgacaaagttgcatagccgtgatgaagtgaacatgagttggcggcaacagaagcaaaccggtagtgaagacgcgcaattgtgaagataaaagcaccagtcggcggcgacataaccagtcgacgacggaagacgatgatgtccatcagtagtggtagctgtataaaccagacgtagaagcgagggcactagtcagcagcagacgagacgaccggcgatgaagacgataaggccaatcaacactagcagaatcatgcagccatggaagtgaagaaaccagtcggcagcagacgtaggcagcttgtgttgaagatgctgatgcctattagcggtgacggcgatgtagccagccgtgaagaagatagcatcagttagcgtcataacaggccagccgtgcaggcggtgacaccagtcggcgacggatgaggcagccggtcggtgaagcggccggtcggtgaagacgtagatgcccaacaaaggcggcataataggccagccgtgcaggcggaaacaccagtcggcggcggacgaggcgaccggtcggtgaagacgtagacgcccaacaacggcggtaataagccagccgtgtaggcgaaaacaccagtcggcggcggacgacgcggccgatcggtgaagacgtagacgcccaatagcggcggcataataggccagccgtgcaggcggaaacaccagttggtggtgcacggcggaaacaccagtcggcggcggacgaggcggccggtcggtgaagacgtagacgcccaacaacgatgacataataggctagccgtgcaagcggaaacaccagtcggcggtggacgaggcggccggtcggtgaagacgtagacgcccaacaacggtggcataaaaggccagccgtgcaggcgaaaacaccagtcggcggcgaaggaggcggccggtcggtaaagacgtagacgcccaacaacagcggcataataagccagccatgcaggcggaaacaccagtcggcggtggacgaggcggccggtcggtgaagacgtagacgcgcaacaacggtgacataataggcctgccgtgcaggcggaaacaccagctggcggcggatgaggcggccgatcggtgaagacgtagacgcccaacaacggtgacataataggccagccgtgcaggcggaaacaccagttggcacaagccggtggtgatgttctgactgatccattcctggagcgtaagagataagcttaaagccatgaatcccttttatacatatctggatctggatcctgcagaacaaacatataggatgagtagtatctgatataaatataatactcgagaaaaattcaagtattttaaaatatttataaatatgtatttcttctcttgtcaattttgatttccccgagcaaatgactcattacgtttaaacactctgcccgactagtcatagccaccaagcaccgggagtcggcctaagcacttcccaaacatgcatatgagtgacatgagttcgtcattaatggaacaaagtttcacgggtcggagtttactactcgggtacttttgcaattattaagagcagaaaataaattatcttatctctatacttttgatttattccgaataatacttagcaccttgcattattcggtccatccaacaagcccccgggtgctaggaatcggcccaaaggcaactatccattggcaaaccaaacggaaagcataggaagatggaactccataactcgataggcacttttgtactcagaatatgtcgcaagcaatcaagataaatattatgaaaattgtttaaaaaatatgatataacatctgtagcccccgactcactagtcaacggcgaaccagttgatgtagtgaggcaaaggaaaaggcaaaatatcatataaagaataaaaataaatgatgacttagctttgtcgtatttcctcggtgacagcaaaagtagccgatgtgggaacgaagcagtccatcaatggtgacaaaaacaccagtcggcgccagtggaaccaagccagtggtgtagatgatggagcccattaatggcggcgaagtccgccaaccgtataggcgaaaacaccagtaagtggcggcagaggcaggccggcggtataataggctagctgtgcaggcggaaacactagtcggcagcggtgaaggccagccggtcggtgaagacgtagacgcccatgtacggtggtgtgaccaaccaaccgtataggcgaggacaccagtcgacggacacccaacaacggcagcatataataggccagccgtgcaggcggaaacaccagtcagcggcgacgaaggcaagccggttggtgaagatgtggatgcccaacaacggcggcatagtaggccaaccgtgtaggcggagacaccagtcggcggcggcgaaggcaggccggcggtgaagtcgtagatgcccaacagcggcggcataataggccagccgtgcaggcggagacactagtcggcggcgacgaaggcaagccggtcggtgaagacgtggatgcccaacaacggcggcataataggccagccgtgtaggcggagacaccagtcagcggcggcgaaggcaggccggcggtgaagtcgtagatgcccaacagcggcggcataataggccagccgtgcaggcggtgacaccagtcggcggcaacgaaggcaagccggtcggtgaagacgtagacgcccaacaacgacggcgtgaccaaccaaccgtataggcgaggctgatttgcatgtagattcgtctctctgattttgttgacattatgggcttggtgcagctaaccggccttagaggttgcgtgtggcatgagcaaacgctacatcggtagtcgagccacgcactatgtcctggtgtacccctctcggcaacatggtagcagtgggaagcattgcaccgacggccgtacatgcaataaaaaatcatgagaagattagtatacgttagtaattaatctaaatatataaattacaaggaggttaggaaccggcagcacagccaaatcccatcactcattaaggaacgattttttgatctcgattgccatcctgtgcatgcgaccaaccatcgctccagtatacatgcaaaacaaacagatatagtttgattagccttaaaatattacacgcttaattgtgtaatgcatatatcaagctagggtttgatattaacccgtgcatatcagttgatcaacacatgcacgtgaagcactcagtcgctgttgatcccatggacatgaattgtccccgtgtcgtatgaaggttacgccggcacctgtacagatcgtaccaggcgacgagcagacacaccgggacttcgtctcgatctcagccggtgcgtgaaaacaagaaaaagaaaagtaatagaagattagtctgcagttagagaatgatctaactagtgaaaacgacaaagccaatgatattaattggagatcgaatcgatgaaattgccgagattgatcccttcgactggattgaatccgagacgaaaaagacatgcttgatgaatccggcgatgtcggagattggttccatcacacttgtgataggaaactcgacgaacccctacctggcgcgccaactgtcgaaacatgaattcggcaataataaaagggggtagcgcacgagacctaaaagtggatggatgcagagacaaaggatttagacaggttcaggccctctcaatgagaggtaataccctactcctgtttggggatttgaatccgccaggtgaattatagatctgacgatctagttgtctcatgccccctagagggcctcctgcccaccttatataggatgggtggcaggattacaagatagaaaccttattcaatacggtattggtttcctaaatctactttacaatcttatcaaaccagggctttaggccgttccgtaatatacaaggaaacgtaatacccaagtcataatctgttacatattccatatatataagttatccactataactagtcggataaccatgccgtgtgggtatggggtacccataatctccacactatggtttggttgtctagcacagagattgatgtgatattcacaaggggtttttttttacatatatatatatatatatatgccttgggctaggtatttttgaaggctcaatatttttgtagtcaatagaaagaggcagtcctcacgccctcttattgggaggggaaaaaagtactaattccatgtctgcgcgtttgggctcgcatcgcaggcatgcaggaatcagccggtcgtccgtcgtctcggcgagaagagcggatcgctgctctgcatgccgttgctcttatgatctgctcgatcaccagagggcagaagccatgcatgatactgtacaacgcctgctagcttagctgccggcctgccgcatgcagcattgccgccccaagaaacaccggaaaacacatagccagaccaccaaaaacgttcgtgacattccgccgcgggcatcgcggcggtgcgcggcaggcatatgcagccggggcatcatggggcatggggccgcgcgggccggcatatctcctcgccccgaaccatccgcgccgcgcgggcaattactcggttcatttttgccacgatccgcgcgcgcatcggtcggcatgggccgcgcgcgcggcgcgcgcaagcggcaacacggcaacgccgcccaccatgtcaagttggccgctcgcccgctcgacctcacgcgtatgcttcggcgcaacatgtccaattgtccgtgtacccgtcgtgtctgcttcctgatcgttacggcgtgcagcgggcgccggtcgatcaagtcgagattcgcggttgagtccgtgccgttgatctgtgttttcggtagagcacggtggtatccatgggaagaggaggaatcacgttgtacttgagtggccagattgcttgacatggtttgggccttttaagctggttgtgcttaggtaggacctctgggctgaaagggaggtgtaactaaacgggcttgcccgtggcaccaaccccacgtttttggagtcttggacttttgtttggcttgggctgagtggacgcgggatgcacgtgggctgcctctcgcaattgacctccgccagctgcgacgccacctacggaggcgcttccaccttgcagcgaagagtgtaagtggatcgatccacgaaaccattaaataaggctcggtttgattcagcttaagattattataatctaaattattaggagtaagctggaacaaacaagtagattattatgctagattattataatatataagtcagattactataatccaataatctcctttagaggagctttttccagattattgagtggctaaagacccattacccttagatgcctctaataatccaaataaacaaacaactcgtagcttatttttatgtcagcttattataatacagcttagagtaatctgatttaataatctagattacaataatcttaagctgaaacagacaggacctaagtggataaatcattaagtggattcgtggatcagctcgtttgcttgtggcattccatgtagactgagaatagagaggcagtggcggagccactttacgggcaggttgggtgaccgctcggactctatcgtcatcgtcttcattgtcaatagctgccaaaacatataaaaattaatcgatcacgggaaacactaacagtcgcctgaacttgacgacgctacatataaaaattaatcaatcacggaaacactaatagtcacctgaacttgacgacgccgctgactccgtcactgggcccatcgatgcttgtcaatgacctgtgactccaacctccgactcacaaccacaagttccccgatcagaaccgggacaagagggggacaagaggcataggggatggacttagacagcagcgcgagtaacaggagcaacgaccagaaaagcccgtgcttgattattttgagcacatgcttcttcagtaaagaggaatcagacgattcaagtggaatttttttgtaacgtatcaataagatagagctatgctgcgggttgtctcaggtcctaaataaacgcggacacttaaaaaatctgttgggtaggcggattcgcatctcttacaacccacacaatcttcggttcttggtgcggaagcaatttgcttggctttacatccatcccaaggtatcatttgtaatacatttattggacaagctcgtgcacattgagtgcatcctatacatgtatcataaatttttacggaatgtgacattagatctataattttttcctttcaacataaagattttcgacctggtcataatgaaattagttttcgttttttttataaggagtgtgggggtagtcatggccatctaggcgtgtaggatagcgttgttgtgggtgatgggctgattggggcaagggctcacgggtagagtttacaaaaccgtacgtgcggttatcatttgcgataaccttttcagtttttaaaaccacggaataactcgtggtacctgcgcggttcagctggctcgctagcttgtggactagcctgagttagcttatcttaataacgagctaaaatgctatcttggctcattacaagatggaaatgagtcgacttgagtcgagcaaactaaccaaacacgaatttttgcccggccatatgtgcaggtcatattttatccaggcacttagcattgtctagatcctcttggagattctgcagctaagagatgaaggttcgtctccactacgacacaatgacacataacttatgactctgaagtctggagcatgattcttgtgggagatgataaatcacttattcatgcgttcaaaatgacatcctcaatagcgtgatgacaaagaagtacctttttttttctttataatgggcagagaagtacttgatcctagaaaggcaaaagcacatgtaggtgggtaaagtacaaatattctaacaattgagaatttgtaagtagaggctctaatatactgtcctacttggaatatgatacagagaaaatatcacaaattttttataggagtagctagctggatgataaggtccattgcatcattccaattgtggcaatgttgaaatgactaggcaactggtcaattataaagggatagtttaggactttctgcaacttgcccctcattatgcagttgtttatagaatgagcaattatactgtctgctaagctctatcccaatttccctgttctgctctcctacttttgtaaccgaaaccaattttcccttgttatttaagttattcttcagacgactcacgtgtagatcaaaatgtcaacatggggctacgatgtcgaaagatatattaacatggaacaactcaatacaaatacaacctatattgactcaaagaatatgaccccatgtttttcatgaggcaagacaatgggattgactacacgctgtacaacaatacaacctatgcaacttactactatattatccacgtaataacctacagcctacaaattgaaatattcaaaaaacatccaattgaactttgactaaagtttctatagcttctgatccatgccaaaaacgacggatcctgcatgacatcaagaaaacaaatcagtaagttttttccttcgcgaaaacgcaaaaggattgtacgtcaatcagtaagttaaaagtatgatacggcaagtattttcactgtctgaattctcggttgtgtagagactagagagttgtcacttgtcagttaatttacctaacgttggcagtaggatggtgagagctgcaaccccgacaattttcaggggcgttccggcgatcaccatgtccttgatgctgatgtagcccgtgctgaagccgacgacgttgcccggcgagccggtgggcagcaggtaggacagctgcgcgccgacggcgccggggaccatgaggaggagcgggtgcacgccgatggacttgcccagctcggcgagcagcgggagcaccagcgtggcggtcgcgtcgtcggaggtgaactcggtgatggcgccgctgaagacgcacgccacgggcgcgatggccagcgccggcgcgccgcggaggaagccgagcccctcggagaggatgtcggtcaggccgctcgccctgaagccgtcggcgatggcgaagccggcgccgaggaggaggatgatgttccactgcagcctccggcacttgccccagtccatgagcttctcgccgtcgttcttgccgctcgggattatgaacagcagcgtcgccatcatgatctgcattgcgagccaagttgttgtcccgtgagatcatgtgacaaatcgtctctgagaaaacaaatcagaatttgttcgatccttggtgcgcttacagtgacagttccatccccaacttcgccgtggaagagtgatccccacccaggaatatcatctgtcaggctcctcgtcatccataggacaatcaaaccctgcaagaatcaattatggatacattaaaattttgtcacactataacgaacccctccatgatcgcgtcataataacgaacctgcacaaaattagttgagaagggcccaccagtgatgatgtggcaaattttaaaattttgggaactaaaatttcaggcatctcttggagaagggggtgttttataggccaaattagtttttggctgtccccaatataggatttttggggctttaattttagccctttgttggagatgctctaaccgaacactgtttccaggttgagataattgctataaccccagaaatggaaacggaacttaccccaaaaacggctagaaccatcttctctgcaaaagccataggacctgtcacaaatcaagatggacaaccgaatcagaatccattatggcaataattatcatggcactgatatttcaatgagtgccactgttatggagaaaaagaccaaaacgaggtccatttcagagttacccaggtttcaggaaatattggccgagaagctgtcagagtttcagagataaccccagaataacattgaccacgccattgatgagcactggccattgccgtgaagtaacaaacaaacagagcaagaacgagaacctaccaagcaagctgagctccctcctgagatggctcctgtccaggtaagctgagagcgccctcccggtgttcttggagcagtacaggacgcagagcgtggcccagagcgcgacgaagaggacgagcgccaatgggagcccgaacgacatccacgagctgaaggtgatgggcggctgctccgggaagtaggtggaccacatccccaccaggatgatgttcacgccggtgcccgtcagcgtcgccatcccgccgatcgccgacgcgtacacgacgccgagcaccaccgccttggagaaccgctgcacctcccgcgcgtccgcggcgctgctcgccgaggacgacgccccgtcgacgcgcgggaaccgctgcaggatccccgtcgccaccggcatcatcatcacggtgcacggtgtgttgtggatccacatgctgatgaacatggtggtgccgcagattcccagcagcagcagcggcggcttcaccgggtcgccgcagaacagcgacgtgatctgcaacaaagttcgcgggttttccttggattgttagttgcacggttcggacgaacgggcttggtaaagacgggctcgcggcgcggatcacgtacgttgagagcgaggcggcggtggatgttgtagtgctcgatggcgagcgcgaggatgaagctgccgaggacgagggagatgacgtcgtccatgtaggccttggcgacggcgtcggaggaggagatgccgaacacggggaagaggaacagcggcgccatggacgcgacggcgagcggcacggcgtcggtaatccaccacaggaacacccaggcgagcaccccgagcatgttgcgcgcggcgcggtggccgccgaggtcgacgaggccgcagatcagcgcgcacgccacggggcccgacgcgaccgccaggtacttgttggcgagcagcgacctcagcgcggcgcaggagcgccggcccgccgcgccgtcgtcgtcgtgcagcgggagcagcggcctcgtcacgtcctccgacgagctctcccagtggctgcgcctcggatccatggccggttacaaatttaacaaaaatcgttacgcgattcgcctcttccgcccgccgcgttcgacgacgactgattggttttgcgttctcgtcttctccagctgcagcgtcccaaaaagcttggcgcttttatagccggcgcgggaacagaaacagagaaactgtttgtaaaactgaaaagtacttgttgcgaacttgcggttatcaggttgtgatcaaatgatcatcgatcattcgtggcgcgtcgaatcaaggcgccacgtcagatattatttaaccaggaaaagccaaattagtaacatggaaatttttcatggctatccaacgaccagtagggagcattaatgaccttttttaattaacaagtcagcatccagataagcacggtcagcagtacaaacccgcggataagactccagccatcgactgctgatgtgtcctccgccatgctcgtgcccccatcttgaaccagcccttgagtggacgaagagctggccgaccgcggttggttggtcggacggagacggggcgacccgccgacgcacgcacggccgtctcacggcgtcgagcagctgcaattgatcacgtactactacggcgcccgggtcttatccggacatgtcgacacgatccatcggctcagacgacacggacgcttccttgcactcgctctcgcggaatcatctctagctgctgctatccacgcacgtcttgacgtgggcacacggccgcccacgccgcgcggtggcgcgcgggcgatctgcatcggcggcaccgagtgtacgagcgcgagcaacggaacagcgttggtttggttggcagcggcatgtgcacgcgtcgcggtcgcggtcgcgagggggtggcgcctccctgagatgcacccgcgcgcgcttgcggcggcgtttaatcgttttgtgtttctcgcgtgctcgcgcggcggttacaaataatttccacggttcggggggctcgaaagcgatcgatcgatctcctccgctactacgatcgatcgagcattatttgttgggcggctggtggatgcattcgcggcaagatgcacctgcacatgaggagggaggggggatcgcggcgtgtcgtggcccggaagcccaccgaagcagcaggggacgtatctctttcccgatcggtgcaggctgtctcgctataatttgttttgggtccattgcttcgttccgttacttcccctggtcgtagtagatggataatgtcatcaggtacgtacgtgtctgccatcgaacaacttactctggctggggatgagatacggatcctgttgttgcgtgagggatctcgagttacgctcctacaagcgagaggcaaatggtcactgcttactggctaaagcagtttaagcgaaaaaaaaggtctaattactggctgagagggagaaccgggaatattgactcctgctgattcatatcgtcatatcgagctcgagtcatgtagctagccgtacacgttataagcttgacttgttcagtactactctattcgcacacataaattcaggcacatgcatgcacacggctagctcacattcttctgtcgcattcctagctgcttccgtagcgcatgacgtcaaacctatagcagccgggtccggcgccgtctattgcttctctctgttcgcaatttcgcaggcgattcgatccaaaagttggttccaaccgagtcgaaacagggacagaaggtaccaaatcttccttttaacaacacgacctgtctgctaaatgaatattcggcctcaatgattgaatgtcgatctgcctctggcttgcaatcgtgtcgaaaccaacacttcgaaaataacgtctcgtggccgcgtagccgctagcttagcttgggatcgatgacgacacagagtggaacacgcgaagatttacacgaaaggcgcgcctgcctcgcattacacgtaagtagacgggacgccacacgtagacacaatcatcgttagtccgattacgcgaggacaggacacgagtaccgagtatacgtatataggagtacgacgtacgtaggtctcgattgatcggtcggcggcgacaatcatcatccagggcagccgcgatcggtggacgacgagtccgaatcgcatttctgtgcgcgcgccccggatgcggcctgcccggggtcgcgccgcgcgccgtgcacacgcgcgcgtaaaccgtttgatgatcgctgcctgcgagcaatcgagcaggagatgagcaggtttgctacgggagcgatagctcgagattccaaccaaatttcgggcgaaatcgcggctgccacgtgacgtgactagctaaggcgaggtttgcgataggatgagcacgagatcagccgatcgaccgtttcacggtaacgggtttattaaccggtgactagtcttttctcgtacgtgtgtgtggtcttcagattccgtgttagaaatcacatactatgttgcttatgtttggtgacggcctgactgaccaatgatcacaaccacacgttttttatttctgtattttcaatgtctgtcatgatcaaaccccttccgtgtggaaattctgtgtcttgtactcttgtttgttctagagaaaaagaaaaaaaaaactttgtgagctagaaccgagagagagagagagaggaagatcagaagttcagaacatcttatcggagcgtcttcatttcattggattgtgttaggccgaatcagtaaaggcccaatccgtcaccaggttggatttgtgaggttttccatacctgaagccgaaaaggaccaattagactcagttcaaaggaaaaagtttactttaagtctctcaatttgtcacacaagtttgaaatttggacagtgattttggctgacgtggcgcctatgtgaatggtttaacttgttcattgtcccacttgacgttgacgtggcactacaattgagattaaaaaattaaaataaaatatatgggcccaaaagccagtcaaataaaacaaaatttataatgggacccagatgtcggtgggtcccacttcctccaccttgcccctctctcctctccatcccctcctcctccctttgcttccaaattccaagtgagtgtgcggcgacggcggccggcatgcaaggcagcagcggcaaatgaggtgagtcccgtcaaacatcctttacatggaccaaaataaacaacccatataaggcccatattacacgtcgatgatgtattctgtttctcaggcccaacaaaggacagtcttggacgtcgtaattttttttttccaaacgaaccgcatagggaagtttcgggcgttataataattttccaaacgagccgcataagagagtacgatattttatatatattgatagagtaagaaaaaattataaaaccatagcccaaacgaactacactctacgcgcctacatcgcaaactgtcggagcaaggaactcctctagtgggaaggctagacacccttccttgagagttcggccagagtgcaagcatccgtgctcatgcttaggtcgtgcgagagtacatggacacatgatttatacaggttcggatcgctgggaagcataatactctactcctatggttctaggactatatgatggagtttacaatgagttattggtgttgttttaagtgggagagtatcaacccttcttcactataatgtggctagaatctaacttaatcagaatgaatcaaactgattgaaccggaattagaaaaaaaaattctcaatggcatggatcctcctttcatacatcaaggggattttacatcgtccatgcatacaataaaaaacggaccccaactccgcaggagatggtaagcttagtcttgtcgctgtccctccaagcaagctaaccggatgtaacatgttcacctatcatctatgtaacatcctggtccaattagaatttatcttgtgtgacccatgagagctgtgtgcgcatgtttagtaccaccttactggtttagcaagggtggaaccaacttataaggcttcttccctccaaccatacaactctcgggttaacccttttacacgaatcgagtatgaaagtgtaagtgggcccacacgtcagatgggctggttacgcggttctagagagagtgttgttacaacctaacaagtggagcagggtagatgaagtcttcgtcccaactgccaatgggccctctcgttagccactaaggctgataaagggtgggccacatcgggtgagcaaggagcatgcgtcgcgtcgcccaccttttctccagggcaacgtgggcaagcgaggggatgcaattatgatagggcaaggctacacacatgaccgaatcaaatctccttgatgatgtagattcatctagagagacatcaggcctcgatgccaacctcgggtccctatcctacttgcagtggtttcgtgaacggaagctagcttggccccgagctaatgttgacatcgagtcaccttctttggcacttgggtccctacattagtccttgccttgaccatcgtgtgccccgtagtgccccaagcagctgatggagtgggaagccttgtttccacttatccgacacaagcacacaaacaataatcaggagcatgacatcccaacacactcaactcaagcacacattgttaaacaataatcaggagcatgacatcccaatacactcaacttcatctatgcctttgggtttatcgggaagaggacgagacagaagaatgaatctgctatctctcgcgaggcgtgcaaaaatgtggtcatcttgtgatggcaagggcgttgcgacaagaggagaatccatctaaggtggctaatggaccttcaaaaaaacacctctagggaggttgcaccgccggaaaacatgggttatttttccccatcttgcgcgcctggcgatgtttttttttctaattatcttgtataatctaggttatagtagaaaaacatacagtataaattttgaaagttatgttgcaaaatttactatgtaattacaatattactgtacgtaatctataatgtaaaaaatgtacaatttttctttttataaaatatgacgttgtaaacataaaaaaatgtgacatcataaatatagtcccatacggcaaacaagcaaaataccatgatatgccaactttcaagataaatttcactggtgtgaagtgaatggttccaaatcaaatcatatatttgcctgcttttaaaaatgctacatatacaaactatctaaaactaaggttaatactaagaaattattgcagtacttataaatcagacacattgaaaaatttcatggggctcggtgggacatgctacgtagaaagggttgcttgtttctggtttagaaaagataaagtttgtgtttctccatatccggataccaacaaaaagaacagggtagggtactgcacctctggttggccatcttcttgatcgttgtgcgcaactaaccccctgatcaaatcttattttttggaaggggtctgcacttccccgctaccggagaatcgccactccgacggccaactttgaagataaatttcacaggtgtcaagtgaatggttccaaatcaaatcatatctttgtctgcttttaaaaataccacgatatgccaacttcttgacactttgaccgttaatactaaaaaattattaccagtactacttctaaaatggacacatttaaaaatttcgtcaacataacatgataaaaattttaatcgaagtcgtgcattagagttctataaaaacaaatcttgcattagacacagtgaaagtccaaaaggacttgtttatgaacttgtggagtaagtacatgatttttagtcattgggccgaagatttgaagcacctgcctaattgaaaagcaagcagcaaccttatgccggatatgtacacaaagtgatcgctatttgtttggaagagaaaaaaaacaaataaataaaacaacctcgtatcatgagagaaagaactattccattttttttcccttcgttcagagcatatgtcgacatgtcgtgtcgtcccatggttgcaccctactactctaagcccagcgccaccagcgcctgagacttccagtgcttggccttctcgaagccattgatgctgaactcgaagtcgttgatggtcatgtcgatctcctcctcggtgttcatgacgaagggccccagctgcgccacgggctcgccgatgggctcgccggcgatgagcaggaaccggagcggcttgtccgacctgttccacacctcgacgccgtcgccctggccgagcagcagcaggtggtgcgccccggccttgtcgccgccgccgccgccgaacacgccctccccctccagcacgtacgcgaacgcgttccacgtcgcgcacaccggctgccgcgccgccgcgtgggggcggaccgtgaagtccaggtacatggtcggcgtccgcgtgcgcaccggcgaccgggcgcccatcgactgcccggcgatcacccgcaccgtcacgccgtccgacgtcgtgctcgcgatgtccttgctctgtatctcctggtaccccggctcgatcctgcacgcaccacacgcgtgtcaaaccaccatgccaatgcagcgacacgacatccgagagtggggaaaaaaaacgaaggagatgacaaggacgggtcgtgacgcacatcttgttgtgggaggagaggttgacccagagctggaggcccctggaggtgccgggccccgccggcatctccgagtgcacgatgccgcgtccggccgtcatccactgcacgtcgccggccttgatcgtgccacggtggccctcgaagtcctcgtgcgtcacggctccctgaaaaacacccaccattcacgtcagttccaataagaacacggtcaatgcactggcctaagtagcacgtagattctgagtttaaatttttataggagtgaatttcagattaagttgtttaggctaagttcccaatttaaatggtttcatattttctgttggatgtaaagaccggattaaaaatactcctctctttttttttaaaaaaaaaagaacacggtcaatgcaaaaccaaactatcaaggccatcgtacgtcttcctgtagaaattgtttctttctatttcattttacacggcttggcttgactgatgttgggtttaggcgaagatatatattactaatcgatctgccaatgatgagttcaaggtgtgaagcagagttttgagcgcggaaaagtatatgcgacgcgaggtggttgacgtaggaaggctaccaaccaaaggcagagcaaggcaacagggcccgtttggatgggttagattcttcaatttgacggaaagaaacgttctgaatttgctaaaaactactactccgtatcagcctatcaggtttgcgttgttgacaaatgaaacgcgtttaattcgtttctgctgatccgtgtgatgtggttgtcaaaagacgctgctgtctgtacgtatcactggggattaagcaaggaattttcatggccgctctatatgcagttggatgttctactaccgacgaacagaatgtgaactgtggtaaaagactctgcctacctcgagcatgtaagtgacggtctcgaaacctctgtgtggatggtcagggaacccagccggagcagacactgcacaggattcgatcaagaagacgatcaaaaaatgcaaatctctatcactctaaaccagatgatcaaaaccgagccagaagcaattcactcacctgagaactcgtccaggacgaggaacggatcgaagtacctcagctcaaacctcccgatgctccggcgaacgacggcgccgacgccctcgtgctgcggccgcgccaggaacttccgcaccacctgccggggcttctccatcgacgtcgtcatatatagtactaccagttaccacctttgccgtcgccggcgaacgatcgacttgatcagaaattcagaattcaagaacacctcgacgaccctttcttcttcctccgacctcccttgccggcgatgcctatggtttgtagtagggtatggtggtttggtttggggcctattttcttcctctttatatagcggcaacacacctcgattccgttacgccccgatacgccgccgccgctgctgctgctgctgcttcccggggtcaaaagcgacagatggtttcttggcgttttttcctctctccgctacggggaaatatatataaaagctcgccgcatagctcgcgctctcaacagaaaaagtgtttcctttcgaaacgctgtgccagctgctgcagctgttgcggccggcggcggtcacgctgacgccatgcgcacgcaagccgctagccctagcgcccccgtcgcgctcgggctctgcatacgtgtgccttgtgacagcgtcgcatcagcacgcgggggtggacgggtggtgacaggtgagtgaatggaagaccgaatggtgattgggtgatcagcgaactaacgcctcgctatcaaaacgccacgtttactggcttactgccgtgatggttcagctgcttttcatcttatttaccgaattattaaaacagatataactcattattgaaacaaattgtttttctgttgcattatttagactgtttgatttaagttatttatactaaattaattttataatattcaatttgtatctacaaccaagtcaatcatccgccgtaataatcctaatccgcccagtaatttaagtcaaaggagtcttttatttagtagtaactctatcgtggtgtttgagatatattaaaatgaagatgaagtcagcataagacgagaaagtcattttgatattttaaagtagaaagttttgtaagaaatatcatttagcagtttaaaaaacgtgctaaaaattgagaaaaaatgggtgaaaatggagcggattcggacggatggccttcataccatatcctaaaccatattttttaagcggattcggagcgggtgcggatagtgtacggatgcggatgcgaatgcggagcggattgtttcggatgtcggaaatggtgcggagctggtgtggaatcggttcggaaacggattaaatttatcgggtgttacatgtatatgcaatcaatacaacatcgagttagcaatacaaggaacaataatacaatagttaataaatgacccattgtaataattatgtacttaagtgctgaacaacataaatacattatgtctataatataaaaatatagctacgcaagtgtgacacgagacaatgaaagccttaggctaataaatctaggttaattgataaattaggtcattggatgaaccaacttatattatatgcaatatatagagtggttacatttgttgataattttggattatctgacaaacggcctatcggataatccgatagaaatgtcggataatccacattcgctggatttctaaaagtgcataccatatcctcgtttcggactgattcgcccctagatcataaaatctactatcttaataaaggaatagggactataaattaccacatggtaaaaattaagggcccctttgaatcaaaggaattatgaagaattttcataggattgaaatcctataagaaattttcctatgtagctctttgatttaaagaattgaagtttcccaaatcctacaaaattcctatggaatggcttattgcatataggttttagaagaaacttagcaagaggtccaacctcttggtaaaaatcctttgagtatatctctcttatccgattcatgtgtttttcatgtgatccaatcaaacaaacattgttgtgtttttcctatgttttgcaatcctctattttatacttgcatttctatcataattctatgttttttctattcctccgttttttcattcttacgattcaaatgggccaaaaaggagttttcattttgcgggcgtgaggttaattaatttttagtatttgggaggaaacggggcagagaagacaagatcatggccctgaggtatttttaccttccaagcgacggctccatgatcctcaattcagttcatggctctgacgtcgaaaggtaagatttttcacttggctgcaggctggtgataacatgacgtcaatgtgagctcactccctctccctctgacctctcacctctcttcgccttcgtggtgctttcgcctaatcaccatgtgcctatgatacgtatcatccacaaagccaagcgttgacctcgtggataccgtcctgatcaaatcattaaaaatcccattaatgagcaggttctaaacgccaagttctgtagtactaatgcgcaggccggccggtgaaatatctaactgaattgtgcagggtccattacatctttttttttataaagcttatgacctaattgagccttaaagtggggaacagaaactataattagtagccggtagaacccttcttttctggccaccaaacggccccgcccacagattaattagtcatgtctacttcctttacaacatcctggtgaacttaatctacgggcagagaaaaaagcagccatgaaaagacaccgattaggagatatctcggaggattttgattggaacgtgtaaaaatatcgccacaccgtcaagaggcaagagcccacaatcttgtgctgtacacaaaatcaatattttgactgcagattgccccattttttgaactcaaaataaaaaaacagcttggaaggtgatcgcaaacatgcctcgatgtgacgccatctgccggaccatgacgaaatggagtggacaattggcaaattggcaaagaaactagctttcctggagacgaaaatgaaatgtaattcggtgggcaaagttgatcaaagtatatagtacgtgttcttatcagcttacccgataggcaaagagtcttgacgtatccatgagtcatgcctacgttctcagcttcttatgcttggatgcaagaccaaatagaagaaattaaattggtacttgcagagaaaaataatgcgaaaggagagaggagaatcgtaaccacccaacaagtcactttcattcagggagtcccacatactcctcatatcttgttttggatcaataagcaccctgcaagtagtttccttgtgttatcttgtctcctctggcaattttatcatttcacctttttttatcctatcatttgtggccattttattttccaacctgacacatgactctgtttgtactttgtgtaagtgctggtagcctggcatggctggattccagcccctacctctgttggaacagttaaccaaaagcccatgtaatagggaataatttatacgaaaacatcaagatatctataatacgaaagggttatatgtaaattttagtaccaccttactagttttagaagagagtaacaccactttaaaaaagattatctcttcttactacttgagctatgtgtgtgagagagaactagagaaacacacgagctcatttgtttgcctcgccttctgggatgcaggtgcaagtatatagaacctgcatgaatggttcatcaaaattggttttagttgcttgtatggacgtaagttccttttgcaattttatttactacattggagtagtgaaaaatctggatcagttacatgtgacttgattacatttcctgatttctctttaaataccgagtcatggtctccacataaatttacggtaaaaaaactagggtttgccttcatatgtactacaccatcacacgtcgtctgctccattatgctaacaagtgtgtactagcgatcgggagagcaggtctttggaatcatcgtattcgtgatactgcaacgggagagcgcaaataaggttttttgagagcatgggacgcaattggtcactgatggctgctcatccaccgcgatttgtctacatcatcacaagagcgtcgctcatcgacgtctacgtctagtactacaagtcattatcacggtacctgatatgccggttgctacgaacttcccgaactgaatcctcggcatgccgctttgactatatcgagtatatttgatttgttcgtatgtactattttatacatatgtacaatatactcatactccctccgtatcaaataagtttaattttggaatgaatggaggctatgttcatattcatgtatataagtgaacttatgagacaaaggaagtattctagttaatctatacgatgtcatcttttatttatagaacaacctatatatgcttatactatcaacggccttatcctcgagcaccatctgtatcaaggctgcatattcacaaacttcactattgatcgatcacctccacactatctgcttgggagcatgcgatcaaaaaattgtcaaaaccggaatttttagcaatgccaaacaaatttgatttccactagtttaattggtgtcgagttttttttgtcacattctatttagattggctctctacttcattttgtggataaaccttacatgtctgctctttgacaacatgtttctaatttgtttggtatccatgtgtaactataaccctacaccttattgttgctaggcgtgccaacattaattgttaggtgcaccgatgcttgctaatatctgatgctggtgtacgtaggatgagtatgaaaaccaccatggatgaatgcaggcttgcaagtgtggaaatgtaggaaaatggaggtagtggcaagacccaaggtcccaagaaagagtaattttatggttcttgagaaggtaccataaggtaccaaaaatttaatgtaaaatttagtacatcatatttcctagctactaaattacaatagaaaaaatggtaccttattatacctcctaaatacctccttaaggaatgtaaaattactctccaagaaaaccacctataggatatagttgaaccaaatatacactagagggacgtcgaatgaacaatataatctctagaggtttttagattttctcctatcatgaaaatgatgaggtgaaacatcaatatctactaatcatatgtctttcttctgccaaaacatggcgatatagtgactaattagcttacttaaaagggtaacagctagcagtgttatttttttagagacaaagacattatgtatgccacttttgccactttatgattggagttaagcttgatccgtaatactccctccttcccacgccgttgacatttttaaacatgtttgactgttcgtcttattcaaaaacatttgtgaaatgtgtaaaactatatgtatacataaaaagtatatttaacaataaatcaaatgatagaaaaagaattaataattacttaatttttttaaataagacgaacagtcaaacatttttaaaaaagtcaatggcgtcaaacattttaggatggagggagtatacacatggcggttccggacatagctatttcgagttgttggttttgagtgatgcgggattgaaagcgttggtgagggcatgagcatcactgcatcagcacgtcatgcatatgtgaggatattaggcagccaacaaagttttttttttgtcatttgtcagagaccccctataatcttgtggattgtggattttgaagcacgaaacgcacagcaaatcctacgattagaagttttcaaggttttagccccaatttcccatcgaataccatttagcaattcctttttttatgccatttcctgaaagcactctggacaaatttattactccactcataaaaagaaccactacctccgttcaattagaacattggttagtttaatttgaactaactaatttttaactaataaagtatgaactaacaagcgtcaaacaaaaagaaaaggaggaaatattattttaggttaaagatttatctcaaaaaaactatgtttttagaacgggttcagtagacctctatagtacaaccttaatttccttctcgttttagacattgaaccaatagtatctactcctcctcatttttttttcatgtcccccttttatctctttaatagcatctccaacagcatctctaaattcaactctacaaatgcctatttagccagtttgctaaagagttggagagtcaaatttgtatttcactccaacagtctctcggttaccttctccaattttaatactgggttccacatgccaatctctgtcattcttcatctctcttcacgtcattccatttccccactcttttcctttccccacccacccgctggtggatgcgcaggtgatggcgtggcggctgctgctgctgctcgaggcaagggggctcacagcgatgattggcggcagcggcagcggtgatgtagatggcgccgcaccgctctaggaggcccccggcccacgcagtgtccgcgtggaacccctcagccgcgccgactacggcctccatgtcacgggcaacgtccggcgggagcttctggaggtccgcgaacaaagggtcatcctcctcgccatcaccaccgccgtcagcatgggaggaatcgattgggacttgcgattcgtcttcctcattgtgtgcgtcacgatttcgccttttgcggtggcaacggcttgtgcgtgaaccgtgacacagcgatgacaacgatgactgccgcggcggacgatggctagacgacgacagccgcggcgggtggtggcccagacattggtggcgcgctcgtggccgacgtgctctccaattcgcccccggccgatgcgctcaagttgctgccttgctggtgggtggacgacagagagaggaaggattagactaggagtggtggtgggacccacctttggccagtggaggaagctggctacatttggtcagctggaggagcaatttggcatccgaatctggatggagagtctgttggagcttgttttttctctatattggttaaattttaacttggagagccaaatagacattctattggagatgctctaataagggcatggtaatctcttttagccccttgcttaattagtctttgactaggtaatagcggagcaagatcaaatgagtataacacagataacaatattatggttgttggtcgtgtactcctgttggtagattagactgtctgtttaactaaagaaccgacaagaagattaaacatgataacagaggaagaaaaccttgataaatcgtaattcagaaactgaatcgtgaattagtagttaggatataagaggttgctcataattgttttttgtgacttgtgagcccatccatcaatcacccaggagagaaactaatttcctgcctgtgacgaaacatggaatggaaagccacgaacattgtggcttttaggataaacacgcatgacgcccaaacacctcatgtttagccgtctttgccgccttgacgccgacggccgatatctttgtgtggagccggatcggagtgacggcgagcgtcatgcatcaatgcgcacattccattcctggttacactttcatcaaatcaaatcctctccttgatcaccgccggcatgtacgtacgtgtcggccttacctcacgcctgcgatcgattctgcgatgccttaataccttctcgtgtcctttgctgctgcaagctagcctggcatactaccgcgctggaaagccgtcgggatcggccggaccacacccgatcggtttcggcgacggcgacgattcggcaccgtatatccgcgcagatcgatcgatggaatcgacgctgggaatgggcaaagcgcgagggtgaacgaaaggtaagacgtactcgagctcgagttacggttggttggttggtttggtactttggtttccgcccgcccgcccgccgcccgcacgcacccgcagcgtcacgttgcgtcgccgtcgcgcgggcagcgtctgtgcggcgcccacgcagacgcggcttcgtggacggacgcgaggtgcgcgcgagcggctactgccgcggtaaaacggtgggttgcccctgggtgccgtctcgggccgcgtgaggagaaggttgggctgcggtttgtggttttggggcctttgacgaggggagacgagctcgcgggctgcagctcgaaggagattttttgtgcgggaatgctaggggtacgccggatggaccggagaaggcaaagtcgcagactgcacgtactacgtggggatggtggggaggtgaaaccgctagaaatgtggagatcgcgggccgttaatgggctgggtcgattgtcctcaatttgtgggtgggctccttgttgcggaatgctaaagtttcaggcgaaagtgtcgttaaaatcttgggctcagggcctgttcactttgaaaccattttcaaccttatcaaattttggtaaagttaaaaaaaaagtggctacatttagtttgctgtcaaattttggtaactatataagaaatcctaccaaaattttggcaagttgccaaaagttttttatttggcatcaaaatgaacaggcccttggtttggtttttatttggttccagagttttcccttttagaaaattttatatttagttactcaattatagtgttggtctgatcgttgtctctcaactatgaaatcgttcactttttgattcattaacgctcaaaatcttctacatatcatccttgtgtctatacctggatggttttttgatgactcctgctttttgaatccacatggattagtaacgaggacatcaacatagtgataaataattaaaaaaagaaatagtaagaaaaaaattgaaggaaatactacaatctacatttcaaccctgtcccaattccttcttttccccatatcttattttaaattgctaggatgccccgtggcaccacgttacgggaaaaaccacgtttgcttaggatctacggtaaaatatgaatggttttgagtgttaagagatgacttcgtatttaagtgaaaaaaaatcaaggctatagttgaacgagtactaaatgtggacttttctctctatttttgcttttatgtattagaacaaaaactttatctttgacctttttttcggctgaaaagctactggcctgtaaaccacgatggtaaaaggctagctaaaaatattaagttgaaatgttaaatttgtagctttcgatatgaagcatttacgcattaatttatttgttgcttaaggatgtaaagcctttcgcaatactataaatatatgatgtagccctattttatctagtagcaagttagaagttaattagggactcgtacaaatatatgttttcgtttcgtccattcaacaaaaatgttgttacgagatcacattttattcttgtgaaattacctacaatcttggtctaaacacattttttaagtagattagaagctctaaaactttttaaaagaaaaacttatttagtaaaatcagacgactaaacaacatcataatataggggacccctttcacactgtatataacataaatacagctctatggcgtatgacgtaagcggataagttagacgacttattaggtagaaccttcactatggggaaccaactgttttttttaatgaacgagtttgactgtcctacacgagacgaaaactaaaaacatattcttagccatcgataaggcatcacatcgaggtatctccttacctaccgccgtgaacgatgaagggagacactacccaaatcgcactaacctgcgttcttttcacatatgaaatgatctctctcattccgggtaaaacatataaacgcgtagcacaccaccccctttctctcttaaacggcgagaagatggcaacggggtttcagttaatggacccgtcctttcaggaattcgtcacttgctcaatcgtacaaatgtggtccgtttaggttgatgccttgagacaaaatgtacttgattagcgattgatgtgaggcaagcaagcgaaaaatgctcactggaatatatcgtagagaaatctcctaacagcatctccagcagaaacactaaatataacccctaaacagattttgggtgttgagactaaaaaaactcaatccagcagagcccctatcaaggatcctaaattaggtaggcacccaaataacctttcctagcccccagtctcaggggctctactgcacagcccctatccacggttggaaaagcgcgggagccgcccgacgtggtcttggtccgccggcacctctcctacccagtgctcatccccggccggtgcggctcctccctgcctaccgtgtcatccctcaggtgcattcctctacccgacgctccttcccggccgacgcgtctgctgtacctggagtctcctctagcctgcaccctctgcctgaactcgatgaaaaacatggcccagtggccgagtcatgcgatggcgtcgaggcactggatgattcaagtgttgttgcaggctgcgaaattgagaaagtagtagcagggtagcactagcagctgcgattgtgggacttagaagaatgggtaaagtgatacatgcgatgtgctatgcagttttttttgttgctttgcttggttgttgcttcgtgagagaagtagctggtctattggtggatgagaagacgggaaaaatcaacacatgtgagaaaatgcatggaagcgccacaacagcagaagctcgtttcacccgagctatgaatacgtgctactaggatttgtatttccattttatttttttaaaagaatcgaatttgaattgtgaatttaaatatggttggattattatggttttatactaggagtagcgtagagtatagaactatagatttgtactttaaagtatatgttaaaatagaagatgaaatgaaataaagggcgagaaaagggattgctgctggagttaaaggtattttttaggtatttagaaaataggggaagcccccattaaatttttaggggctgtaaaataggagctattgctggagatgctctaagatccttcctcgaaaaaaaagtaatctcctaagatcgatttaggatcaatttaatgccgttatgttgataaactttgagatatcatttccatcatttcattttctttggattgcatctcattaaactactctctctgtttcatattataaaccgttttacctttttcttagtcaaacattttaaaatttgattaagtttgtagaaaaatataccaatatttctaatacaaaacaaacataatattaaaatatatccaatattaaatttaatgaaactactttggtatcgtggatgttgctaattttttttataaacttggtcaaacttgtaaaactttgactaagattaagaaaaaaatcaaatgacttataatataaaatagagggagtaacatggtatgagataccacaccatattagagaaagaaaacaataatatccaaaattgagagatgccactcattccatttcaaattataaacatttccgataaaattatactaaattattacttttgtcactaacaatctctcatttaattttgctcagtaccataatctcaacaatatttttattttttaaccatctatcatttaatatatggtattataatttttttaataactactcccccatatcataatataacaacctatccgattatatgttgctatgttatgggatcaatgaaatataatacttaaacaaaaaagtatgaattacctcccgaactatcgcggtcgtccgaattaccccctgaaccataaaccggatattcttcacccccaactatgcaaaccggacgaattacccccctcgactcaatccgcggtggttttggtctacgtggcatacacgtggcatcctagtcagcgtttttctaataaaaaattagtgaaacccgcctatcatactctcccacctgtctctcttccccactttcctctcaatctctctctcttcccctattcctctcaatctctctctgtctcatatgtacgacgagttggtggccggcgctagatgcggcggcggggaaggaggggggggcgaagagcgccgtcgccctcgcgcaccaccgggagcagctccagctccacgcgcgccacgggcacgtccgccgcccgcgcccgcagctgcctccgcagtcacctccgttccgccgcctgcccctgtgcgtcgcgcccgtagtcgcctctgctcggctatcgccgcgataccgccgcccgccccagtgctccgcgcccgccgccgccgtccaccgtccgccgcctgccctcgtgctccgcgcccgcagccgccgtccgccgtccgtcgccgccccgtgcgccgcgccggccaccaactcgctggccacatctgatacagagagagattgagaggaagagggaaagattgagagattaagaggaaagtggggaagagagaggtgggagagtatgacaggcaggtcccaccatttttttattagaaaaatgctgactgggatgccacgtgtatgccacgtagaccaaaactaccgcggattgggtcgagggaggggggtaattcatctggtttgtatagttgggggtgaagaatgtccgattttgtggtttagggggtaattcggacgaccgtgatagttcgggagggtaattcgtactttttccatacttaaaacctataaatagttatatttaggaacagggagtatatggtatatgccagcacagattagattacagaaggataataataataatctctatgctgtgaggggccaacggattaaaaagcacgacgaatccagcgggcaacgagccgatgactggttcgcgcgcgcgcggcggtgagccggtgacgacacacggcgccgctggacgcgacgcgatgcggggcaaaccaacccacgcggcggtaaagcgtgcagaaaacgccccagagaaaaaaaaaaggtagaaaaaaacaaaacggcaaaagcaatcgaaggagagaatggcaaggtgagctccttggttgtttcacactcccaacctcctcgtcccccttcccctcgttttcccccaaattccgctcctaaaccctccctctcctctcactccggccgcgattctcccgccgccccggcgatggtcccgatctaagcatgtccgacgccgacggcttcggttgcgagcaccgccgaccctccaagcgccgccgcgacgggcccgatcatgccctcctcccggtgtcccgagaggtgctgatgggccaccccgatgaccccgccgccgccgccgccgccgtgggggcggaatcctcctcggcctcgtcatacctcggggttgtggcggccgccgcgtccgcctccgcctccgcggcggggggtttctcctgcggggcccacttcttcgtgcgggccaccgactcgaggaccgtgtcgatgcacgcggcgtggggggacaccgtgggcgccgtgctcgcgcacctcgccgaccgggggtacggccgcgacctccgcctcgtctacgccgggaggcagctcgcgccggagaccgccctcgccgacctccgcctcccgccggactccacgctgcacctcctctcccgcctccgctccaccccctacccggacgcgtggcagctcgcttcctacatcgcctccaccgccgccgccgccaagtccgaccccgcccacaccagctccgccgccaacatcaacgagctcgtcaaggagttcatcctctgcgcgcaccgagccaacatgcggcagcgccatgatcgcgactcccccctcttcgatgcccaacccacgggggaccacgcggcgcagtacctcgagattttccgccaggcgggcgcccccttcgcgctggttcgcctctacgccgctaatccctcctccgcctcccaccatcacgcggagaacgccatcaaatgcttcctcaccatggatccttcggccttgccacccgacgtgctgccggtcatggcgccggtgctgcttgaattttgcgggttgctctctttttctgtgggcaagagggatgaactctatatatcatcccgttctatgcttgcaacagtgctcagcttgccttctgggcttcccccttgcatcaagtcaccttccaagctgatcgagcaggtccttccgtttgctgaagaaatagtgggagtggttatggacgaacttgcatcactggatatgactgtgtcatccaaaaaccttgaagacctctcaaatttctttaaagtgctgcgccagcaggcactccgttgggttcccaatggggggccattgcccaagaatctgtataacagtgagcgtgggcataatgacacgtgggtgtggaagttgcacgaaatgtcaatgaacttattgaacagggtggatgagtgcttgaagaggttggaaatggatctgtccttgtcatcggagaacagaggggtcaatataagtcaatctcgatgggttgcccggtcacatatgctggtcatgctgacacaactagattttatatcgatgatttatgaggatttggcacataacctacggcttgtgttgctggcacacagagatcctctcaatgccctcgtgcgctgttccaagaggaatgagcatctccactggcttgtgaagcataaagacctcctttgctttgaatcaagaaggaatttagtcttgatgatgctacctgagggaaaggatgaatacggggagcttcatgagatgttgattgatcggcaacacttattggacgagtcctttgaatacattatacaggccagacccagtgagcttcgcagtgggctatttatggagtttaagaatgaggaagcgacaggccctggagttctgagggaatggttctgcatggtgtgtcaagctcttttcagcccgcagcaagttctcttctcgccttgtcctagtgatcgacagaggttcttcttgaacggaagtaagtttcctcatccccagtattaaattatcacttaagaccctgttcttatgttatggcactatgatcatacatcttgaaagaaaaatcctgaatcgaataagctaatgatgacttgagggtggatccagtaattggcatgcatggtataatagaaaacaaaatatcttggctagtatttctttttgaacttaagttggcctagtattagtaaaggcttacctttgcttgtctacttggttcagcacctctttttgttttttcttttgataaaacttggttcaatactgcactaatgagatgctgccactttttatttgcgaatttatactacgatgctatgacaagctgttttccacttgtatgttctggcacttagtaatctggaatgcaatgtgtcattggcaccgcacattatacacacaaattttggtggactggagaaattttgtttgagcaaccattgctaatctccagttatataagtagccaaccacacaccagagcagttcctgccagggcatcgagaaccacccattctggtggtgtgaattgtcatggctgtttctctgtagactgttggtgcccagacctatgtggaagttggtactcaccatacctgtggaaaactttgctttgtagatttccttccattgcaagtctgtagtgaagtttaacgtgcatggaatgagaaatagtgaatcattagttggtcagctgcaatatatgctcattcctcattgagactttccaaacagtccaacatatcaaggctatgctaacagttttgtggatatcatccttgccaactggatcagaaagttccgatgaacaaccttcaagatgaaaagtatcaccgcagttgttggaaattgtgtcacactgttaaaggagctctgggaaatgcagtgagcctgtgacacagctgcacaaccatagacttccccaatgtgtctcttatgtgcacaagggacaaatggaataggtacatagatattaagatgagtttctattttatgctgctaacgaaaatgctaatttccaacttttggtctacaagctgataaataaaagctggcttatttgataagcctaagcttggccagagaggtaacgtgacactgttaggttgaaagtgaggcatgcttcatgcaaaaaggaggataagtccttgctggcacaatatgcaattagtatgttatcttgaaaagttctatgagaataccataatttttagcttggcagtttattctagctgtagctgtttgagccattttcacttttcttaattatatttaattgattcttatatattcattattcatgatacagctgatgtctacaagtatgttcactgaatgtctgaatctcttctaatttttttatgcttattgtatgttgcagcatctgctgtggatccactgcacctgaaatacttcatattttcaggacgaataattggattagcattgatgcatagagttcaagtagggatcacattggaccgcacattattcttgcatcttgctgggagaagtattaaattggaagatatttctgctgcagaccctgtcatgtatgcaagctgtaaaagaattttagagatggatgctgctgttgttgatggtcttgaactaacattttcccgagatgttcatgaattagggtctcgaaggactattgagctttgctcaggagggaaggatctccatgtaaatatcaggaacagagagctttatattgaccttcttattaagagtaccttcgtggattccatatcagttcagttaacccatttcgtgcgcggatttagtgacattctagttgatccggaactccagaaagtattttttgagtttttggatctagaagacttcgacggaatgctagggggaagcaacaaaactataaatctggaagattggaaattacatactcaatataacggctacaaagaaaaagatcgccagattatctggttctggaaggtatgccatgtaacattgtacaaatgcattcaaccatgattttttcttcatcagttttatatcatgatattatttgattactttgctcattgtaagaaatgagggctttgaatgcatgttagacttatgggggaaaatgctgctattatcattgaagaccaataaggagtttgaatgtgggccatatcattttcatgtttttctgttcacaatctcaacagattctgaaaccttaacctgtaagatttcaaacggcgccaaaaatattaagccactttgtcctgtagtcttgttcaggttatattgtgggatcatgtggagtcttattatggtcttttttgttcacaaatgccatatcttgaaatttgaacctgtaggcatcaaatggaataaaaaatgttattactttctgaaaagtaaatgaaactaaggttaaatcttgtttgtctctttggtgttttaacattgaagctgtttcaacgtgatccttgtatttgtcactgttttgatgacaactgtttgtgttttttttttctttcactttactggtccggcgctgttgtatacctataagttgaggtcaatcgatgatatcctatgctgggttttctgtcaagtctcagttaaccatagacgtgggtttttctctaccttacagcaccaatattattttatcttctaggagctgtacaacaaccactctttccaatttcatggaacttctgttacttgatacaattgttgttgctcctttgtgtgaaatgctgagaacaatgaaacaattttcttaacttagttccgcatcaatctggggttccataacccagagcttgtgctgctgccaatattagctatggagtagcatattaaatacagtggaatgagtaggtaataaagtatagtggcaactattgcactttgtcatcgtttttacactgaggcctggtttagttcccaactttttcttcaaacttccaacttccatcacatcaaaactttcctacaaacataaacttccaacttttccgtcacatcattccaatttcaatcaaacttccaattttggtgtgaactaaacacaccctgacataaaatcaaatacgctccttaaatcttgcatgcacttttctagaatttcaatagaaacttactttgtagacttatctagcataaccatacacttatctagcataaccattgtgtgtttccgattgatttggtgtatgcttgataagaattaagaaaacttgtttattcacactgcaggctgttgagagcttgtcaattgagcaacagaggcagctgctgttcttttggacttcagttaaatatttaccctcagatggttttggtgggctggcctcaaaactgtacatatataaggtatctgagtcagctgaccgtctcccatcgtcacatacctgcttttaccggctctgcctgcctgcttatccatccttgaaagtgacgagaaaccagctgcagaagatcacacaagagcatgtgagctgtagctttggcacatggtagatgccgcccttatggtaatccaatatggtaaattctgtacatacccaagttagtgtcgatttacctgcctcaattgaagctagaaattaaaagcaataggctatcttttgtttgttttgtacatatttaaagtgttctgggccatttaatctagttaggcataatcagaagagagcaggttcctttcattctccctcttttgaaccaggcttccatttttcatatactttctggagaagtgtggtgggagcatttgcatcgtgctatgctcacaagctctggaagccagttaaggcttaaaccatgtcataaaggtaattgcaacgtgtagtagccatgtggcttggtgttcctggtggagctgaaattctgcatagagtcgagtagagttaaagtgatcatctgtttgtgaatctggacaaaatcggtcactgaaactttgaaggtatgcgactctgctaatgtgaagttaaaactcggatatgctttgctgtttagtaccagcaggcagcagaaattttctgggaatcagccagaaaccggtgtctcagcagctgacaagtgatatggaccatactctgcctgaacatatggattccaacgatgtctttggtatatgaatcacaattatatgttgacaactacacccggtggaatcggatgcctagttgatgtgtattcacacctttcaaatgttttgcatctgtgagagaaattccataccaaatcccgctgaaactctggcaaatttccacgggatgcttgtgcacggttgcacctacagtttctccacctttgcgagccgccgatggagagatcattgctgcactctaatcatctatcctctgattcattttgatttcactcatcttcctcccctcttcaacattttgtacaaccaatgaaatgcagttacttggcagcgctgaaacacaaatgccgaatagttttgatatgacgcaattgcctcataattctgacatgacacttgcattgatccccctgtgatttcttctgtggaacctttgagaggtgaatctgaatcatttctatcctcaatgaaattggcagagctcctgcatttccccctaaaaaaaaaacacttgcattgatcaccttagcttatcacagagcaagagctgattgcatgggattaatgtacaaacatcatgatgccatccttaaataggtactccaccgtactaaagtaaatcaactcctaactataggtatgcccaaagctagaatttaattccttttggacggaaggagtagggttcacgatcaagggcccctttgattcatgaacccggaaatgagctattcttgtgaaaacccaataaaattcccatatttcaaataaggcccatttttatatgtggagaaaatcataggattttttggatttcaatcctatataaaaaaagtaggaagtcgtttatttcccaatcattttcattgaaattcgtaggatatcctaagactttggagaaaagtttaaagaagcttcaacatgtctcttatccgattaatgcatttttcatgttgtctactcaaacaatcattcttgtatgttttgagcttatccttcctatttctctatttttttcaatcccgtgtttaaaaagagacctaaacatgaagtatttatggagctcgatttatcttaagatatcatacgcatacactgccaccattgctggtcgcttcgctttcgacatttcggtaggttcaccgacggcgagaaatgattgacacatgcacatcaacggatgagatcgggcacacaaagcacagtgataatgtactctcagaacgtgacacacccatatatacacgacgaaccgatcaaaacaacaacacacaagacggtaggttcaccgacggcgagaaatggttggcacacggccatgaacggctgagatcgcacacacatagagacagacaatgtactctcagaaacgcacccattacacgatgaaaaccaatcaaacacgaaaaaaaaaaagcacaaaagaccgacaaacaacgcctgcgacgacggaggcatgtgggggccagagaggggcaccgcgtcactgacgctgggccccaccgccctcgatgacaaactcttttatttagccccacgtcacgcgtacccacacacacctacggagtcgagtactaccactccagctcactcaactcatcactcgctacacgcacacgtacgtacaactccggcgagtcgccggcggcggcggcgcgcgcgggccatgcatgtactccacggtgtacgacgacggcgagccagccttccccggcatgcactcactcgctggccttctcggcctccggctccgcgaccggcgccgcctcctccaccttcacctcctcggcggccggcgccggcgccgcctcctcctccttcacctcctcggccacctgcgccgccggctcggcctccttggcctccgcctcggcggcggcggcgggctctggcgccacctcctccttggcaggctcggcctccggctcggccggctcgggctcggcctccttcacctcctccgccgccggctcggccgcagctggctccgcctccttggtctccgccacctcggcctcggcgggcgccgcctcctcggccacagcctcggccggcgccgccggcgtctcctccttcggcgcctccacctcggcggcggcggccgccggcgtcgcctccactggcgcctcctcggccagcacggtggtcggggtctcaacctacacatcgatccgcgcgacgagatcagcacaacacgatgatcaatcaacaagatcacataattttcacatattttcctagcctaatcaataattaaccattttcaatgatgattaacaagcagatcaacgagctaattaattacctctacggtggccattgatgtcgatgaggtgtgcttactaatacaccaagaaaaaagtatatatgtgtgtgtatagtagagtggtcagctagaggagcaagagagctaaactgatcaagtgtccagctcagtttgtgtgtgtggagctttgcactgaggtggagggctatatatagtgccctcacaagggtcagaatgggaaaaacacaccatgcccaaaggattaaaataattcaggattaagctcaacttgtaactcccatccatctcatgcaaattcgtgatcaggaatctttggtacatgtactacatgtcatgcaagaatgcaaccaaaagttggccatgagtcatggcacatggaaagtgtccaaaagggtgcaacagtgcagggagtgctgtttgtttatttatttcactatattttcactaacatttgtgtgatggatcagagggatcatatcatcacagatccatataaatggcatgcatacacacacagtcactcggtacagagttgtcacagatggatcgatcagtgtgcccaagaaaagggccaagtgagagctggccaaccagctagcctggccacagtggcagcaagttggagatatagcttttgagttgtacccaggtttatctttccgacggacggtcggatcccgactctatgaatttgacaaattttgactaaattttgctcgaaagtagcagttcagttttgaatttattaaaaaaacatttggaaattgcatcaaaatatgcttttatcctgcgttgaaaccttaaaattccacggttttcagcttgtttatgtcgaaactatgaatcctagttgtactcccctgctcctaaatataagtatttcttgctatatagttgtgcataggtagaaatgcttttgtttatggacggagagggtactaactaagctgtttgtgctcagtgcatgcagggcttttaggtgtacatctcagtgttcctgcacgttctgcctgcgccccaaatcagtctgagattcgatcgagatctttaaaaattttgatcgtgtaaaaattttgatcggggagacgattgaattgattagggtttgttttgtacgagattaattagtggtggcatgaacagagacggtattgtcgggttagcgtgaggacaatgcaattggaaccagtgaatgtgcccctgaacagtggctgatgtgatttggggaattcagcttagctcacaaggtggccacctataggttgatggatatactttttagtgggttagataagatctttaattctgtttgttctgagatatggttgttattctactcaatgccttgtttgggacatgcctgataattttacaagaatcatatattgtttcatgtggcatcaaagtcttccttttcttttcattttcaagataatggaaataacttgtgcgtgatgttttgctgaagtaaatgttattaaaacgagaccaagaatgacgcgagaagtattaaaaccgatcaactatacttatttactcagagggttcattatttcttttgagtacatttttttaaacgaatcagcgagccaccaatttcattgaatagagaaggagtaaactctacagtcttctaagtacattttgaaattccccatttgatcaacactattacaactagcatcctgtgcctggttaagtggttgcatgtgtgatgcttgagagttcatcagccacaataattacagcaaatggagacctctataaactttggagttcgtcctctttgctttagacgcctttattgaaaagctagcatagaaatatgcaaagacgattgtacaacacctcaggagtagttgtccgtagatcaactttgtcttgcaaaaataaagagaaaggcaagagggatatcatcagcaagacagcgagatcagagccgtctgcagtagcactacattgccgtgggggcacaatgccacagcattgtcaccggcaaacaagcatatctagtaatgcataatggtgatgcataatgttagctgctcaaggtgtttcatctactatgccttttttctttctctcaatcgatcggcacagctcctgccataagtgttcaagaaggaaaaatgatgtttcacaaaaaaaaaaggggaggctaaataccctttgatttcatacataccaaaatccagatcacgatttcgcttaacttatctaagatgatgcgcggttctcttgcgtaatctctgaaaaaagaaaaaaaagaagaaagagataaatctttgtacacggtgatttcaaatgttcaacaggaactcctcttccactgtactagtaaaatttttcaaattgattcgttcagaagtcctagctagtggttgcagagaatactgaagctgggggcagctttcttctccctgaaaaaaaaaagaagaagaaaaaccctgctgtctctgtgtcgttttcgttgctttaaaccgtccatttgagatgttgatcgagttgatgaatgaagtgtacaatgatgagcagctttcgggggtagagtccacaccgatcgtccaacattgcccagtaggatggcctgtttggtgccaaatcactcgaggaaaatgaaaatatcgacttggccggctgtcggtgtgggcccccacgtgccacatccagccggatcccccgtggcatcgcctctctttcggccgccttttctgctaggatgagctaatttgtgagaccctcattgattgctaggctagattgagagcgaatttccgctaaaaataatatttgtgtttgatcatgaggagactaaactgcactttgcgtgttgtgttgcgattcatgttttagtttgcaccaggtttaaatggtactttcactttgcaccaatgaccaacctaggacgatataggatataattttcatcagttcaaggtcaatcatgatttatcaaaccgtttgaaataggactaactctgtaactcatagtttaacggttaccacgataatagcacggttactgtaggatatactgtggtttgaaaaactaaaaaggttagcacacattataactgtgtgataaccgtacgattttgtaaaccctgagctcgatcaattcgaggataattggtgatagctctgccacctccaatttaattctcttgagcaaccttgatgctacgcatggattacttccgttttttttaacaaaaaaaatggttttgttgtgtgctactttagagacattagttattgattacctagagtaaaagcatcaccaaccgttattctatttcatttccaaaactgattttgagggtttttagtataaaagtcatatccaacatatttccaaaagccttgcactagttttggagttcccatctctatatatttcgttacgtggatttaagggtgagagagtgactcccaatccctcgttcgccttttctctctcctttccgcatgagggctgaaatttctgttgggagcatgtgggttactgtgatctctttctgtgcgcgtggaaggaaaataacagaaaagaaggtccacttttttaaatttttagaggaatgagttttttcactttctatttttagtttaggaaatccaaaattaaatttcgggaatagattattgctaatctgttggtgatgctaagagttaaatgaaaaggtttacaaaccatgaagtgtagatgaaagattacattcaaaccgtttgattttttgaagaacatatactactatatgacaatgccttgttttcatccttttgctgccgcgccacattggtggccatgaaattgcttgccacaaagaacagtgaggcataattggagcccatgacccggaagcagatactgacgtggcggcatagctagggtcggtggaaagggccccacttcacagtgctcctgaattgatttgctcgggtgttgcccttgtgaatgacgtgtaatgctgccaatatacgtgcgtccaggtcatcctgcctctacctccaattactatagcggccctaccagtaatttgtaatttgttcatctgcagaagcgacgaggaaaattttatggtagagttacaagcctcacagtatattcaccaacagtattttaatatcattccctatcctgtaatttttgattttttttaatcaaaaatcggttttacatgattccctaatctcattcccaatattttttattccctgtcctacaattatagtctagggacaaacttcagctccaatcggagtaatttcctaggagtctcaccttttagttattaaaaagctaattttagccaatctcctgagagataaaaaatttaatccctcaaattctgtttaggttctaaaattttatggatggaattttgggacacggttggtgatgctctaatataaaatatatatattccttaattcctatatgtaaagttagaaatgaatcacatacaaatagaaagatttatggtagattggttattgatactgccaactaaccatttatgtaaggcagcgtagtcacttcccctctatggttgtggcggtgacaccatgcctcactgctccacctccttgctgtttattgctaagtgctaacccgcccttctaatcttagaatctcatgaaaatcattgtcgacaggttatatccgtaaacggtatttgtatagtatgagaataattgaaaccaaggtatacgcgagatcaaaataaaagagataggacaagttcatgccccttaactgacaggtactccctccattaaatatgtatgacgtcgttgactttttaccaatattttaccattcgtcttatttaattttttttaaatataaaaatgtttacatcattcttaaagaacatttgataataaatcaagttataataaaataaatgataattacataattttttttaacaagacgaatgatcaaacgtatatcaaaaagtcgacaacgtcatacaataaaatatagagggagtaatagccatactcctgttggctaaagccggtgttacttttatatatcagtatcacacgaatacaatatttgggatgacctaatctagtttctatcggcctggtggcatcgagcttttgcacatactcaacggctggtgtagtcttctttctctgacataaacttggcgagattggatgtagttctagatccctcatgtcggtctctgtggcttctacattgggtttgtctagatctgtattggcttgtcttctgtcggtgtgttccctctcatcctagtgggtcttgtattaatagtgaaaatcatctttctatccaagtagaattcgtagaaatagaacatgatacaggttaaggaaaccttttctttcccgataaggactctaacactttcacaacttctattccgggaagataattttcttttctatccgctttatttccttaattaaaggatattttcttgtatactactgtatatggtatttctatttaccgcgaacctgtatataggaggtatgctttatcctcgacactaccgtattgcactactcttaactcttctcatctactagctagcataataaattcaatcaagagttgagatgtattttcctatgtttgccttttctctagacatcgggtgaagtcaacacaactatatatacgacgtacttgctcggatgcaattaagggcctgtttggcacagcttcagctc

SEQ ID NO: 8893 - DNA, 19634 bp, Oryza sativa
  unsure (1)..(19634): unsure at all n locations
ggcacggtaaacagcgctagttgacgtggcgctgaggtgtctaagttcaacgccacacgatttgacgcggtcatttttgaaataagttttggcaacagtttatttataaaattagttttttcaaatggtcaaattgtcaaaatttgtacggtatcatgattggcatacagtgcttttgcgctacattattttgatttatttttcaactacgagaacttttgctaaactgctattggaaagtttcagggttaagaaaaccttaataactgcttctccatcctaaaatataaggtacaaatctagataaattgattgatggtctcataagagagttgggagtctcctttccaaaaaacaaaaaagaagagagagttgggagtttcttcaaatcaatattgaaagctcggaggaaatcaaatgcaatgtgggccaggagctcacgacatgttaagccactcccaaaaactttggactcgataatggtgagttaaaaccaaaacatgaccatcttcccggaggcaactcaagagcgtaccaaaatgtcaaaaaagagaaacattctctctttatactccgtcaggttacataagtagaaaattagaacagaacctgatgcaccaaaacagagttgggcgcaatttggatgttggcaataagccaacaaactgttccatgttcactagatattgatagttacagcctcccaaaatagacaggatttattcaatttaccacaagataatcaagcctttattttactacaaaaagtaaaacaatagtacattcactcatggtcttgctttcgagcagagcagaaagagaaatgaatggggcataataagtcatgtgcttataattatcgcagccgattgtgccatcatcaaacctggcattttgtacaaccatccgtggagtggcaggagcaggtcaaaagatgaacacaacgctgtcgtggaccctgttcttctgattctgcgcaacacactctgatatccacatcaagttcctaatctcctgctcccgtagccttatgtaagcaaagaaaacagcatagtggaactgcgcaaacaagatatggagtcaaagatcccagcatgagaatccgcaatagtggcataatgctcacaagtttgttatcccctcatattggactagggataaaataaacagaactagatgagtgcactcaagcatgtatgcaggcttcagtgccacatgcattcttttagcaagagaaactagctctttgcggagtgcttattattactccctacggttccataagtcccgtcgttttggacaaggttgaggtcaaactattagagctttgactatcaataacttcaaaaatatttagtttgaaggcactagaacatgtatatttatttatcgtatattgtatagtaggagatcatagtcaaagatatgttttggagactgtcgttgtccaaaatgacaactatggaactgagggagtaaactcgtaagtggaactagaagatcccttgaagaaagttggtatattaaagtccaaaatgagaatgcagatgcacccccaccatggaggtcctaaggtaactaatataaaacaatgaaaatcatacctgctgttcaaatgacaagcacagcctccgcacttcctcctcatagaaggccttatccaacatttggctttccccatacgaaattttggcaaaaatagcctggtatggagggtacttctccattacaccacggacctacatgatgtgaaaaggaaaaaggtgttatggaagtccaaaaaaagaaggatcaatgtaatggtgatgatgatgcaaaaaaagaagaatcaaggtaatgtgatgatgatgcatatagtgtaactaacatattttacaggaattctttatgtatgctaatggtgcaccacactcttttttcatctacctatacaacaaacttaacaaaaagaacagcgtcaagccagaacaaaactatggttatactagtaagcatggtagaccaaagggcaataactaaaactacctattgctactaatgacgggcacaatagaagagaagacaaaacatataatagctaaagcagctttccaatctgctccagatgaaaggcacagaaaaaatagtttggcacacattgatcaaagcataaaacatgtgtaagaccatgcgctcccatgtaataatatgcccattccattactcaaggaaggttccaacacagaattttcaaaacaaataaatgtaataccagtatacaaaaaaaaaatcattgtgtcttggctgaaccaactactccacagacgttgatatagagcagtcagaaaaccaagttcgatgtatgcccatcacacgtgatacgtgtgccacaaaaacatctcccgtggaataccacgattctccatctcttgtgcagaaggcgttcggcctagggcatcatttttgttcgataggacttccaataaatctatttagtatgatgagtggtccttttgctaaacatgttggtaacactccaatagtgttcatttttcatattagcagtttaagttggccaatgtaagcaaatatgagaagcaagatgtgattaaacaattgaagatgtatgtatactaaaacgtgctagaactgaactatgagcataaatgaagacaaacctgatcaacatcttcacaaacagccagttcttcatgaccatatggatacctggaggtcgaaaaaaagtattacaaacatatcttggcaaaaggtactatcaagctggttctaatagaaacctacaataaaccaaagttggagtacagcttccgacggtcatctctagtcaactctgtaccaatactagaaaacatgacagagagatgtcagtatcacatgattgtgcacataacaacaaacaaggaagtatgtaacaaaattatacggtttgaagtggaaaacagaaaaaacttggcaacctacctgtttattgtaatgttcacagctcttctgtctgcttcaaatgacagaagatcgcacataatctcagcagttgcaccaccaagtttctgtataacacaaaaagtcaatatgaacactagatgaaattggaggatacagttgaagccactatatttgtgtagttcatacttcacagaatttgtaaaagtcctcaaggtatgctttgtaaagagtgttcctcataatctcgatattcatgtcatccaaatcctgtaaaattcaggcaactctcattatcaagttagccttggtgttcaaattattaaatggattgtaatttattggacaccacaaaaggttacagctatttacctcagatgtaatgcattctgagaagtatggggctaacggtgtgtcaaccaaaaccaatctgtaaagctcgcgcatattttgagcaactgcaagagatgcaatgctattgcatggcaaaaagaacacttagtatcataagaagacctccactcaacagattcgataaagaaatcaccagaatacctgtcaaacattcccaatggatggcatttctccaatagttcattaacatctctctcatgcaatgttccggtaacaataagtacaacattgtcgatcatgtggccatacctgcaaatgttatctcatcagaccaaactatgctgcattactaaagttgggcacattgacatgtgcagacaaaacagaagtgaaagggcatatcctagcaatattgttgcttacgttatatactgtaagaatgtggatagtggttcagtcgcctggcacatcatgtgtttgtactcatcaaccagtttaagagtgcacttctccacaattgtagttgtgtgcaggggtgaaggttctgcagttaatcagaaataagttcatagtacagatgtatcacattagcgtgtaacaagcatgcactgatgcactgcaattatatcacgacaagcatcaacgcaaacagtattccatataagaatagggacatgtggattctaggaactatagcaattattcctaaggaaaataactaaatcctcagtggtttaccggaattcgatcaaaatatacccttccgagtggtctctagtaaaagctaagttgcgaccctctacatgtatagggcaaatcgtatcctttaactgctgcactcctacagaatgcgaaacctatgatactctagaccaagctaaacaacatatcagaacaatctgttaaagcgatccattgactttggtttcttgcaagcatagggcatcgtgggcttaatcaactacttgaaaatttcaggcaaagagcaaccaaattagggcaacccccaaatccccaaattggcatcgcaattcgcgcggaccggatcggggatcgccgatcgatcaggacagtcatggcggcgctacccaatccgatccgatccccccaaaaaaggagatcagagggcggcggcggcgagagagggaggtcgtaccgttctggaggtaggggccgtactcggtggcggtgaggtgcatcttgacgtcgtcgaggttctcgcactggcagaggttgttgtagtcggcggcggtgaggaggcccgaccggttcccccgcacgatggcctccaggaagccgtcgtggatgttgaacgagagcatctcccacccgtacatcctgtctctctcgccggccggcggcggcggcggtggcggtggcggcggcgggaggggtggatcgggaggagggggggagggaagccgcggcggtggcagatccgggtgcggatgcgggcggggtttgtatgagacgagacgagatcggtcgtgctctgctcgcgtgagcgtgtgggatccaggattggcacgtcggcagtgggccccgtgcccgcgtcagtgctcggggaccttccaggccgggccggggcgggtcaggcttagtgggctgggtattttggttgcgggtctaaagcggaaacgctaatacgcgcgcgcgtttcgggcctagaagacccagcgccgctgtgccagcgcgcgcgcctccttgctcttttttcctttttttaccatttttttccttttctttcccacttttttctgattttttttatctttagcatgttttgagtttgaaagtttataaattttgatttgaaaattttaaaatctgaacttgaaagcttttaaatctcaacttgaaagtttttgaatctcgatttgaaaattttcaaatcttgatttgaaattttttgaatctcgagttaaaagttttcaaatctcaaattgaaagttttcaaaattttcaatctgaacttgaaagttttcgaatctcgattctcgagttgaaagttttctaatctcgattctcaagttgaaagttttcgaatctgagttgaagtttttaaaatttgactttaaaatttaaaacttaaatcaaaagttttcaaatctaacataaaatattttcaatctattagtaaaaaaatctccagaatctttcctaattactatcattagtgttaagtatattaactaatactagcaaaatgcccgtgcgttgcaaccgggtagtagtgggatgagtactgtttgatcttaaaaaaaatatcgaagcaactaagcctgatcataagcatcaatgatgtgttctatgaccacaaaagcaaatttgttcttggacaattagtctactctacatgtgtggcatgtaaatgatgcttataacatgtgggcccgatgattgtagcatgggaataatggatgggcgaaaaatactgttgcctttgcacataaggcgacagacgaaaatttgcgtgacaaacaaataaactgatatttgtaagcctaacgagtgtaaattggaaccacaacactttgtaaggggtattacacactctctttataggttgaggtcatttattatcttgtattatattttcttttatgaaagttttatatttttttcgcattcgatgctttttatctcgataaatatttaaattgaagagcataagatttttatcttagcgaattaaaataatagtaagatgacacttatcctctagctctctcgtttttctctctccctcgcttcttctcaccactgctcctatccgttgtcacaggccaaatcaactactgaccccattccatcgtcgttggtcttctttttcctctcggcatgtgctcaaatcaaccaaggagacgtgatcagtgagtttggtgccaccgaataaggtcgattatgatgggtgcctctttctcatcctactgtcaccgtatctagattccctaagtttagaccatgtttgagaagagggaaaagaagaaaattaagaagatatgtaaaacgaggtgagtcattaatgcataactaattaagtattaattattttaaatttaaaaaataaaataatatgcataggaggagcggaagatggagaaaaatcgagcatgggagacggtccacctaagatgtacattagctaacacacgggtggtcgaccatggatgaagcatcgtgtgcgcgtcgagtcatggttctggggtagtgttgcgcttctctttagcgacttcgagctcctcgtctatgctattgtagcctccgggcactggcggcatggaaagctcatgtccgcatgcgatcaacactcagaatgcgacgatttagcttagtttagggcacatgaccaaaaatatgcaacgttttcttctgtctcactatcccgatctgatgctatgagcggaggatgattgttggatgcttggagtgaaaagaatcccgatccgatgtgataagcggaggacgattgttggatgcttggaatgaaaagaatccaggaaatgcacattactacaacaaaaacatttttacatatggtcaaaactgatttttttttcgtgtgatttgaccaactgtctgccctgaaaggtgtacggaaatattgatttttccatgcgggtgacgcatccacatgcgaaattttgattttcgcatgtgggcgcctaagtcgtcctcacgcgaaaatgaaaaacgcaaagaaattccaaaaatcaaaactggaaccataaccctagccagccgccaacgccatcatccgcccttcccgtcgccgccatcggcggagaggcggcgggatccgggcaggagggggaggggacgcgtggaggccggatcagcccctcccgtcgccaccgtcggcggaccgcgcgcgtggaggccggatccacccctcccgtcattgtcgctggagcccatcgccctcaccccccacaaccacggcccacggtgccctcgtacagtgcctcctccctagctgacaacacccttatcccgatgagcaacgccctcgcacatcaccctcccccagccagcggtgccctctcagcggcatcaccctattctccggcacaatggtggcaacctcttcacggtagtgccttggcaacagcaccctacttgcggtgcacaacggcatgcccaccaagcttccacagcctcgggacggcggcgtgcttggcctccattgatcagtggtgccggtgttttagtttttatgatttaattttctggaatgattttgatttattgttgttggattttttattttatgatttagtggatatgtgattttgtgattcagcggggtgaaggacgaaaaatcaccacgaaaaatccgaatatttatattagttatagtttatagataggtagttattaagactaaaggggagggggaacagtccccagtctaaaggcgtacatgtcccaaccttttactttattatttttcattcgcacgttttcctaattggtgtgtgtgttttaaaaaatatatatacagcaaagttgtttaaaaaaaattgtattaatatttttataacttttttttagaattacacagtacaacgcaaacacacataacgcacgcgcactcactcctatgaacacatgcaagtaaaccctacccctataagcatcttcgaagactggaccagcaaatactggagagattgactatgagcatcttcgaagactgggccggcaaatcctggagagattgacgaagtcaccacaggtgcctcatcttcgaagactgggccggcaaaccctagagagattgacgaagtcaccacaggtgccttgctgtcgacgggtacgtcgcctaccactgaaagcacaacgccgttaacgcactcactcctatgaacacatgcaagtaaaccctacccctataagcatcttcgaagactggaccagcaaatactggagagattgactatgagcatcttcgaagactgggccggcaaatcctggagagattgacgaagtcaccacaggtgcctcatcttcgaagactgggccggcaaaccctagagagattgacgaagtcaccacaggtgccttgctgtcgacgggtacgtcgcctaccactgaaagcacaacgccgttaaaatcctggaaaattcactcccatagggagtcgaacccaggacctcaagtgttactgaggctcttgtaaccactaggctacaggacctttcactaatatttttataacttaattaaacatgtatgtcgttttgggtacgtgggagagaagtttacaacctttcctcccgaactaaggggtgcctttgatttgtaagaaaaaacatagaaaattagatgatttcaatcctatatgaaaaattcctatgaaggcatttgaattaaatgattgaatcatatcctttcctttggaatctattatattattaaaacagtcttgaaaaaaggcaccacgttcgctgtggaggctagaaattcccacattaatcggtgaaaaagaaaaggagagtccaactagaaatacaatttaaaatagttgaaattcggaattaaaaataaacactattgaaagaagagcccatataagaacccaatacgaaattcattaatattcagaataaaaaataaaataaaatccgaaagtagaaaaaaaagaaagaagagttcgagtagaaatataatttaaaaataactaaaattcagaattaaaattaagcaatattggaagaagagtccatataaaaacccaatatgagattaattaaaattcgaaataaaaaaaataaaaaatcgaaattagaaaaaacaaaaagaaaaattcaactaggaatacgatttaaagttagctgaaattcaaaattaaatataagcaatattgaaataagagtacatataagaacccaatacgagattaaaaagagagttcaaataggaatgcaattttgaaacgactaaaattgaaaataaataataaaatattaaaagaacacaatacattattagttaaaattcgaaataaaaaaaataaaccctaaaattagaaaaagaaaaataagatttcaactagaaatacaatttataaataactaaaattggtgataaaaaataaagactattggaagaaaagactatctaaaacacatgacgagattaattaagtaatagacctataaaagagtagagtggtggcggttaatgggacatctaaaaattattaataaaacaccaaatagaatgatggcgggtaggtcgtgaagcaaccgatcaaggctgttggcgggacttctagaaagtaaaaaaaaaataagccccaatgataatcatatttgatttgtaaaatctcaatgacaataaaaataagaggcagcggacaggttgtacgggagtacaatggcaaagctgccgatggtttggggaacttctagaaagtaaaagaatgaattccaacgatagttatgttcgatttttagaatcccaatgacaataaagaatagatagcggacggtcgtagaggagtatagtggcagcgcttgacgggatttctaaaaaatataaaaaatgaaatccaatgagacaataaattataaaaactataaggtccaattttaaaaggttcgggcttctgaaaagtaaaaaaataaaccccaatcatgatcatgtttgattttaaaatcttaatgaaaataaagaagggaggcagcgggcgagccgtattggagtacagtgacaaagtcgctgacgttttgacgaaacttctagaaactaaaaaaaatgaacctaaacgataattatgtttgatttttaaaataccaatgacaataaagagatgaggcagtggacaggccgtagaggagtataatggcagcgtttgacaggaattctagaaattataaaaacgaaacccaacgagacgataaactctaaaaattataagatccaattttaaaaggctccaaagagaatgaatagaaacaatgatagatcaagcaagcaaataaagaaggatatgacagaagtaacgggtagcaactggtgtaaaattataaaattagaagcacgagaatgataaggtttggtctttcaaaccttatcatataaaaatatataattttgtatgggtgctagccgcgcaattgcgcggtaacaatcctatagagattttggagaaaaaatggcaagagatccaacctcttgaaaaatttcctattggtcaatctctctcatttgattcatgtatttttttctactgcataatcaaatgattattcatgtattttgtattcctatattttacacttgcattcctatcaaaatctttttttcctatttcttcgttttctcaatcatgtgtttcaaagggccttaaagcctgtgttcgggagtgagggttgggaactttcactccctagcacacaaaacgaagcactgtttagcgcgtgattaattaagtattagctaaaataaatttgaaaaatagattaatatgactttttaaagtaactttcatatagaaattttttttagaacacacaccgtttagcaatttaaaaagcgtgcgcgcggaaaacgagggagatgagttgggaaagtagagataaaaacttagccaagtatctctgtagtgtgtttttcatggcagtgattcccctgttgaagctggtataaaggagttggatactttgggtagtcattttgctcggtaatgtgagcaacaatatctacagcgaaatatcacgaatgcggaatctattttgccgtggctggctttctttcaacaaagatattgcaaggggaaaaagaaanagctttgttccaatggaatgaggttcctatcatgctttctataaaagagtggtatttccctacatgcatttgtgtaagtgtgtaacaagtgattccttgaaacatggcaatcactttctgaatatcctaccaccaatgtgatacataggtcagattattccctagtggacaattgtgaacacattacactaatggaatatttgtctttcccttgatgaatttatgcgatactttatccaaagatcgtgatcttcatacatggtcttacgactttgctgaggcctgtgtttttgggtaaacagtcacctccgcctggtcactccgcctggtcactgtgaccctcttttgcgagggggcaccccttctccaagatcacgattgaagaaaaattcttcaaatttagtcaaaaacgttggtgtgaaattcagagaacactaatttataacacagtgtgtcttattaacccaatctagaccaataagattttcaccattgtgccgtaattgcaatgcttttggtttagcataaaagggaaacccaacccctgtacgaggaagcaaaagcctagtgatcttctattgtttgacaattggagaagaaaatggatgattggcttatgggtggtgacttaatggctggctcattatttggagataagaaactagtggaagcttggagcatagattgtttcctgaaagatcatgttgtcatgttgatgccatcctttagtagatgtttgacatttggagaaaatcacacttgggagttgggactgtacttagagaaggctactgcaactgcaattcaaagggtgtagttcacatcaatcaatggcctttagcacatgaagttctgatgcttatgattcgcatcctaaattcctaatatctgaacattgtagatatagtttcagacttctgctagtttgcttttggaaccttgtgggctgttctgtttgactacttccataactgatgaagtttgatgctaactgaggaagatgaagaaagcttgatgtaactgttatgttcttttaaaaaaaataaagaagaagtctgatactaattgctatcatgataatgacgggatggtaaaggtccactttgccttgggtgcctcagccatgagtcatctgatattctttccctcaaacaccatccaaaaacactgaacaggtagtactgatgccctgctactgaagagcctctctgaagtatttctagaatcctaaatagtactactctttggtgaaaaatactttcttttttgggggcaaaactctacaaaattgaaggcacaaaattggtttatatttgtaaatgagcaattttacggtccttgagaagataccatgaggtactaaaaatttagtataaaatttggtacctcataaaatctagatattaagaggtataaaatttacaataaaaaaagtggtaccttatagtatcttatcaagaactgtaaaattgttcatttgtgaatatacccaaaaaaaatgtgaattcattcactccaatgcccccggtatgattaatgccatgaataatctagcaacacaattacaccaaggtatacctgtgtgatacatgcaaaccacaccttttattttgcaagattatgcgaaattacataggtaaatgcaaaccatatttctgacctgtgtaatttattactactatatgtaacttccttatagaatgaaattgtgtgttagaagtagattgttcatttcaagtatgcttatggtatccgttattctgacttgtcaaaatggcatcatctccttagagaaaagcttatttcctttgttaaaggttaacatcaaagcggttctatcatatggtccatggcttattcctcatgcatttatgcatcaacgaaatcaccaaagttttcatgatatcataaaggtcaagtgaagtccatgcactcaagtgaccagaaatttttggacctgcctaagatcagcaaatctagtgaagccatgctgttgacatgtgagattaaggtcactctccaaagtccattctactccttttcttcctttcttgacacaaccattaatctcgtgctctgcttttgtccatggcttgttgtgttcctaacttattgttcttggccacttggttccattcagagaggagtagtttgcactcacaaagtgaagtgacaatcttctttgaagggttaggacatgatcacctgttaagtgagattctgtcttgacttgtgagcagagcaaagcagcaggagcagagcttcacttgatttgcctcctctctggtgaagcagagatgaactccccaaattatcatttcaaaagtggcaaatcaccacttcaactatatatataataatgttcaaattgtggtgtatacatgcttatgaataaagtcgaattttcttctttatttttcttctatccaccgattttctccctatatcgcacgctcgttattacaccagaacgaaaaccgattgagctcagagcatcctgtcggagaggctgggcagccgccggaagaagttgacggccgccggcggcatggggtcccggaacatcgggtggcggaggtagtagaacccgccggcgacggccaccatcttggacggcatggcgtacagcgcgacggcgacggcgaggcagacgccgacgaagatccggctggcgcgcgggtccctccagctcaccagcgcctgcaccctctccccctgcgccgcgacgtcgcccatgacgcgctgcacccgccccgccagcgtccgcagcctctcgtagcgcgcccggagcacctccggcggcggcacggcgtcgaactcctcctccaggtcgtcggcctccaccgtgtcggcctgcgacagccgcgcgtccatgccggcggggccgcgcggccggaaccggtagtaccagacgcccatgaggaagacgtagagcgacgccgtgggcacgggcagctccgggtaccanacgaggacgaggtagaggacgtgaacgagcacggtggtggggcgggctgcgccaccgctgcacgctgtcgagccaccgcgcgagcccgacggcccaggcgagcacccccatgatgcggaaccagttcgccttggcgcgccgcacgctccacgtgtgcgcgtccacgtcgagcatgtggcgcaccacctcccgccccagcggcggctcggaccgctccagccacgcggcgacgacgcgcacggcggcggcgcgcagcgcctcctgctgcgcgacgccgatcgggcggaggtagtgcatccgcggcagcagcggcgaggtgtaggtggcccaggtgtccggcaggtgcgccggcgacgtgaaccgcacggcgagctgcacctcccccatcttcttgagccccgaccggagcagcacgagcagcgggtacgacgccgtgtacgcccggttgctctccagcgtggacacgcgcacccgcaccttcccgatccggtagtcctgccgctgctcgtccccggcgccggcgaaggcgaacatccgccagttgtcgaacaccgccaccgtgagcaccgtgcacgggtcgtacacctgccacgtgtactgctcgttccaccgcgggttgaggctgtccgtgacggtgcgcgtccgcacccacttcttgccgtacttggccacgcagtaggcgtccgtcgaccccttggcgccgcccttcgtcttcatcggcagcagcccgcacgccccgatgatgcccagctccagcacgcccaccggcggcctccacagctgcttcgccgtcggccggtagtcgctgcacacgtgcgccgcctcgtcgagcacgtggtaccctccttccaggcacagacggaggtgaagccggccggagtagaaccccggcgggccgccgccgggaccaatgccgatgtcggaggtgccaccctcgaggctgaaccacctcgacgcgacgagttgccgctcgtggagacgctgctcgacggagttgacggggatggtggcgtgtccgagcagcgccggctccttgatcatggagcggtcctcgacgaggacgacgaggctctcgtcgagcggctcggacacgacgaacatgaggtcctcctcccacgcgaacgccgagccgctgctcctgctcgccaccgaccgccgcgtcctcgccgactggaacccgacctggatcttgacgcgcacgtcgaacggcagccccggcggcggcgccggcacgcgcaggtcctgcgcctcgatcaccgacgcgcgcaggtaccagagcttgggcgactggtacaccttggagcgcgtgtacgcggcgtacggcgcgtcggtgttccacgcctccgggaacgcctcgtcggcctgcgtgccgatccacaccgccaccatgatgtcgccggtcaccatgccgggctcgccgccctcgagccggtaccactgcggcgccagcgggccgtccggctggtcgcggaccggcacgtcggagaggtcgaagcagacgccaccgaggaaggcctcgatcggggacggcgcgccgccgtcccagacggatatctccagcgtcggctccggcttggcgtggttgatggcgaacacctggttccactccgggttgccggtgccggagacgtcgcggccggggcgcgaccggagcgtgtgcgggccggcctggatcttcacgtacggcccctcgcaggcgcggatgccgcgcaccttcacgacgcggacgaacaggtagcgcatcggctccaccaggtcgtacgacgactgcaccggctcgacggcgtcgccggtggacacgaaccgcccggagatgacgcgcggcgaggtggcgtagtactccggccccaacccgccgctcaggtggcgcgcgatgcggacgcgctccgtggccatccgcgtcttgcgcacctcgggcgggtaccccgcctcgccgccgtccggctccggttcaggctccggctccggctgcggctgcggatgctgatgctgatgcatcggcggcgccattggcccgtgcggcccgtgcaccgccggcggcatcatcgggccgtgcgggccgtgcatcggcggcatcatcgggtgatgcatcggcggcggcgcctcttccacgatgatgacagggggatgcaccggcggctgctgcacctcgacggcggcctcggtcggcgcggggatgtccgggaggtccctgggcgcctcaggcgggacctcaggcggcggcgcgttgtcaccaccaccaccctccggcggcctatcctccggcgaagacggcgcctagtcgtagtagtaaatcttgaggccaacctcgccgcggatccagctgagcaagctccgcttctcgaacgggaagtacacgatcccctcctcccctcgccgcgagaactgcgacccgtagatgcgcacgcggccgaggaagtgattcttcccgccaccgccgccgcngccgccggaagggttgaagcggcggtcgtggtagagcgagacgtcgagcgcctcggcgtgcatggcggccgggtcgtgcacggcgaactcgagccgctcgtgccactgcgggctgaggtcgcgcggcacggtgcgcgtccgcttccgctgcccgtcgaagtccacgacggcgaaggcactcgacgtgccgagcccgtccttgggcaccaggtcccgcgcgtccaccacctccaccgccagcctccgcgccacccgcatcgcccccggcggccccggcggcggcggcccagactccggcgggggcgcaccggccgccatggaaacagagtggaggtgggaaaggaggtaagcgaacgagagagaggggagagagtggcgaatggaatagggttcgcttatgatgtgaggctcatggattggatgctttttttgcttttggacgctgcggcggcagctgctactatcatactatggtagctagagtgcgtgcttttggagggagaatctgggcaaagagtgagaggaggaggaagatggatggcggctttcttggcctggaagctcacgatcgctttggtgctcgatcgatggcgcagaatctgatctgcttgcttgctttttttctttcgagtatgtgtgcaggtgatgccggtgtgatctgaattgtcgccgactcgtcgtcttgctgctgctgccgctgcttcttcttcccgccttttttcacctgcgttcccaacagaggcggttaaataacttccaccaaccgcgcgcggcgccggaaaggaaaaaaagaagagattttacacgtgtcatctctcatctgtcctgtgttgtatccttctcggaggattttgatagtattttccttagaagttctaacttttctgttaaatcaaatgtttgaacgtatacataaaacataaaatatgaaaaaaaaaaccaattatacagtttacatgtaaagtgcgtgacgaatcttttgagactaattacatcatgatttgataatgtggtaataacggattaattagtcttaatatatttgtctcgcagtttacaggtagaatttataatttattttgctattagtttacatttaatacttgaaatatgtgttcgtatactttaattttttttaaatggaactaacacggcccttgtgctttgctgcacgctgcacggggaatgcccgaccttttcaggttctcgcctctttggggtaaacgtatctgtttcttccaagagagttaagagtatatatatatatgagtatatatatatatatactactatgccccgttccctaattttttttccaaaaacatcacatcgaatctttggacacatgtataaagcattaaatatagataaatgaaaaaactaattgcacagttagggaaaaataacgagacgaatcttttgagcctaattagtctatgattagccataagtgctacagtaacctagtgctaatgccagattaattaggctcaaaagattcatctcgtggtttctatgcgagttatgaaattatttttttcattcgtgtccgaaaagtccttccgacatccgatcaaacatccgatgtgatatctaaaaattttctttccgcgaactaaacagaccctgtgtacacagtacacgttgcaggggtgcagagttctctgcttttcttgtagattcagtgagatctatgcgtcgtctttgggcaggattaccgattacacatttacacccaatcgtcaaatggccacgtgcaccaaactagaagaagtagaagaagaactctgtttcttttgctcaaaattgcgcaacatcctcaagatgttgttcgacgagacgacggcgagcttaaatcacgagatagctgagtatctccagttctccacgtcgcagagcaaaattagacccatccccaacaaaacacgtgcgtatcatccaggtatacacggtgtatacttagcgtggcactcaggctatctatgtggaatgtggtgccctgttcggtactccacgtggcttgcttatactggtgccacgtaagcactgaatgagaaaggcgttattttttttcctgattcctacttatgcattttctttctttcaaaataaaatcactttgcttatttcatttcccgcatataattccctaatattttagccttttttaagtcgttggttaaattttactcttatcccgattgttcacatttgttccgtcttaatgaatatcttcctacattcgccccgagatctagacaagaaattattgagcacatgagccactggcccaccgcccaagatactttctacgggtagtctaaccaccacctcacatgtgttcctctaccctctattctccagtggtttcgcccttaaccattctatcatagtcatagttatttttttcttctcaaatatttccatgtgggcacaccgtgtgcttctgctcctcggttgcttgtcgtctcctgatacatttatactttgtttctttttcctctttccctctgtcacttttgtctcgaatgcctcatgatcatttagaccttacaacccttattgtcactaacgtgcatagaggttttaatagccttaccattattgtcttgccacctttgtcactcatgcctaggctacctttatcccaacctccttaaggatactaatgatgtcaactatgttgactaatttctctttttattacttaaaagtgtagtcattcatcttccccttccctccctcacttcgtgtgcagtgcatactgcatactctcgcataaaaaatagaaaattccccagataaatagttgttagttaaaaaaattcccattctttaggctagatccattcccagtgatatagccaaaagtatcagaatttaggtattgctaaaactatagaagacaaaagatgaagcatagtcaaccctacatacaacgaatcaaaatgttaagggttcgacccattttctcgaagaaaccttggaatgaaccgcaatgtcgattgcttagctcattttctctagaaaatcttttttttttgaaaaagaaaagttgcctatccatttctactcattgaaacgggggaaaatatgtagtgcaaaccatatatacagtggaaactaccgttga

SEQ ID NO: 8894 - DNA, 2288 bp, Oryza sativa
cgctgaactaaaacgtctcagcactacccgacttggcacaaattagccatgtaaaaggaactcagcgtcactatacattacgctgacctcttaataggtttaaaatataggcatgcgctgaaatcctgagtagtatttaactttatccgttattaaaaagtgcctataagtattaaaaatagataaaacaattttaaaattaagtactgaatttaaatttatatgagtaattcatagcacatactacgagtacatatgtaattttcaattattaaataaaccaagattagtataactatgtcttaagcctatggtaaaggttagcatatatacattagaaaagtgctctcacgaattgtgtgtatctagttaatcctagaatgaattcatattggtatatgtatttctttctgaaaataggattccaaaggttagcctatctgctattaaatacatacatgcataattagcccaagggcaaaaaaaaaaacaagcataccaaagtatattataagatcacaaattacccatcttggtcatctcccagtcgcagagaacatattacgacctctgctgattcatcatcaaaatagacatcctgaaaggagaaaacaatggaaatccactctgtcagaagtacagcttcaacaaatatggttatagacactattttccgcatgcaacattccgttctttttacatggctgattgaagcaaacgttaaggagttgtactgaaaatttaatcaaattgaacataaaaccaggtgaaaagaacaaaaaagcaataaatgggggtaaactagaatccttaaatatacctcatcatcatgttcaagtgtcccttgattctgcattcaagaaacaagcatcattagtatctagtatagtaaggctgtaaggaactgcaaatctggaatatggtagagctgctgagtcactcaagtagataatgcaatagcacgagtaacaggatgatattttatccaccatagaatcctctcaaattaaacctaacaaaatgtgctggcagagaaacatgttgaccgacgcaaaccatcaaagcgatagaaacaaaatcattcacacacacacctcttccatatcatcattgctatatatcccatatcgcaatgcctggctcaagttattagtaagagctaccacatcataatccatgtctcggaagtcgtcatcatcactatccctaccacagtcatgaagtgatgttgggcgcctgtagcagcaagacatatagagaaactattcagtgaaaaaacagaagtaaagacatccaagtttagcatacaatcaaaaaaaacaaagagtcacatgcccacaagcccaatgatacgaattctccacctcattatgcttgactttaagcatgatttatatcttatacatttgcataaatgttctggataaaacgaatggtcaaacacttatttaaaagtcaacgacgtcatctattaaaaaatgaagggaatatattctaccgatctctcgtaaaaaaataatctcataaaatgcatggacatttgcgtcatatttcaccatactttcagaaccgataagatttagttctaggctaataagccttgaacaaaacaaaccaaaaataatttatagataaaaccaaaaaaaattgtagacagatatatagcaaatcccaacttttacatgtattactagtgatttaaaactaagggtagaaaaagataaacaatgatggaaaaatttgagaataactgaaaactttactaatctcaaaatttaatttttagctgcgatagttagtcaacaagaagacaatgaaagttatgaaacttccttagtgataatacacaaatgcattccaggagtactcatgcaatatatagccactcagttgattcttaacactctgtataacatatctgttgttttttcaggaaaaaaaagtaaaaaaagaatttgaaacatatttaatcactaccaaaacctacaaccttacccacaaatgcacaatcaaactgtgcatataatctggtgaagggaggtgtaggtgccaacgaaggcgatgcatactccgatgactagtattccgacgatcgccgccacctcgaagcggccaactccaaatcgaggcatgtagatcttgaggtagctcaggcatgggaacaacacgacaatggtgaagttcagcgaagatacgttgaacggcatgaggtagctgaagaaaggggtaccgtgcacgccagcaccaccgtgctgacaacgacggctgtgctggtgagcaccctggta

SEQ ID NO: 8895 - DNA, 7235 bp, Oryza sativa
gctatttataggattcgtgcgaagagattggatcaaaaacaacgggatttggcgagagaaaaacgagggtttatccgagttcgccggaaaaacggagctcgaaaccgcgtcgaattcacgcgatatacaacgatattcaaaggggtttcttagggataaggtagaggagatcgaggggaatccgtttttgcaaccaattttggaaacggagcacaggatgcgacggattttgcgaaggaagcggcggcgcacgcacacggctcggctctgtacggctcggctggaggaggaagaaggtactgtagcgagggtagataaagtagacttttcctgggcttccttttccttacttgcttggcccgattgctagagggaagaaaactggacttcggctaagagagagggagaggagtgggctgaattcggcccaaacaaagaagaggaattttaattaactttttaatttaaataatttctgaaatgatctttcatttattaaaaatacttccaatgctcaaataattctggtaaaaatacagaaaatacttgggaatacaaagtatttaataaaattttatctagctcaagtttatgttcaaatttttcatagattttattcacacacttgctttaattattaaataaattctaaaaattcctttttcacaacaatttataatttagcgattttcagggtgtgacaaagtttcataactttcattgtcttcttgttgactaactatcacagctaaaatttaaattttcgagttagttaagtttttagttgttatgaagttttttcatcatagtttatcttcttccacccttagttttaaatcactagtaacacatataaaagttgggatttgctatatatgtgtctacattttttttggttttatctataaattatttttggtttgtttcttttagggcttattagcctacaactgaatcttgtcgattatgaaagtatggtgaaatatggcgcaaatggccatgcattttatgagattatttttttatgagagatcggtagaatatattcccttcgtttttttaatagatgacgttgttgacttttaaatgagtgtttgaccattcgtcttatccaaaatttttatgcaaatgtataagatataaatcaatgcttaaagtcaagcataatgaggtggagaattcgtatcattgggcttgtgggcatgtgactctttgttttttttgattgtatgctaaacttggatgtctttacttctgttttttcactgaatagtttctctatatgtcttgctgctacaggcgcccaacatcacttcatgactgtggtagggatagtgatgatgacgacttccgagacatggattatgatgtggtagctcttactaataacttgagccaggcattgcgatatgggatatatagcaatgatgatatggaagaggtgtgtgtgtgaatgattttgtttctatcgctttgatggtttgcgtcggtcaacatgtttctctgccagcacattttgttaggtttaatttgagaggattctatggtggataaaatatcatcctgttactcgtgctattgcattatctacttgagtgactcagcagctctaccatattccagatttgcagttccttacagccttactatactagatactaatgatgcttgtttcttgaatgcagaatcaagggacacttgaacatgatgatgaggtatatttaaggattctagtttacccccatttattgcttttttgttcttttcacctggttttatgttcaatttgattaaattttcagtacaactccttaacgtttgcttcaatcagccatgtaaaaagaacggaatgttgcatgcggaaaatagtgtctataaccatatttgttgaagctgtacttctgacagagtggatttccattgttttctcctttcaggatgtctattttgatgatgaatcagcagaggtcgtaatatgttctctgcgactgggagatgaccaagatgggtaatttgtgatcttataatatactttggtatgcttgtttttttttttgcccttgggctaattatgcatgtatgtatttaatagcagataggctaacctttggaatcctattttcagaaagaaatacatataccaatatgaattcattctaggattaactagatacacacaattcgtgagagcacttttctaatgtatatatgctaacctttaccataggcttaagacatagttatactaatcttggtttatttaataattgaaaattacatatgtactcgtagtatgtgctatgaattactcatataaatttaaattcagtacttaattttaaaattgttttatctatttttaatacttataggcactttttaataacggataaagttaaatactactcaggatttcagcgcatgcctatattttaaacctattaagaggtcagcgtaatgtatagtgacgctgagttccttttacatggctaatttgtgccaagtcgggtagtgctgagacgttttagttcagcgtcatcagggttagcgctgaggtcacggtctatttttttaaattagtttgacatggtttatttttaaaatttttatagaaggattaatttgtcaaaattacagtgtaaacagaagtatccaaatcaatacgtatagtgatagaccaatcttttcctcttttctttcttcccacgtgggcctacttagtccattcaatcgtgcatggaaccttgcccatgatgctgcatgagccatgcacaactgtgtataggcgggttgcatagcatcgtacacgcgtcagaaaagcattatgccacctagaccaacaggcagctggcaaaacaaccatcatgagaataatagatagattattattttgtttgctctccgtccagcagtatgctacctgcgtattagagggattattaattgagtacctatatttatgtcgccatatttttcatgaaaaaatagtcaacatgtatttacattgtaagtctttaaattacatatgtaattttagtgtatttacaatgtaagtcccaaaattacatatcaagtctctaaattacatatgtaattttctaattttacaatgtaatttaactttgcaaccggttgtagacataatggaggaccgtgtacacaatataggagaagaaaaagcaaatttattatcaattgtacgagtccacgaaatgcaaatgcaaatgagcacataagagttggagcttgataaggtgtcccaagttagttacgctttcggatagctttgatctgacacaaaaaaatatctgactgtagtcaggccccaaatatgtcgccacacgtgaagcaaaaccttattaattttgttgacataaatgaacgaacaactaataagcatactgtaatagtgtcaatcggttaattaattagcttgctagcttcaggggtgcaaatattatttgttttttcacggtttccacaaattcccgatgttgttcttgttcctttttctttggctaaaatttaagttccaaaaaaagctgtgtctatgctaattttgatcagaagtcaaaaaaggtcatcttttttaccaagggactactagatggatatcccaataacttccaaaggctctacgatttgagataattcaatatgcaacttcttcccaagggctgctctactatttggaaataatttaacatgaacttcgcaagggcgctacggttttaagataattcattaaattgataactgcattatgtagtttgatatgcgtacatgtaatcctcaagatatctctacgtataactaatctcgcatatcctgcccattcaaaattagatctcattttaactctcaattaataatcgattaagctaaaaataccttgacaaatttttctgttaagatttgttgaattttcagccgttaatctaacctttagatccgtgacctctttgtgtcagcgctcccacaaaacgcttaacctgcgagtgctggacctggactacctggtactgtacatccatgcatacgactgattatctttgtcactcactaattaaatagtttaaagttgttgttaaacgtctggtgtactgtttcctgtcaacttcactttgcccaaaagcgtacaggggatgaaagcctggtaatgatgagagagagagagaggaggtaagttgaggaaaaaatacagtgtaaatatagtacttttagggtgtaatttgttgtaattacattgtgactcgttgtaaattacaatgtaatttcttttagatttgtatgtaatttatttttttccctatttttcactattacactttaataataaattatgtgttatgatacatatgataagttatacatgctatttccatatgtgtattaggtaattattaaaaatctgaggtgtttggtttaaaagtctgtcgggtgatctataaattcattattactaataacaggtacacacacaaacacaaatattatagcggtggataagagctctatcgatgaggctctcctccatggcaaacatgagcaagaagatctatgggatgatgaggtggtttatgacgtggagcagcagtagatcctcggctcgttctgcatgactggcgcttccttcaggagaagctgcctcaacctcagcaacgtgatctgcagcatcgggatgctctacgtgtcgtacgtgctatcgcagggcaggtggcccagcctagtgctcttcaccatggtcggcgccatctgtttccacaccggcaacctcaacgaccgctgcatgtgctgatcgcggcgtacggagatactccttcggcggctatggccggacggccatcggcctcgtcatgtacgttgagctctacctcgttgccatcagctttctcatcctcgaggccgacaacctcaacaagctccttccggcacggtggtggagatcctagtgtactaggtgcacgggaagcaattgttcgtactcgcgacggccactatcatcctcccgacgacgtggctcaagaacctcagcatgctcgcctatgtctagcggctgggctcgtctcgtcggtggcgctgacagtgtcgctgctctgggccggcgtggtcgacaagggcttccacgtggctcttgagtctgagcgggttgcccactgccctcagcctctacttcctctgcttcgcaggccatggtttcttcccaaccgtctaattctcgatgaagtccaagaaagattttcctaaggtatactttttaaaatgtatttatgtgttgtacttgataataagtttgctaaaatttatgataacaattagcaatctaaatttagaattatggttaatgaaaatttaaaagtcaatggtggaataaaattagcaataggtttaagaacatgaacattttgtttttttattacatgcatgcatggaagacatgcacactcataattgtttttgagaactcgtacatcactaatcatgcacacctcttaatcatcatcgttgctacattatcatcatactcaccattgcatggccctcatatattttgttggccctcatataagtttattttgatcatccaattaaaagtaagaattaggatatgacgaaatcaacattaaaatcatttattaaaataagttgtactatcccaaattaaaagatgttgtactacttataaattttgtaatgttaatttatagtgataaggaatggcgaatgcaatacggaattaatggcaagtgcaatattaacaatttagcatatatatatattgcataatgccataaatttagggtaatgttgggttggcctttcgaccagtttagcatgtgcagtgatgtggaggcatactgtgctacattacagcatatcaccccagcggaataaattggtgactagcgtggaggtgtattgttctatattacagcctatcaccccagcagaataaactggtgacttggaggcgattagagtcgtctctcaactatatttggttacctctcatccacccatgtaaaggcaatgtagcttaaagataaagctaatcatgagccgcctaatatggtttcatttatatgttaaaacctgaagttagaagatgcgtctagcacttaaaataaaagaattatattaaccatttgaattagagtttacgaaatttttttaaagtaattttatgcgtagtccaatacaattttagataaatcaaaaggtagcgtatctaaatttggaagatgtgttggatcataaacttttatatgccaagttaaaatagagatctattatgttgtatatcttcttgtactaagtttagactcaaccaacgtgtataagaattgttagggataagatgcaaaagtggtaggacattgactattgctcaattaactcatggaagtttcttgaacaatcttggaccattctccattcttttactgatacttatccatgatctaacggcatatattatatctactgttgcattcaattgtccatatatttagagatttgacaaccaatgataattgatcattggattatcagttcgaattatcataatttggtttatgaaaccatggcgataatgagaatggatcagtactccaataatgttctattcctctccaattaatgtgcaggttttggtgatctcttcagtgctgtgcagtctcaactacgcagtgacaacaatgttgggttatctgatctatggtgaagttgtgcaggcgccggtgacactgaacttacccacggggaagctgtacaccaggatcgccatcctgacgacgctgatcaccccgctagcgaagtacgtgctcgtgatctagcccatcacaacagtgaatgaggagaaattgtcgacgacaacggtggcggcagcggacgtcgagcacaacgggcttaccagggtgctcaccagcacagccgtcgttgtcagcacggtggtgctggcgtgcacggtacccttcttcagctacctcatgccgttcaacgtatcttcgctgaacttcaccattgtcgtgttgttcccatgcctgagctacctcaagatctacatgcctcgatttggagttggccgcttcgaggtggcggcgatcgtcggaatactagtcatcggagtatgcatcgccttcgttggcacctacacctcccttcaccagattatatgcacagtttgattgtgcatttgtgggtaaggttgtagttttggtagtgattaaatatgt

SEQ ID NO: 8896 - DNA, 8376 bp, Oryza sativa
ttgcgagttaagcgtttcgtgggagtgctgacaccaagaggtcacggatctcaaggttagagtaacggctgaaaatttgacaaatcttaacggaaaaatttgtcgagatatttttagcttaatcgattattaattgagagttgagatgagatctaattttgaatgggcaggatatgtgagatttgtacgtagagatatcttgaggattacgtgtacgcaaatcaaactatagaatgcagttatcaatttaatgaattatctaaaaaccatagtgccattgggaagttcgtgttgaattattttcaaatagtagagcggcccttgggaagaagttgcatattgaattatctcaaaccgtagagcctttggaagttactgggatatccatctagtaatctggtccgttggtaaaaatgatggcattttttgacttctgatcaaaattagcatagacagctttttctggaacttttaattttagccaaagaaaaaggaacaagaacaacatcggaaatttgtggaaaccgtgagaaaacaactaatatttgcaccactgaagctagcatgctaattaattaaccgattgacactattacagtatgcttattagctgttcattcatatgtgtcaacaaaattaatacagttttgctacatgtgtggcaacatatttgggggctgattacaattagattttttttgtcagatcaaagctatccgaaagcgtaactaactgggacacctgatcaagcttcaactcttatgtgctcatttgcacttcgtggactcgtacaattgataataaattcgctttttcttctcttatattgtgtccacggttcaccattatgtccacaatcggttgcaaagttaaattacatttaaaaaaacaaaaattacatatgtaattttgggacttacattgtaaatacactaaaattacatatttaatttacagacttacaatgtaaatacatgttgactattttttcataaaaaatatggtagcataaatataggtgctctgaattagtaatccctctaacatatgggtagcatactgctggactgagggagcaaacaaaataataatctatctattattctcatgctggttgttctgccaactgcctattggtccaggtggcacaatgcttttttgatgcgtgtatgacgctgcctatacaccccgcctatacacggttgcgcatgcctcatgcaatatcatgggccaggtgccatgcatgcacgattgaatggactaggtaggaagaaagaaaagaggaaaatattggtctatcattgtacgcattgatttggctacttctgtttacgccgtagttttgacacattaatccttctataaaaactttaaaaataaaccatgtcaaaaactacttaaaaaaatagaccgtgacctcagcgccaaccctgatgacactaaactaaaacatctcaacaccactcgacgtggcacaaattagctatgtaaaaggaactgaacgtcactatacattacactgacctcttaataggttttaaatatatggcatgcgctgaaatcctgagtagtatttaactttatctgttttatcaaaaaagtacctataagtaataaaaatagacaaaacaattttaaaattaagtagtgaatttaaatttatacgagtaattcttagcacatactacgagtatatatgtaattttcaattattaataaataaataaaccaatattagtattactatgtcttaagcatatgataaaggttagcatatatactttagaaaagtgctctcacgaattgtgtgcatctagttaaacctagaatgaattcatattggtatatgtatttcttgctgaaaataggataccaaaggttagcacatatctgcttttaaatacataaacgcataattagcccaagggcaaaaaaaaaaagaggataccaaagtaagttttaaggtcatctcccagtcgcagagaacatattacgacctctgctgattcatcatcaaaatagacatcctaaaaggagaaaacaatggaaatccactcagtgagaagtacaatttcaacaaatatggttctagacactattatccgcatgcaacattccattctttttacatggttgattgaaacaaacgtttaggaactgtactaaaaattttaattaaattgaactaaaaaacaggtgaaaagaacaaaaaaaaagcattaaataggggtaaactagcatccttaaatatacctcatcatcccgttcaagtgtcccttgattctgcactcaagaaacaatcatgtatcattagtatctagcacactaaggctgtaaggaactacaaatccggaacatggttagacctggtgagtcgttcaagtagataatgtaatagcatgggtaacaggatgatattttatccaccatagaatcctctcaaattaaacctaacaaaatgtgctggcagagaaacatgttgactgatgcaaaccatcaaagcaatagaaacaaaatcattcacacatacacctcttccatatcatcattgttatatatcacatatcggaatgcctggctcaagttattagcaagagctgccacatcataatccctgtctcggaaatcatcatcatcactatccctaccatggtcatgaagtgatgttgggtgcctgcagcaacaagacatatagagaaactattcagtgaaaaaacagaagcaaagacatccaaggttagcatgccatcaaaaaaaaaaaacaaagagtcacatacccacaagtccaatgataagaactctccacctcattacgcttgactttaagaatatcatttatatattatatatttgcataaaagttttggatgaagtgaatggtgaaacactcatttaaaagtcaatggcgtcatctattaaaaaactgagggaatatattctaccgatctctcataaaaaaataatctcataaaatgcatggccatttgcaccatatttcaccatactttcagaatcgacaagattcagttctaggctaataagccctgaacaaaacaaaccatagataaaaccaaaaaaaaaaaattgtagacacacatatagcaaatcccaacttttatgcgtgttactagtgatttaaaactaagggtagaagaagataaattatgatggaaaaacttcagaatatattaaaactgaactaatttcaaaacttaaattttagctgcgatagttagtcaacaagaaggcaatgaaagttatgaaacttccttagtgataatacacaaatgcattccaggagtactcatgcaatatatagccactcagttgattcttaacactctgtataacatatatgttgttttttcaggaaaaaaaagtaaaaaaagaatttgaaacatatttaatcactaccaaaacctacaaccttacccacaaatgcacaatcaaactgtgcatataatctggtgaagggaggtgtaggtgccaacgaaggcgatgcatactccgatgactagtattccgacgatcgccgccacctcgaagcggccaactccaaatcgaggcatgtagatcttgaggtagctcaggcatgggaacaacacgacaatggtgaagttcagcgaagatacgttgaacggcatgaggtagctgaagaagggtaccgtgcacgccagcaccaccgtgctgacaacgacggctgtgctggtgagcaccctggtaagcccgttgtgctcgacgtccgctgccgccaccgttgtcgtcgacaatttctcctcattcactgttgtgatgggctagatcacgagcacgtacttcgctagcggggtgatcagcgtcgtcaagatggcgatcttggtgtacagcttccccgtgggtaagttcagtgtcaccttcacctgcacatcctcaccatagctcagatatcccaacactgttgtcactgtagagttgagactgcacatcaccgaagagattagcaaaacctgcacattaattggagaggaatagaacattattggagaggaatagaacattattggagtactgttccattatcatcatcgtcatggtttcataaaccaaattatgataactggaactgataatccaatgatcaattatcaattggttgccaaatctctctaagtgaaaggtaaaacttaaaatgcaacatcattgagctacatcatctgaagatatgtaccattgaatgcaacggttgatataatatccactgttagatcctggataagtatcagcaaaagaatggtaaaaggtccaagattgttcaagaaacttccatgagttaattgtgcaatagtcaatgccctaccacttttgcatcttatacctaacaattctcatagctgttggctgagtcaaaacttagtacaagaatatatacaacacaacacaatagatctatcttttaactcggcattaaaaattttatgatgcaacagatcttccaaatttagatacgctaccttttaatttatctaaaattgtattggactacgcattaaattacttaaaatttttttcataaactatgtattcaaatggctaatataattatttcattttaagtgctagacgcatcttccaactttaggttttagcatataaattaaaccgtattaggcggctcttgattagctttatctttaagctacattgcttttacctgggtggatgagaggtaaccaaatcccaacttgagaggcagccctaatcgctaccattcaccagtttattccgctggggtaataggctttaatatagcatagtacgcctccacgctagttaccagtttattccactggtgtgataggttgtattgtagcacagtacgcctccacatcaccgcacacgtcaaactagtcgaaaggctaacgcgacattaccctaaatttacatcattatgcaaaaaaatatattaatgctaaattgtgaatattgcacttgccattccatatatctgaaattaacattacaaaatttataagtagtacaacatcattttttagcgatagtacaacttattttaataaatgattttaatgttgatttcgtatgatcctaattcttattagacgaccaaaataaacttattagctcgaattttatctacatgatgtatatgtagacctgctatatgatgggagcgccaacaaagtatatgagagccatgcaatgctgagtatgatgagaacatagcagcgatgatgattaagaggtgtgcatgattagtgatgtacgagttctaaaaataattatgagtgtgcgcgtcttccatgcatacatgtaataaaaaagtaatttgtttgtattcttactaaacctggtgctaatttaataccaccattgacttttaaattttcattaaccataattctaaatttacattgttaattgttatcacaaattgtagcaaacttactatcaagtacaacacataaatacattttaaaagtgtataggaattatgagtgtgcgcgtcttccatgcatacatgtaacaaagaaacaatttgtttgtattcttgctaaacctgttgctaatttaataccaccattgacttttaaattttcattaaccataattctaaatttacattcttaattgttatcacaaattttagcaaacttactatcaagtacaacacataaatacattttaaaagtgtataggaaaatccttcttagacttcattgagcagtaaacggtcgggaagacgccatagccggcgaagcagacgaagtagaggctgagggcagtgggcaacccgctcagcgcaaccgacaaggccagcccgaccgccgagataggcaagcacgctgaggttcttgagccacgtcgtcgggaggatgacagtggccgccgcgagcacgaatagctgcttcccatgcacctggtaccctaggatctccaccaccgtgccggggaggagcttgtcgaggttgtcgcccaagaggatgacgaagctgatggcgacaagctagagctcgacgtacatgatgaggccgatggccgtcaggccatagccgctgaaggtgaggtggccgatgtccagtagctcagcgatcgacgcgcatgcagcggtccatgaggttgatggtgtagaagcatatagcttggtgaagagcgccaggctaagccacctgccctgcgagggtagatcagcgatcgacgcgcatgcagcggtccatgaggttgccggtgtagaagcagatggcttggtgaagccacctgccctgcgataccagcatggagagccacatgccctgagatagcgcgtacagcacggagagcatccttacgcttgagggagcatgttccttacgctggagggagcacgtgcgctgtacgcgatcgtccctagatcttcttgctcatgtttaccatagaagggagcctcgtcgatagggctcttatccgccgccataatctcatgttccagacggttgacgtttgaccgcacggaaaaaattgtttctctactagtgtactaacggcttctataattagtttttttctactagtgtacgaacggcttctataattagtttttttattagtgcccaaacaactcatgcaataccctatataatatccgatgtgacgtgccaaagctttatacccatggatctaaacaccccctatgaactgtaaatatgggatggatgtgctatttatttatagcctagctattatttgtaattttttccgacatgacgtgggtcagttcgaatggaacacgtcctttttgataaaaaagaaatctctctgcactcctcatacactacacaattgattttcgaaacgatttccacatcagccttctgttatgttacattactactaggttccatcaaaatttgaacaattttatatgttcttgtacagctctttcaaagagggccaattgatcttcatgatcactttagcttacgctgctttctactactcgactcccctggctgcacgttgcacctgtgcttagtgtaggggctctcctgatctccggtgggctcgaagtagagcttccggtgcagcctcgccgtggggctctcctcttcctcttcctgctcgcgtgggtcgtagtagaggtcgccgacgttgatgctccggtggcggcgctcctcgaactgcacgctcgccgccgcctccagcttcagtttggagaggttctccatggccgccatcctgatgccgtctatggagttcgccgtgttgcggttgcggtgcaggtgcttcgtctccaacttgtagtggagcttgtactcctggttcttgtagaacacgtcgaaaccatgcttgggtatgtcgttggggatctccttgccgatggccaccgccgtctgcatccatccacagaaattcatcacaacgcgggatcagcattgccatcaaatttggataaatttcgtaagaaacataaaaaaataaaattctaatatctcgagtggataactcatcgtgtagcttttacttccaaattcaatacatatggttgtaagaaattctgaaagaaattgaccgtgttgagtataatagcatctatcactctaaaaatcaagttgaaattcgacttaagctttgattaacaaatgataaattcgggtgcgaatagtattcatacaataaattagtcccttttttttatatctcaatgtgtgatttgattttgtacctaagttttttccttttggagtgggatatgtatatatgttgtatatatgaatattgctacgtttttttaataaaaaatcataaactaaactatttgaaagggttttaaacaaatgagggacgaggtatcaaaatagttaatttctcgtacaaacagttgagagtgagtttggcagaaattaaattgagtgagttttgtaaaatttagttacctcattgcaccagcaggaggcgacgtggttgatggtgtagccgccgccgccgaggaggaggagcggcaggttgaagctgcggatgaagctgacgcactgggcgtggccgcgcgtggtcaggttcagctcgccgagccggtcgccggcgagggagtcggcgccgcactgcagcacgacggcctccggctggaacacctccatcaccctcgccatgatcggctcgaacagccggtggtactcctcgtcgccgatgcccacgctcaccggcacgttcagcgcgcagtagcggccggggcccttcttgccgacgtcggcgacggcgccggagcccgggaagaagccgccgccgtgctggtggaacgacaccgtcatcacccggttcgacgcctcgaaggcggcctggacgccgtcgccgtggtggacgtcgatgtccacgtagagcacgcggcggaagtgggcgagcagc

SEQ ID NO: 8897 - DNA, 18962 bp, Oryza sativa
  unsure (1)..(18962): unsure at all n locations
accacaagataatcaagcctttattttactacaaaaagtaaaacaatagtacattcactcatggtcttgctttcgagcagagcagaaagagaaatgaatggggcataataagtcatgtgcttataattatcgcagccgattgtgccatcatcaaacctggcattttgtacaaccatccgtggagtggcaggagcaggtcaaaagatgaacacaacgctgtcgtggaccctgttcttctgattctgcgcaacacactctgatatccacatcaagttcctaatctcctgctcccgtagccttatgtaagcaaagaaaacagcatagtggaactgcgcaaacaagatatggagtcaaagatcccagcatgagaatccgcaatagtggcataatgctcacaagtttgttatcccctcatattggactagggataaaataaacagaactagatgagtgcactcaagcatgtatgcaggcttcagtgccacatgcattcttttagcaagagaaactagctctttgcggagtgcttattattactccctacggttccataagtcccgtcgttttggacaaggttgaggtcaaactattagagctttgactatcaataacttcaaaaatatttagtttgaaggcactagaacatgtatatttatttatcgtatattgtatagtaggagatcatagtcaaagatatgttttggagactgtcgttgtccaaaatgacaactatggaactgagggagtaaactcgtaagtggaactagaagatcccttgaagaaagttggtatattaaagtccaaaatgagaatgcagatgcacccccaccatggaggtcctaaggtaactaatataaaacaatgaaaatcatacctgctgttcaaatgacaagcacagcctccgcacttcctcctcatagaaggccttatccaacatttggctttccccatacgaaattttggcaaaaatagcctggtatggagggtacttctccattacaccacggacctacatgatgtgaaaaggaaaaaggtgttatggaagtccaaaaaaagaaggatcaatgtaatggtgatgatgatgcaaaaaaagaagaatcaaggtaatgtgatgatgatgcatatagtgtaactaacatattttacaggaattctttatgtatgctaatggtgcaccacactcttttttcatctacctatacaacaaacttaacaaaaagaacagcgtcaagccagaacaaaactatggttatactagtaagcatggtagaccaaagggcaataactaaaactacctattgctactaatgacgggcacaatagaagagaagacaaaacatataatagctaaagcagctttccaatctgctccagatgaaaggcacagaaaaaatagtttggcacacattgatcaaagcataaaacatgtgtaagaccatgcgctcccatgtaataatatgcccattccattactcaaggaaggttccaacacagaattttcaaaacaaataaatgtaataccagtatacaaaaaaaaaatcattgtgtcttggctgaaccaactactccacagacgttgatatagagcagtcagaaaaccaagttcgatgtatgcccatcacacgtgatacgtgtgccacaaaaacatctcccgtggaataccacgcttctccatttcttgtggaggaagcgctcggcctagggcatgatttttgttcaataggactaccaataaatctatttagtatgatgagtggtccttttgctaaacatgttggtaacactccaatagtgttcatttttcatattagcagtttaagttggccaatgtaagcaaatatgagaagcaagatgtgattaaacaattgaagatgtatgtatactaaaacgtgctagaactgaactatgagcataaatgaagacaaacctgatcaacatcttcacaaacagccagttcttcatgaccatatggatacctggaggtcgaaaaaaagtattacaaacatatcttggcaaaaggtactatcaagctggttctaatagaaacctacaataaaccaaagttggagtacagcttccgacggtcatctctagtcaactctgtaccaatactagaaaacatgacagagagatgtcagtatcacatgattgtgcacataacaacaaacaaggaagtatgtaacaaaattatacggtttgaagtggaaaacagaaaaaacttggcacctacctgtttattgtaatgttcacagctcttctgtctgcttcaaatgacagaagatcgcacataatctcagcagttgcaccaccaagtttctgtataacacaaaaagtcaatatgaacactagatgaaattggaggatacagttgaagccactatatttgtgtagttcatacttcacagaatttgtaaaagtcctcaaggtatgctttgtaaagagtgttcctcataatctcgatattcatgtcatccaaatcctgtaaaattcaggcaactctcattatcaagttagccttggtgttcaaattattaaatggattgtaatttattggacaccacaaaaggttacagctatttacctcagatgtaatgcattctgagaagtatggggctaacggtgtgtcaaccaaaaccaatctgtaaagctcgcgcatattttgagcaactgcaagagatgcaatgctattgcatggcaaaaagaacacttagtatcataagaagacctccactcaacagattcgataaagaaatcaccagaatacctgtcaaacattcccaatggatggcatttctccaatagttcattaacatctctctcatgcaatgttccggtaacaataagtacaacattgtcgatcatgtggccatacctgcaaatgttatctcatcagaccaaactatgctgcattactaaagttgggcacattgacatgtgcagacaaaacagaagtgaaagggcatatcctagcaatattgttgcttacgttatatactgtaagaatgtggatagtggttcagtcgcctggcacatcatgtgtttgtactcatcaaccagtttaagagtgcacttctccacaattgtagttgtgtgcaggggtgaaggttctgcagttaatcagaaataagttcatagtacagatgtatcacattagcgtgtaacaagcatgcactgatgcactgcaattatatcacgacaagcatcaacgcaaacagtattccatataagaatagggacatgtggattctaggaactatagcaattattcctaaggaaaataactaaatcctcagtggtttaccggaattcgatcaaaatatacccttccgagtggtctctagtaaaagctaagttgcgaccctctacatgtatagggcaaatcgtatcctttaactgctgcactcctacagaatgcgaaacctatgatactctagaccaagctaaacaacatatcagaacaatctgttaaagcgatccattgactttggtttcttgcaagcatagggcatcgtgggcttaatcaactacttgaaaatttcaggcaaagagcaaccaaattagggcaacccccaaatccccaaattggcatcgcaattcgcgcggaccggatcggggatcgccgatcgatcaggacagtcatggcggcgctacccaatccgatccgatccccccaaaaaaggagatcagagggcggcggcggcgagagagggaggtcgtaccgttctggaggtaggggccgtactcggtggcggtgaggtgcatcttgacgtcgtcgaggttctcgcactggcagaggttgttgtagtcggcggcggtgaggaggcccgaccggttcccccgcacgatggcctccaggaagccgtcgtggatgttgaacgagagcatctcccacccgtacatcctgtctctctcgccggccggcggcggcggcggtggcggtggcggcggcgggaggggtggatcgggaggagggggggagggaagccgcggcggtggcagatccgggtgcggatgcgggcggggtttgtatgagacgagacgagatcggtcgtgctctgctcgcgtgagcgtgtgggatccaggattggcacgtcggcagtgggccccgtgcccgcgtcagtgctcggggaccttccaggccgggccggggcgggtcaggcttagtgggctgggtattttggttgcgggtctaaagcggaaacgctaatacgcgcgcgcgtttcgggcctagaagacccagcgccgctgtgccagcgcgcgcgcctccttgctcttttttcctttttttaccatttttttccttttctttcccacttttttctgattttttttatctttagcatgttttgagtttgaaagtttataaattttgatttgaaaattttaaaatctgaacttgaaagcttttaaatctcaacttgaaagtttttgaatctcgatttgaaaattttcaaatcttgatttgaaattttttgaatctcgagttaaaagttttcaaatctcaaattgaaagttttcaaaattttcaatctgaacttgaaagttttcgaatctcgattctcgagttgaaagttttctaatctcgattctcaagttgaaagttttcgaatctgagttgaagtttttaaaatttgactttaaaatttaaaacttaaatcaaaagttttcaaatctaacataaaatattttcaatctattagtaaaaaaatctccagaatctttcctaattactatcattagtgttaagtatattaactaatactagcaaaatgcccgtgcgttgcaccgggtagtagtgggatgagtactgtttgatcttaaaaaaaatatcgaagcaactaagcctgatcataagcatcaatgatgtgttctatgaccacaaaagcaaatttgttcttggacaattagtctactctacatgtgtggcatgtaaatgatgcttataacatgtgggcccgatgattgtagcatgggaataatggatgggcgaaaaatactgttgcctttgcacataaggcgacagacgaaaatttgcgtgacaaacaaataaactgatatttgtaagcctaacgagtgtaaattggaaccacaacactttgtaaggggtattacacactctctttataggttgaggtcatttattatcttgtattatattttcttttatgaaagttttatatttttttcgcattcgatgctttttatctcgataaatatttaaattgaagagcataagatttttatcttagcgaattaaaataatagtaagatgacacttatcctctagctctctcgtttttctctctccctcgcttcttctcaccactgctcctatccgttgtcacaggccaaatcaactactgaccccattccatcgtcgttggtcttctttttcctctcggcatgtgctcaaatcaaccaaggagacgtgatcagtgagtttggtgccaccgaataaggtcgattatgatgggtgcctctttctcatcctactgtcaccgtatctagattccctaagtttagaccatgtttgagaagagggaaaagaagaaaattaagaagatatgtaaaacgaggtgagtcattaatgcataactaattaagtattaattattttaaatttaaaaaataaaataatatgcataggaggagcggaagatggagaaaaatcgagcatgggagacggtccacctaagatgtacattagctaacacacgggtggtcgaccatggatgaagcatcgtgtgcgcgtcgagtcatggttctggggtagtgttgcgcttctctttagcgacttcgagctcctcgtctatgctattgtagcctccgggcactggcggcatggaaagctcatgtccgcatgcgatcaacactcagaatgcgacgatttagcttagtttagggcacatgaccaaaaatatgcaacgttttcttctgtctcactatcccgatctgatgctatgagcggaggatgattgttggatgcttggagtgaaaagaatcccgatccgatgtgataagcggaggacgattgttggatgcttggaatgaaaagaatccaggaaatgcacattactacaacaaaaacatttttacatatggtcaaaactgatttttttttcgtgtgatttgaccaactgtctgccctgaaaggtgtacggaaatattgatttttccatgcgggtgacgcatccacatgcgaaattttgattttcgcatgtgggcgcctaagtcgtcctcacgcgaaaatgaaaaacgcaaagaaattccaaaaatcaaaactggaaccataaccctagccagccgccaacgccatcatccgcccttcccgtcgccgccatcggcggagaggcggcgggatccgggcaggagggggaggggacgcgtggaggccggatcagcccctcccgtcgccaccgtcggcggaccgcgcgcgtggaggccggatccacccctcccgtcattgtcgctggagcccatcgccctcaccccccacaaccacggcccacggtgccctcgtacagtgcctcctccctagctgacaacacccttatcccgatgagcaacgccctcgcacatcaccctcccccagccagcggtgccctctcagcggcatcaccctattctccggcacaatggtggcaacctcttcacggtagtgccttggcaacagcaccctacttgcggtgcacaacggcatgcccaccaagcttccacagcctcgggacggcggcgtgcttggcctccattgatcagtggtgccggtgttttagtttttatgatttaattttctggaatgattttgatttattgttgttggattttttattttatgatttagtggatatgtgattttgtgattcagcggggtgaaggacgaaaaatcaccacgaaaaatccgaatatttatattagttatagtttatagataggtagttattaagactaaaggggagggggaacagtccccagtctaaaggcgtacatgtcccaaccttttactttattatttttcattcgcacgttttcctaattggtgtgtgtgttttaaaaaatatatatacagcaaagttgtttaaaaaaaattgtattaatatttttataacttttttttagaattacacagtacaacgcaaacacacataacgcacgcgcactcactcctatgaacacatgcaagtaaaccctacccctataagcatcttcgaagactggaccagcaaatactggagagattgactatgagcatcttcgaagactgggccggcaaatcctggagagattgacgaagtcaccacaggtgcctcatcttcgaagactgggccggcaaaccctagagagattgacgaagtcaccanncaggtgnnncttgctgtncgancnngggtaccgntnncgccnntaccaacntnngaaagncnnacaancgncnncgtntanancngncnnactgcactcctatagaanncacatgcaagggtaaacccttacgcgcactataagcatcttcgaagactggaccagcaaatactggagagattgactatgagcatcttcgaagactgggccggcaaatcctggagagattgacgaagtcaccacaggtgcctcatcttcgaagactgggccggcaaaccctagagagattgacgaagtcaccacaggtgccttgctgtcgacgggtacgtcgcctaccactgaaagcacaacgccgttaaaatcctggaaaattcactcccatagggagtcgaacccaggacctcaagtgttactgaggctcttgtaaccactaggctacaggacctttcactaatatttttataacttaattaaacatgtatgtcgttttgcgtacgtgggagagaagtttacaacctttcctcccgaactaaggggtgcctttgatttgtaagaaaaaacatagaaaattagatgatttcaatcctatatgaaaaattcctatgaaggcatttgaattaaatgattgaatcatatcctttcctttggaatctattatattattaaaacagtcttgaaaaaaggcaccacgttcgctgtggaggctagaaattcccacattaatcggtgaaaaagaaaaggagagtccaactagaaatacaatttaaaatagttgaaattcggaattaaaaataaacactattgaaagaagagcccatataagaacccaatacgaaattcattaatattcagaataaaaaataaaataaaatccgaaagtagaaaaaaaagaaagaagagttcgagtagaaatataatttaaaaataactaaaattcagaattaaaattaagcaatattggaagaagagtccatataaaaacccaatatgagattaattaaaattcgaaataaaaaaaataaaaaatcgaaattagaaaaaacaaaaagaaaaattcaactaggaatacgatttaaagttagctgaaattcaaaattaaatataagcaatattgaaataagagtacatataagaacccaatacgagattaaaaagagagttcaaataggaatgcaattttgaaacgactaaaattgaaaataaataataaaatattaaaagaacacaatacattattagttaaaattcgaaataaaaaaaataaaccctaaaattagaaaaagaaaaataagatttcaactagaaatacaatttataaataactaaaattggtgataaaaaataaagactattggaagaaaagactatctaaaacacatgacgagattaattaagtaatagacctataaaagagtagagtggtggcggttaatgggacatctaaaaattattaataaaacaccaaatagaatgatggcgggtaggtcgtgaagcaaccgatcaaggctgttggcgggacttctagaaagtaaaaaaaaaataagccccaatgataatcatatttgatttgtaaaatctcaatgacaataaaaataagaggcagcggacaggttgtacgggagtacaatggcaaagctgccgatggtttggggaacttctagaaagtaaaagaatgaattccaacgatagttatgttcgatttttagaatcccaatgacaataaagaatagatagcggacggtcgtagaggagtatagtggcagcgcttgacgggatttctaaaaaatataaaaaatgaaatccaatgagacaataaattataaaaactataaggtccaattttaaaaggttcgggcttctgaaaagtaaaaaaataaaccccaatcatgatcatgtttgattttaaaatcttaatgaaaataaagaagggaggcagcgggcgagccgtattggagtacagtgacaaagtcgctgacgttttgacgaaacttctagaaactaaaaaaaatgaacctaaacgataattatgtttgatttttaaaataccaatgacaataaagagatgaggcagtggacaggccgtagaggagtataatggcagcgtttgacaggaattctagaaattataaaaacgaaacccaacgagacgataaactctaaaaattataagatccaattttaaaaggctccaaagagaatgaatagaaacaatgatagatcaagcaagcaaataaagaaggatatgacagaagtaacgggtagcaactggtgtaaaattataaaattagaagcacgagaatgataaggtttggtctttcaaaccttatcatataaaaatatataattttgtatgggtgctagccgcgcaattgcgcggtaacaatcctatagagattttggagaaaaaatggcaagagatccaacctcttgaaaaatttcctattggtcaatctctctcatttgattcatgtatttttttctactgcataatcaaatgattattcatgtattttgtattcctatattttacacttgcattcctatcaaaatctttttttcctatttcttcgttttctcaatcatgtgtttcaaagggccttaaagcctgtgttcgggagtgagggttgggaactttcactccctagcacacaaaacgaagcactgtttagcgcgtgattaattaagtattagctaaaataaatttgaaaaatagattaatatgactttttaaagtaactttcatatagaaattttttttagaacacacaccgtttagcaatttaaaaagcgtgcgcgcggaaaacgagggagatgagttgggaaagtagagataaaaacttagccaagtatctctgtagttttgtttttcatggcagtgattcccctgttgaagctggtataaaggagttggatactttgggtagtcattttgctcggtaatgtgagcaacaatatcttacagcgaaatatcacgaatgcggaatctattttgccgtggctggctttctttcaacaaagatattgcaaggggaaaaagaaaaagctttgttccaatggaatgaggttcctatcatgctttctataaaagagtggtatttccctacatgcatttgtgtaagtgtgtaacaagtgattccttgaaacatggcaatcactttctgaatatcctaccaccaatgtgatacataggtcagattattccctagtggacaattgtgaacacattacactaatggaatatttgtctttcccttgatgaatttatgcgatactttatccaaagatcgtgatcttcatacatggtcttacgactttgctgaggcctgtgtttttgggtaaacagtcacctccgcctggtcactccgcctggtcactgtgaccctcttttgcgagggggcaccccttctccaagatcacgattgaagaaaaattcttcaaatttagtcaaaaacgttggtgtgaaattcagagaacactaatttataacacagtgtgtcttattaacccaatctagaccaataagatttcaccattgtgccgtaattgcaatgcttttggtttagcataaaagggaaacccaacccctgtacgaggaagcaaaagcctagtgatcttctattgtttgacaattggagaagaaaatggatgattggcttatgggtggtgacttaatggctggctcattatttggagataagaaactagtggaagcttggagcatagattgtttcctgaaagatcatgttgtcatgttgatgccatcctttagtagatgtttgacatttggagaaaatcacacttgggagttgggactgtacttagagaaggctactgcaactgcaattcaaagggtgtagttcacatcaatcaatggcctttagcacatgaagttctgatgcttatgattcgcatcctaaattcctaatatctgaacattgtagatatagtttcagacttctgctagtttgcttttggaaccttgtgggctgttctgtttgactacttccataactgatgaagtttgatgctaactgaggaagatgaagaaagcttgatgtaactgttatgttcttttaaaaaaaataaagaagaagtctgatactaattgctatcatgataatgacgggatggtaaaggtccactttgccttgggtgcctcagccatgagtcatctgatattctttccctcaaacaccatccaaaaacactgaacaggtagtactgatgccctgctactgaagagcctctctgaagtatttctagaatcctaaatagtactactctttggtgaaaaatactttcttttttgggggcaaaactctacaaaattgaaggcacaaaattggtttatatttgtaaatgagcaattttacggtccttgagaagataccatgaggtactaaaaatttagtataaaatttggtacctcataaaatctagatattaagaggtataaaatttacaataaaaaaagtggtaccttatagtatcttatcaagaactgtaaaattgttcatttgtgaatatacccaaaaaaatgtgaattcattcactccaatgcccccggtatgattaatgccatgaataatctagcaacacaattacaccaaggtatacctgtgtgatacatgcaaaccacaccttttattttgcaagattatgcgaaattacataggtaaatgcaaaccatatttctgacctgtgtaatttattactactatatgtaacttccttatagaatgaaattgtgtgttagaagtagattgttcatttcaagtatgcttatggtatccgttattctgacttgtcaaaatggcatcatctccttagagaaaagcttatttcctttgttaaaggttaacatcaaagcggttctatcatatggtccatggcttattcctcatgcatttatgcatcaacgaaatcaccaaagttttcatgatatcataaaggtcaagtgaagtccatgcactcaagtgaccagaaatttttggacctgcctaagatcagcaaatctagtgaagccatgctgttgacatgtgagattaaggtcactctccaaagtccattctactccttttcttcctttcttgacacaaccattaatctcgtgctctgcttttgtccatggcttgttgtgttcctaacttattgttcttggccacttggttccattcagagaggagtagtttgcactcacaaagtgaagtgacaatcttctttgaagggttaggacatgatcacctgttaagtgagattctgtcttgacttgtgagcagagcaaagcagcaggagcagagcttcacttgatttgcctcctctctggtgaagcagagatgaactccccaaattatcatttcaaaagtggcaaatcaccacttcaactatatatataataatgttcaaattgtggtgtatacatgcttatgaataaagtcgaattttcttctttatttttcttctatccaccgattttctccctatatcgcacgctcgttattacaccagaacgaaaaccgattgagctcagagcatcctgtcggagaggctgggcagccgccggaagaagttgacggccgccggcggcatggggtcccggaacatcgggtggcggaggtagtagaacccgccggcgacggccaccatcttggacggcatggcgtacagcgcgacggcgacggcgaggcagacgccgacgaagatccggctggcgcgcgggtccctccagctcaccagcgcctgcaccctctccccctgcgccgcgacgtcgcccatgacgcgctgcacccgccccgccagcgtccgcagcctctcgtagcgcgcccggagcacctccggcggcggcacggcgtcgaactcctcctccaggtcgtcggcctccaccgtgtcggcctgcgacagccgcgcgtccatgccggcggggccgcgcggccggaaccggtagtaccagacgccgatgaggaagacgtagagcgacgccgtgggcacggccagctccgggtaccagacgaggacgaggtagaggacgtgaacgagcacggtggtgggcgggctgcgccaccgctgcacgctgtcgagccaccgcgcgagcccgacggcccaggcgagcacccccatgatgcggaaccagttcgccttggcgcgccgcacgctccacgtgtgcgcgtccacgtcgagcatgtggcgcaccacctcccgccccagcggcggctcggaccgctccagccacgcggcgacgacgcgcacggcggcggcgcgcagcgcctcctgctgcgcgacgccgatcgggcggaggtagtgcatccgcggcagcagcggcgaggtgtaggtggcccaggtgtccggcaggtgcgccggcgacgtgaaccgcacggcgagctgcacctcccccatcttcttgagccccgaccggagcagcacgagcagcgggtacgacgccgtgtacgcccggttgctctccagcgtggacacgcgcacccgcaccttcccgatccggtagtcctgccgctgctcgtccccggcgccggcgaaggcgaacatccgccagttgtcgaacaccgccaccgtgagcaccgtgcacgggtcgtacacctgccacgtgtactgctcgttccaccgcgggttgaggctgtccgtgacggtgcgcgtccgcacccacttcttgccgtacttggccacgcagtaggcgtccgtcgaccccttggcgccgcccttcgtcttcatcggcagcagcccgcacgccccgatgatgcccagctccagcacgcccaccggcggcctccacagctgcttcgccgtcggccggtagtcgctgcacacgtgcgccgcctcgtcgagcacgtggtaccctccttccaggcacagacggaggtgaagccggccggagtagaaccccggcgggccgccgccgggaccaatgccgatgtcggaggtgccaccctcgaggctgaaccacctcgacgcgacgagttgccgctcgtggagacgctgctcgacggagttgacggggatggtggcgtgtccgagcagcgccggctccttgatcatggagcggtcctcgacgaggacgacgaggctctcgtcgagcggctcggacacgacgaacatgaggtcctcctcccacgcgaacgccgagccgctgctcctgctcgccaccgaccgccgcgtcctcgccgactggaacccgacctggatcttgacgcgcacgtcgaacggcagccccggcggcggcgccggcacgcgcaggtcctgcgcctcgatcaccgacgcgcgcaggtaccagagcttgggcgactggtacaccttggagcgcgtgtacgcggcgtacggcgcgtcggtgttccacgcctccgggaacgcctcgtcggcctgcgtgccgatccacaccgccaccatgatgtcgccggtcaccatgccgggctcgccgccctcgagccggtaccactgcggcgccagcgggccgtccggctggtcgcggaccggcacgtcggagaggtcgaagcagacgccaccgaggaaggcctcgatcggggacggcgcgccgccgtcccagacggatatctccagcgtcggctccggcttggcgtggttgatggcgaacacctggttccactccgggttgccggtgccggagacgtcgcggccggggcgcgaccggagcgtgtgcgggccggcctggatcttcacgtacggcccctcgcaggcgcggatgccgcgcaccttcacgacgcggacgaacaggtagcgcatcggctccaccaggtcgtacgacgactgcaccggctcgacggcgtcgccggtggacacgaaccgcccggagatgacgcgcggcgaggtggcgtagtactccggccccaacccgccgctcaggtggcgcgcgatgcggacgcgctccgtggccatccgcgtcttgcgcacctcgggcgggtaccccgcctcgccgccgtccggctccggttcaggctccggctccggctgcggctgcggatgctgatgctgatgcatcggcggcgccattggcccgtgcggcccgtgcaccgccggcggcatcatcgggccgtgcgggccgtgcatcggcggcatcatcgggtgatgcatcggcggcggcgcctcttccacgatgatgacagggggatgcaccggcggctgctgcacctcgacggcggcctcggtcggcgcggggatgtccgggaggtccctgggcgcctcaggcgggacctcaggcggcggcgcgttgtcaccaccaccaccctccggcggcctatcctccggcggcggcggcgcctcgtcgtagtagtaaatcttgaggccaacctcgccgcggatccagctgagcaagctccgcttctcgagcgggaagtacacgatcccctcctcccctcgccgcgagaactgcgacccgtagatgcgcacgcggccgaggaagtggttcttcccgccaccgccgccgccgccgccggaagggttgaagcggcggtcgtggtagagcgagacgtcgagcgcctcggcgtgcatggcggccgggtcgtgcacggcgaactcgagccgctcgtgccactgcgggctgaggtcgcgcggcacggtgcgcgtccgcttccgctgcccgtcgaagtccacgacggcgaaggcactcgacgtgccgagcccgtccttgggcaccaggtcccgcgcgtccaccacctccaccgccagcctccgcgccacccgcatcgcccccggcggccccggcggcggcggcccagactccggcgggggcgcaccggccgccatggaaacagagtggaggtgggaaaggaggtaagcgaacgagagagaggggagagagtggcgaatggaatagggttcgcttatgatgtgaggctcatggattggatgctttttttgcttttggacgctgcggcggcagctgctactatcatactatggtagctagagtgcgtgcttttggagggagaatctgggcaaagagtgagaggaggaggaagatggatggcggctttcttggcctggaagctcacgatcgctttggtgctcgatcgatggcgcagaatctgatctgcttgcttgctttttttctttcgagtatgtgtgcaggtgatgccggtgtgatctgaattgtcgccgactcgtcgtcttgctgctgctgccgctgcttcttcttcccgccttttttcacctgcgttcccaacagaggcggttaaataacttccaccaaccgcgcgcggcgccggaaaggaaaaaaagaagagattttacacgtgtcatctctcatctgtcctgtgttgtatccttctcggaggattttgatagtattttccttagaagttctaacttttctgttaaatcaaatgtttgaacgtatacataaaacataaaatatgaaaaaaaaaaccaattatacagtttacatgtaaagtgcgtgacgaatcttttgagactaattacatcatgatttgataatgtggtaataacggattaattagtcttaatatatttgtctcgcagtttacaggtagaatttataatttattttgctattagtttacatttaatacttgaaatatgtgttcgtatactttaattttttttaaatggaactaacacggcccttgtgctttgctgcacgctgcacggggaatgcccgaccttttcaggttctcgcctctttggggtaaacgtatctgtttcttccaagagagttaagagtatatatatatatgagtatatatatatatatactactatgccccgttccctaattttttttccaaaaacatcacatcgaatctttggacacatgtataaagcattaaatatagataaatgaaaaaactaattgcacagttagggaaaaataacgagacgaatcttttgagcctaattagtctatgattagccataagtgctacagtaacctagtgctaatgccagattaattaggctcaaaagattcatctcgtggtttctatgcgagttatgaaattatttttttcattcgtgtccgaaaagtccttccgacatccgatcaaacatccgatgtgatatctaaaaattttctttccgcgaactaaacagaccctgtgtacacagtacacgttgcaggggtgcagagttctctgcttttcttgtagattcagtgagatctatgcgtcgtctttgggcaggattaccgattacacatttacacccaatcgtcaaatggccacgtgcaccaaactagaagaagtagaagaagaactctgtttcttttgctcaaaattgcgcaacatcctcaagatgttgttcgacgagacgacggcgagcttaaatcacgagatagctgagtatctccagttctccacgtcgcagagcaaaattagacccatccccaacaaaacacgtgcgtatcatccaggtatacacggtgtatacttagcgtggcactcaggctatctatgtggaatgtggtgccctgttcggtactccacgtggcttgcttatactggtgccacgtaagcactgaatgagaaaggcgttattttttttcctgattcctacttatgcattttctttctttcaaaataaaatcactttgcttatttcatttcccgcatataattccctaatattttagccttttttaagtcgttggttaaattttactcttatcccgattgttcacatttgttccgtcttaatgaatatcttcctacattcgccccgagatctagacaagaaattattgagcacatgagccactggcccaccgcccaagatctttctacgggtagtctaaccaccacctcacatgtgttcctctaccctctattctccagtggtttcgcccttaaccattctatcatagtcatagttatttttttcttctcaaatatttccatgtgggcacaccgtgtgcttctgctcctcggttgcttgtcgtctcctgatacatttatactttgtttctttttcctctttccctctgtcacttttgtctcgaatgcctcatgatcatttagaccttacaacccttattgtcactaacgtgcatagaggttttaatagccttaccattattgtcttgccacctttgtcactcatgcctaggctacctttatcccaacctccttaaggatactaatgatgtcaactatgttgactaatttctctttttattacttaaaagtgtagtcattcatcttccccttccctccctcacttcgtgtgcagtgcatactgcatactctcgcataaaaaatagaaaattccccagataaatagttgttagttaaaaaaattcccattctttaggctagatccattcccagtgatatagccaaaagtatcagaatttaggtattgctaaaactatagaagacaaaagatgaagcatagtcaaccctacatacaacgaatcaaaatgttaagggttcgacccattttctcgaagaaaccttggaatgaaccgcaatgtcgattgcttagctcattttctctagaaaatcttttttttttgaaaaagaaaagttgcctatccatttctactcattgaaacgggggaaaatatgtagtgcaaaccatatatacagtggaaactaccgttgaatcgaaaaatagacgtccga

SEQ ID NO: 8898 - DNA, 11212 bp, Oryza sativa
taccaggtagtccaacacttgcgagttaagcgtttcgtgggagtgctgacaccaagaggtcacggatctcaaggttagagtaacggctgaaaatttgacaaatcttaacggaaaaatttgtcgagatatttttagcttaatcgattattaattgagagttgagatgagatctaattttgaatgggcaggatatgtgagatttgtacgtagagatatcttgaggattacgtgtacgcaaatcaaactatagaatgcagttatcaatttaatgaattatctaaaaaccatagtgccattgggaagttcgtgttgaattattttcaaatagtagagcggcccttgggaagaagttgcatattgaattatctcaaaccgtagagcctttggaagttactgggatatccatctagtaatctggtccgttggtaaaaatgatggcattttttgacttctgatcaaaattagcatagacagctttttctggaacttttaattttagccaaagaaaaaggaacaagaacaacatcggaaatttgtggaaaccgtgagaaaacaactaatatttgcaccactgaagctagcatgctaattaattaaccgattgacactattacagtatgcttattagctgttcattcatatgtgtcaacaaaattaatacagttttgctacatgtgtggcaacatatttgggggctgattacaattagattttttttgtcagatcaaagctatccgaaagcgtaactaactgggacacctgatcaagcttcaactcttatgtgctcatttgcacttcgtggactcgtacaattgataataaattcgctttttcttctcttatattgtgtccacggttcaccattatgtccacaatcggttgcaaagttaaattacatttaaaaaaacaaaaattacatatgtaattttgggacttacattgtaaatacactaaaattacatatttaatttacagacttacaatgtaaatacatgttgactattttttcataaaaaatatggtagcataaatataggtgctctgaattagtaatccctctaacatatgggtagcatactgctggactgagggagcaaacaaaataataatctatctattattctcatgctggttgttctgccaactgcctattggtccaggtggcacaatgcttttttgatgcgtgtatgacgctgcctatacaccccgcctatacacggttgcgcatgcctcatgcaatatcatgggccaggtgccatgcatgcacgattgaatggactaggtaggaagaaagaaaagaggaaaatattggtctatcattgtacgcattgatttggctacttctgtttacgccgtagttttgacacattaatccttctataaaaactttaaaaataaaccatgtcaaaaactacttaaaaaaatagaccgtgacctcagcgccaaccctgatgacactaaactaaaacatctcaacaccactcgacgtggcacaaattagctatgtaaaaggaactgaacgtcactatacattacactgacctcttaataggttttaaatatatggcatgcgctgaaatcctgagtagtatttaactttatctgttttatcaaaaaagtacctataagtaataaaaatagacaaaacaattttaaaattaagtagtgaatttaaatttatacgagtaattcttagcacatactacgagtatatatgtaattttcaattattaataaataaataaaccaatattagtattactatgtcttaagcatatgataaaggttagcatatatactttagaaaagtgctctcacgaattgtgtgcatctagttaaacctagaatgaattcatattggtatatgtatttcttgctgaaaataggataccaaaggttagcacatatctgcttttaaatacataaacgcataattagcccaagggcaaaaaaaaaaagaggataccaaagtaagttttaaggtcatctcccagtcgcagagaacatattacgacctctgctgattcatcatcaaaatagacatcctaaaaggagaaaacaatggaaatccactcagtgagaagtacaatttcaacaaatatggttctagacactattatccgcatgcaacattccattctttttacatggttgattgaaacaaacgtttaggaactgtactaaaaattttaattaaattgaactaaaaaacaggtgaaaagaacaaaaaaaaagcattaaataggggtaaactagcatccttaaatatacctcatcatcccgttcaagtgtcccttgattctgcactcaagaaacaatcatgtatcattagtatctagcacactaaggctgtaaggaactacaaatccggaacatggttagacctggtgagtcgttcaagtagataatgtaatagcatgggtaacaggatgatattttatccaccatagaatcctctcaaattaaacctaacaaaatgtgctggcagagaaacatgttgactgatgcaaaccatcaaagcaatagaaacaaaatcattcacacatacacctcttccatatcatcattgttatatatcacatatcggaatgcctggctcaagttattagcaagagctgccacatcataatccctgtctcggaaatcatcatcatcactatccctaccatggtcatgaagtgatgttgggtgcctgcagcaacaagacatatagagaaactattcagtgaaaaaacagaagcaaagacatccaaggttagcatgccatcaaaaaaaaaaaacaaagagtcacatacccacaagtccaatgataagaactctccacctcattacgcttgactttaagaatatcatttatatattatatatttgcataaaagttttggatgaagtgaatggtgaaacactcatttaaaagtcaatggcgtcatctattaaaaaactgagggaatatattctaccgatctctcataaaaaaataatctcataaaatgcatggccatttgcaccatatttcaccatactttcagaatcgacaagattcagttctaggctaataagccctgaacaaaacaaaccatagataaaaccaaaaaaaaaaaattgtagacacacatatagcaaatcccaacttttatgcgtgttactagtgatttaaaactaagggtagaagaagataaattatgatggaaaaacttcagaatatattaaaactgaactaatttcaaaacttaaattttagctgcgataattagtcaacaagaaggcaatgaaagttatgaaacttagtgataatacacatgcattccaggagagtacacatgcaatatatagctgctcagttgattcttaacactctgtgtagcatatatgttgttttttcaggaaaaatagaatttgaaacctatttaattactaccaaaacctaccaccatacccacaaatgcccgatcaaaatgtgccgataatctggtgaagggaagtgtaggtgccaacgatggtgacgcacactccaatgaccagtatcccaacaatcgccgccacctcgaagcggacaactcttcctcggggcatgtagatcttgaggtagctcaggcacgggaacaacatggcaacgacgacgttcagtgagaacccgatgaacaacatgaggtagccgaagaagggcaaagtgcacgccagcaccgtcatgttgacaacgacggctgctggtgagcaccctggttagcccgttgttcctattgtcagccaccgccgccatcattgccgacagcttgtcctctatcgccattgtgatgggctggatcacgagcgcgtacttcgccagcggggtgatcagtgtcgtcaagatggcgatcttggtgtacagcttccccgtgggtaagttcagtgtcaccttcacctgcacatcctcaccatagctcagatatcccaacactgttgtcactgtagagttgagactgcacatcaccgaagagattagcaaaacctgcacattaattggagaggaatagaacattattggagaggaatagaacattattggagtactgttccattatcatcatcgtcatggtttcataaaccaaattatgataactggaactgataatccaatgatcaattatcaattggttgccaaatctctctaagtgaaaggtaaaacttaaaatgcaacatcattgagctacatcatctgaagatatgtaccattgaatgcaacggttgatataatatccactgttagatcctggataagtatcagcaaaagaatggtaaaaggtccaagattgttcaagaaacttccatgagttaattgtgcaatagtcaatgccctaccacttttgcatcttatacctaacaattctcatagctgttggctgagtcaaaacttagtacaagaatatatacaacacaacacaatagatctatcttttaactcggcattaaaaattttatgatgcaacagatcttccaaatttagatacgctaccttttaatttatctaaaattgtattggactacgcattaaattacttaaaatttttttcataaactatgtattcaaatggctaatataattatttcattttaagtgctagacgcatcttccaactttaggttttagcatataaattaaaccgtattaggcggctcttgattagctttatctttaagctacattgcttttacctgggtggatgagaggtaaccaaatcccaacttgagaggcagccctaatcgctaccattcaccagtttattccgctggggtaataggctttaatatagcatagtacgcctccacgctagttaccagtttattccactggtgtgataggttgtattgtagcacagtacgcctccacatcaccgcacacgtcaaactagtcgaaaggctaacgcgacattaccctaaatttacatcattatgcaaaaaaatatattaatgctaaattgtgaatattgcacttgccattccatatatctgaaattaacattacaaaatttataagtagtacaacatcattttttagcgatagtacaacttattttaataaatgattttaatgttgatttcgtatgatcctaattcttattagacgaccaaaataaacttattagctcgaattttatctacatgatgtatatgtagacctgctatatgatgggagcgccaacaaagtatatgagagccatgcaatgctgagtatgatgagaacatagcagcgatgatgattaagaggtgtgcatgattagtgatgtacgagttctaaaaataattatgagtgtgcgcgtcttccatgcatacatgtaataaaaaagtaatttgtttgtattcttactaaacctggtgctaatttaataccaccattgacttttaaattttcattaaccataattctaaatttacattgttaattgttatcacaaattgtagcaaacttactatcaagtacaacacataaatacattttaaaagtgtataggaattatgagtgtgcgcgtcttccatgcatacatgtaacaaagaaacaatttgtttgtattcttgctaaacctgttgctaatttaataccaccattgacttttaaattttcattaaccataattctaaatttacattcttaattgttatcacaaattttagcaaacttactatcaagtacaacacataaatacattttaaaagtgtataggaaaatccttcttagacttcattgagcagtaaacggtcgggaagacgccatagccggcgaagcagacgaagtagaggctgagggcagtgggcaacccgctcagcgcaaccgacaaggccagcccgaccgccgagataggcaagcacgctgaggttcttgagccacgtcgtcgggaggatgacagtggccgccgcgagcacgaatagctgcttcccatgcacctggtaccctaggatctccaccaccgtgccggggaggagcttgtcgaggttgtcgcccaagaggatgacgaagctgatggcgacaagctagagctcgacgtacatgatgaggccgatggccgtcaggccatagccgctgaaggtgaggtggccgatgtccagtagctcagcgatcgacgcgcatgcagcggtccatgaggttgatggtgtagaagcatatagcttggtgaagagcgccaggctaagccacctgccctgcgagggtagatcagcgatcgacgcgcatgcagcggtccatgaggttgccggtgtagaagcagatggcttggtgaagccacctgccctgcgataccagcatggagagccacatgccctgagatagcgcgtacagcacggagagcatccttacgcttgagggagcatgttccttacgctggagggagcacgtgcgctgtacgcgatcgtccctagatcttcttgctcatgtttaccatagaagggagcctcgtcgatagggctcttatccgccgccataatctcatgttccagacggttgacgtttgaccgcacggaaaaaattgtttctctactagtgtactaacggcttctataattagtttttttctactagtgtacgaacggcttctataattagtttttttattagtgcccaaacaactcatgcaataccctatataatatccgatgtgacgtgccaaagctttatacccatggatctaaacaccccctatgaactgtaaatatgggatggatgtgctatttatttatagcctagctattatttgtaattttttccgacatgacgtgggtcagttcgaatggaacacgtcctttttgataaaaaagaaatctctctgcactcctcatacactacacaattgattttcgaaacgatttccacatcagccttctgttatgttacattactactaggttccatcaaaatttgaacaattttatatgttcttgtacagctctttcaaagagggccaattgatcttcatgatcactttagcttacgctgctttctactactcgactcccctggctgcacgttgcacctgtgcttagtgtaggggctctcctgatctccggtgggctcgaagtagagcttccggtgcagcctcgccgtggggctctcctcttcctcttcctgctcgcgtgggtcgtagtagaggtcgccgacgttgatgctccggtggcggcgctcctcgaactgcacgctcgccgccgcctccagcttcagtttggagaggttctccatggccgccatcctgatgccgtctatggagttcgccgtgttgcggttgcggtgcaggtgcttcgtctccaacttgtagtggagcttgtactcctggttcttgtagaacacgtcgaaaccatgcttgggtatgtcgttggggatctccttgccgatggccaccgccgtctgcatccatccacagaaattcatcacaacgcgggatcagcattgccatcaaatttggataaatttcgtaagaaacataaaaaaataaaattctaatatctcgagtggataactcatcgtgtagcttttacttccaaattcaatacatatggttgtaagaaattctgaaagaaattgaccgtgttgagtataatagcatctatcactctaaaaatcaagttgaaattcgacttaagctttgattaacaaatgataaattcgggtgcgaatagtattcatacaataaattagtcccttttttttatatctcaatgtgtgatttgattttgtacctaagttttttccttttggagtgggatatgtatatatgttgtatatatgaatattgctacgtttttttaataaaaaatcataaactaaactatttgaaagggttttaaacaaatgagggacgaggtatcaaaatagttaatttctcgtacaaacagttgagagtgagtttggcagaaattaaattgagtgagttttgtaaaatttagttacctcattgcaccagcaggaggcgacgtggttgatggtgtagccgccgccgccgaggaggaggagcggcaggttgaagctgcggatgaagctgacgcactgggcgtggccgcgcgtggtcaggttcagctcgccgagccggtcgccggcgagggagtcggcgccgcactgcagcacgacggcctccggctggaacacctccatcaccctcgccatgatcggctcgaacagccggtggtactcctcgtcgccgatgcccacgctcaccggcacgttcagcgcgcagtagcggccggggcccttcttgccgacgtcggcgacggcgccggagcccgggaagaagccgccgccgtgctggtggaacgacaccgtcatcacccggttcgacgcctcgaaggcggcctggacgccgtcgccgtggtggacgtcgatgtccacgtagagcacgcggcggaagtgggcgagcagctcgcggatggcgagcacgatgtcgttcacgtagcagaagcccctcgcgccgccgcggcacgcgtggtgcatcccgcccgaccagttgatggcgatgtcggcggtgccgctcccgagggtgcgcgccgcggcgagcgacccgccggagtagcggaggcagtaatcccagaggcggtcgaacaccgggttgtcgacgccgcggccgccgcccttgccctcgacggcgtagatgcccctggcgcgcgccatgtcgccgaccccgtcgtcgcctccgcagccgtccggggtgaggtcctggaggagggcgaggtagccctcgtcgtggaagtcggcgagctccgccgccgtggcgggcgccgtgcggaggcggcgcatgtcgccgagcatgccgtaggcggcgacgaggttgtgcgccatggtgacgcggtgcggcaccatgacgtggccctcgccgtagtcgacggtggagatccccgggtcgtagtagtagcacacccgccgcttcttgtcgtcgccgcacgacggcgaaggcagcgaattgccgccgccgccggccatggccatgtttaacctagctacaccggcgagatgcagacgtcacggtggcgcatgcaccggacgtacacacgcacatatataggctaaacatatgtaaggctgatcgaagcccagttcgtgccggagttggattgttaattgacttttaaattattaattaatccgaaaacaacttccaaattaacttccaactacctgatcggaagtttggaacggaactcgtatatatatcctcttaactttcttcccgtgcaacggcgtctcctccccgcacgcgcgcttcctaaccctacctttcctttttttttcttttaaccttcttccatatatagatctaatcctctctcgctattttcttttaaccttcttccataaccccggccggtgagagctctcgtccacagctcgtcacatcatcgttgtcacgcgcgtctccaccggtatatctcctccgggcgtgcggcagcggtgtaggcggtgcgcacgccgcggccgacatcgatctacaaattggtgggagaggtgagaaattagctacgttcctataatttcttctcttttttcccaatttttgttattaggctagttaccctgcatgttctgctatatctttctatacatgcttccttcgtaatttccttgcttggatgggactagaaaatcgatgcgcccgttggcgcgctcaatatttatagcctattatattattatttaatgggttttaaaatttaggtttaaaactagaatagtgcccgtgcgttgcaacggataaaaaaatacaataataaatggatgacaacgatttaattatatcttcaggatattatctaaataacattatatatttttttatgaaaccttatatgtttgatattgtgcattagagtggccatgatggtaaataacattccaggaaaatatatttgttaaaccagccgtatcatttagagttttatagaattgaaagaaaaataagtactcccttcatcaaaaaaaaactcaacctagaagtggatgtgacccctcctagattgatgtatgttgttctaggaggtttttgttagacggaggaagtatttgttgaatcgtcatggccagttcattagttatactaggtaaaaccccgtgcgttgctgcgggagttcagtataataacaataagtaaaaataatgtgtaaaatagctaaacaatataaacttacataagttgatatggtttatgataatttaaatttaaatagatatatataataatgattcaaatgtaaaagtaagatgatgtggctttatgagagaagaaagggagtgagatactttggaccgtagattaatcgtgtaaggcaaaaaaaacaattgatatgatatgatttaatgggagaagagaaaaataatactaactaagtgaggatgaatcatataggtatatacgatattataaaaaatgatgaagatatatattgaaatattatgtgaattatgtgggatgatgatttaacatgcttacattttaaaactctaaaatgtaataaattataaaattatagataatataacatgtttgcatgatgtttaaatgcaataattgttagtggatgatgatgtggcatctttgcatgttgagctttgggatctagtgggttataactttataataagaaaagattatatataaccctatttttgctcatattacaaccctgataattgatagcaaaatttctgaaataattttgatgccaaattttgtgaatttaattttgaaataatttgattgatagcaaaataattatgtctgaatttaaatatgcatcaatgcaaaataatgttgtatgagcaaacaatacaaaatgatgtgtgagcaaatgtttgcccagagataagattgccttttcatacaacttaacggagaggagttaacaatagtttggctgtgatggaatttctgggagaaatatgcttgtacgatggcattttcaggaagttgtgtttgtcgatggcatttctgggattagggtgtttgttaatggtatttcatggattttctcttgattatatggatgagtatatgttaaatattataaaaataatgaatatatatgtgtgttaaaaatattgtgaataataatgtgaaggaagatgattggatgttgtttcgtagaattaaatgaattgtagatgatgttgcatgcttgcataagttttctatttaattattgctagtgaatgatgaggtggtatatttgcatgttgagttttagaattagtgggggttataat

SEQ ID NO: 8899 - DNA, 4656 bp, Oryza sativa
catatttttccttgaaacggcttacataaagttcttaaaacccagaaaatcacatgatgtacagtgatgatacacaatggttctcaactttttctttttctgttccaaactaggctagcccacgacggtcaacgtaatgcacaatacccggagatgctcgatcgtctaggaagggaggcatacgtatcctggtgttcgatcttgagattgctacgaccgctggtggtgaaaggcagaatttattctatctgcgtcacaaaagtcacaggccagctatgccgacggcgtcctcctcctcatgctcctgtagagtcatagaatgattagattggatagattgtgggcgagtaaggcctgtttaagtttccaaaaacttttttcaaaaacatcacattaaatctttgacacatatataaagcattaaatatagataaaaaaaattaattgcatagtttgcatgtaaatcgcgaaacgaatcttttgagcctaattaggccatgattagccattagtactacagtaacatatgtgctaatgctggattaattaggctcaaaagattcatctcgcggtttccaggtgagttatgaaattagttttttcattcgtgtccgaaaaccccttccaacatccggtcaaacgtccgatgtgatacccaaaaattttcatttcaccaactaaacaggccctaaaacagtactctagaacggagatgatgatatctactactccctccgtcccataatataagagattttaacattttgcttttattgtttgatcactcgtcttattaaaaaaatttgtgtaaatataaaaaaataaaaaattgtgcttaaagtactttagataataaagaaagtcacaaataaaattaataataattccaaatattttttggaataagatgaatggtcaaatagtgtgtcggagaatgaactcctccaccagggaaccgtgaggcccccctttgtgagttcggccggggcagcgggtgagattcgaggatttggtgagcgaaactgtgtggtcttgagggggttagccccctccaagacgatcagatcaaagaggtttatacaagttcgggccgctatgaagcgtaataccctactcctgtacatgattgattgaatgtagaacacaagtgcttgaggttgtgagacccaagcgccagttcgccccctcgtcccccctccaccactaggcctggacctccttttatacctcaaggggttaccacatgggcccaacaacctaacctagctctggtggagaagtattataatctttgcattaaatgcatgtcttgtctcttgacttgggaagccaagcacgcgtcgtcttgatgatggggcctgtcaaatcttgccgcctgacacggggggtgcccctgtcagtcaccatttaatggataaagacttctgggctcctattaaccgggaaacgggagccttgctttgaccagagcggaaggaccgactccggctgggataagaggatgagaacctctcaccatcactattagatgggacatgtcaggctgcacgccgcctgacacccgagcagcgcacaggcgcactagccagtcccatcggtcattcgaccggtcacagaccggttgagtgcaatgcacgcagtagtggcgcgaccgctcgggacgccataaatgcgggtaggtgggcacctggaggtggacacctaacccaccgtacgtggtgacctagagagggggtcgggggagcccgacccctagttacgggagggggcggctgccgcctgacctcaggcccgctcccccctcgggggggagccatgaggcgcctggggcggccttctccctctagtctcggccagggagtggcagccgccctacctcggacccgacccctctcggggaagggccacgtagcattggagggcagcctcctccatccagtctctgggaaggagtggccgccgtcctacctcgggcctgactcccctcggggaagggccacatggcatcgggggacagcctcctccgactagtctttggggaaggagtggccgccaccccacctcgggcctgactcccctcgggggagggccacgtggcatcggggggcagcctcctccctctaaacctgatacccccggatccatatcaccgacatagtgcaagaaaaaaatcaaaatccttatattttatatcatgagacggagggagtagtagcttgcaacgaactaaagcagtgacgtggccacgctcctgtaccgctgactatgctcaaccttggcaacgccgtcgacaaacagctgggtttatgtgacgacgcagacgtcacgccaagataattgtgcgatattgagccaccgtgccgccactacttgaaaaaagttatttgcaggcaagccaaatccatctttacgtacgggtattctgtctgtaaggaaacgcctatgaagatagataaataattttttagacggtagattcacccgactacgaaaatattttcagtgaaaaaaaaatgccgctgccggcgtgtgacaccctgaaaatttcaaatctagattacgggaacaaaattcaggattatcaaaaaacttttctaaaatccgtcacgctggattttatctcccattttctgttgcacttggaccacaaggacaaaaatctacggacaaaatctattttagattcaaatattatttattaaaagaaccatgattatgaaatgtattaattaagaaaatatttgtaaatacaattatctttctgaaatcccttttctatgaattagaacctatttgatgtatttgttttataaataaaaacaaatactagatattagaaaacatcattgtaagggataattccctggaaaactatttttacaatgaaggctaatgttaactaacctctgaaaatctagaagttaactattttggagttgttttacaaataaaaactagaggaaatttactagtgaaaccctatttgcgaactaaaatttttaaagaattcatttcaaaagattcacggaaaagtctagtttttcctccttgaaaggcctagcccaacacgcataatgagatttgtgttaattgtgtgcatttatatgtttgtgccaaagatctccgttaatccattcttgtgaatcccaatccttgttgggattcctccagattcgaattccacagttcgatcctcctcctaagttaataccctcctcgagcaaattattcgggcatctgcaaatactcgaacccagtgattttctggaaacgcctctcagtgtaatatccgttctctgttcctcctcaactccactagacggttacagtaccccgtcttttccttgaaccgtcagaataacacagataaatcgatccacctaaagagtgttcccccaaaccgacatccttccttaccctctctttcccccgtttgtcttgtcaagcacttcgatgttaaactgatcgaagtcccaaaattctttcatttgccacaataccatttctttccccgaacccttggaaccttgcgatcgaatcaaaacccgcttcatcttttcgactcagcctccctcagattcccttctttcctattttccctctactcgaaatccccgagttcggtctttcgcttgaaaccactaaagttgctcggcagatctaattgtcgtgcgtcgacccgtatattctcaattctatttctacctttgaaccccaccatgacgaatggatttgtatgccataaaccgctcctaaacccatagtcgatattgtccctacctttgaaacactaccgcgtccgatggatttgcatgcccaagcgtcgcttctaaaaatcccatcatatcgtcgtcaatttattcaagtggtcgcaaagaaaccctaagtcaaatacttgggcgactaaatggccgaatcacttccaatccaaaccccagttacaatttcagctcaaagtcaaaagtccagttatacagtccatttataaggcgcccagttatacatacaaaagtccagttatagagtcccgccttatatatgtttgtggagtgatgcaccgcattgatatatcttgttatttttttagtgaattttaaaaacatgaaaaaacgagatatgtgccctcaagagacaaatagactttctgtatttaacttgtttaaaacctaacaacctgaaattaaacgtttcatttatttccctttaattcgaagtttccaacattctctaagccttagatatacaccctccatcctaaaaagattagcttctgatccttagaagttgattttttcctttttacggaacattacacatcaatgcctcatcaaatttagccttacatatttataaagtaatctatcccatattaatggacgtgactacacagctagtggtagctggtttgtctaaatcatctaccacttcatctataagagatactatccacctatacttcaaatacaattttctcttaaactactcatccaatctacgatccgattacaccgttgtgttcgtaataattaaatctttacaacaagatctcacatgattatattttgatgaaaaatcacaaattacttttatgatatgtctaaattatttttagatttcactaagttacttcttagaaatacaaaagtaaattcagta

SEQ ID NO: 8900 - DNA, 11526 bp, Oryza sativa
aagccgtcatggtggccgaggggaacatcaagttgggcggcgctcgccgtcgtggcgccggccgccgtggcctcacgctgtcgtccggttcccctcctcgtctcacgccgcgcgccgccgtgcgtgcctccgcccatgagagagagaaagagagacattaggaagagagatagaggggtattacatgtgggtcccaccatttaaaaaaataaaatgctgtcaggactgccacacgtacgccacgtagaccaaaatcgccgtggattgggtcaagggcgtaattcgtccggtttgcatagttgggggtaaagaatatccggttttatggttcagggggtaattcggtcgaccgcgatagttcgaggggggtaattcgtactttttctttaaatatatggtaatcacttgtttgaaataaatgccttactgttccatagtacaaaaaatatcataggctgatttgtaaaaactaaaataatgtgtgtcactgtgcttgtgtttttttgaaggagtacagaaaaagaaaagcacttgggggtgggggggggggacaaccagcgtgcacgtaacaaaaaccaagcacaagctggcgagggaagggaaggaagggggagggcgaaagtaggaagggaagaggacaagtggagaggagtttcggtggcagtggaaagtggcagttctgaccacattccctacaccaccaccatcctcaacctcaatccccatccattccattccatcctgcacgagttctccactggagtggagatccgtactatacttttttttattattaccacctgcccgcaaaaccaaatccccgcaccttcctctttccccttctttctcctcccaaaaccgctctctttcttctcccaattgcccacctaccggaagagaggaagagagagagagagagatgggttcttgcggattgaggagggtcagatgatgccattaccaatttaacatcttctgcatcttttttttgcctttcttggcatattcttctcttctggatgtgtagatccttctttccccagtcctgcttagctttcaagcagaccaacaggtccgagattggtgacctgggagcggtttcttgaggtgtggtgccgttctgggtaaggtaaggcaacgaggcgccccacctcgcgcttctcttgaagaatctgtggctcttttctttttttgggttcatgtccgcttcttgtttgttgtattgcctcgctcgctgtagctgatatcttgatacctctcgtttttttagatcgactctgttgccctgcaagaattcgatgcaggagtaagggcggcggcagtatgtaatttggtgggcggttgttggagaagaggagcaattttgcccatcggtttcttgggtgcaaattgagggcaaatttcggtgaatttcgtcggaaattgaggaagcccgtttggcaatcggtcctgtccatgtcccatgcctagaagctggggcattttgggtgtgaattgtgacgaattccagccaatttgggttgggccaggaaagtaccctttgggggtttcagtttgtggtgtgatctgcaatctttccaagattggtggggagttctttgtgtgtgctggtggcaaatgggttgcacacactccaaggtggaggatgaggaggccgtcaggaggtgcaaggataggaggaagctgatgaagcagctaatgcggcgccgagttgagcttgcggctgcacaaaccgcctacctgcagtcactccgaaacacaggagccacacttcgacaattcgccgaggtggagtctgcattgtcacagcagccccctgcaggtattgcagtgcatccatcaccaccaccacctccacctccacctccaccgccaccaccggtgccagtacctcctgcatactcagtgacatcctcagtgccaccgtactcgatgacatcctcattgccaccctcaccacgccctccaccaccgctaccgtttagtccaatagtgataaggaggaaaaagagagacggtgaacttgatgaggatgattctacagacgacgacgacgacactgacagctgctcgactcctctaccacctcccccgccaccaggggttgagtgggagtacttggaaccttttgcaatgcgtcccttaaattttccatcttcattggctgataggattgataaagaagcggcctcacaggtgaccatggatgatgataactgggtggagactaacacagaatttgatggatatgacgatgaaagtgtgtctggtaatgttgaaggcattgtgagcagtgtccagttgaatcaagccaagagtagggctctaggtgatgacaattcatcaatggttagctgggtgacaaaggactcagacacttcagcgatggcctggaggagtaagaagtcgctggcaggaattgccaaggagattgatgaatacttcttgaaagcagcggcgagtgggagtgacatcgtcatacttttggactcttctggtgggcagccagatccctcagagttagaggcaaacagaggtattatatacagtatcttgtctctgtttagtgtttgccatcattttaatatttcttaatgctactattttataattccaactcctggaaacacatatatagatataaagctacatccatgggaaatgaaatgattggttgtactaaacttttcaagatcatgaacattctattctttactctattacagtaaagttaagtacgaaaggacaagaaaagtgtttattcgcaagcaatcacttccagagaataacatttgttgtcctaggtgcaggaaaaaattccaaatccgccaaggttttttccacaatttcttggagctggtcattcaaatctgcgcaagctaatagacaatcctcaatgcattcaagtgatgcctctggatatggttaccatggcaaaacactagagaaactttatgaagaggagcaaaaactctacaagttagtcaaggtgaattacagaagccctagtttttgcatttctttacaatacgttacacaatgcaatcatgtagccatgcaggagataatagcttatatggtagatttcaggtttcttaattatccgggagttgtttcttgagcagagaagtttgtaatccattaacaggataccttagtacctgatgaagaaatgcctacatattaccacattttactaaccaaaactcaaaaagtctatatgttgttgattattatcatcctatgttgcaggatgaagaatttgcaaggctccagtacagaaagaacacctcgttgctacaaagactagaatcaggtgaccatgataaattgcatgcagagaaagtgcgagataatatagaggaattgcaagctcggataatctctttggaggaagctgttggtttgacatgtttgtccatatcaaagctcagagatgaggagttatatcctcagattattgaattatctgcagggtgagcttcaaactttagttacctaagttctaggctgttatattacatttatgtgcatggtatctgatttcagttcataatatgaattagcgttatagagtaatgcatttcaaatttcattccccgatgtagctgatagtttcattcagagctcccaattataatttttaagctaattggtgttgtcttacattctgaagcccatgacaattggcctatggaaataattagtactactaagtgccctagttatgatgtgcaacatcattgtggtagcacgtatctcttcaattatttttgtggcttagttattttcagattgttcactgggttattaaaacagattatctgttccacgcttctaaaatacattttctcaaaaaactttcttctactgcattgctatttgtgaagtttatctatcaaaacatttagtttatccctataatcaagtagataatccgctcaataatatgtttcaaactgagccagtgctatggctacaatgatatcttgctaatactgaaaatattccttgttatgatgctattttgttctatgatatatcttttcacgttctaggcttgtgcatatgtggagaaacatgtatgagtgccatcaggttcagaaccacattgcccagcaagccaatcttctaggcaatttaccagggaatgaaccaacaactgacactcattgtcaggcaacatctcagctggaagttgaagtttctgcatggcatagttcattctgcaatctcatcaccttacagcgtgactacgtaaccatccttaaccagtggattaaactcactgattgcctgcctgataacgatggctttatgaaaagttcgtcaggaattcgtagtctctgtgcagaactccagcgagctcttacaggattacctgagaaggtagagtaaaaccaacttgttttattagtttaacattgtgtgttatccagtgaaatcaagcttgtaggaacttttgcttaagaatatgccacttttctaaataaagatgttcccagtatattgtactcatgtgccagaatttgagctctatcataatcattcacttcgattgccttcttcgtggttttttttcttataaatgttctgtttataaacaggtagctgcagaagcaataaagacttttctgtcagttatacacactatagttgtacagcagactgaggagcgtcaactgaagaaaaagtccgaccaaatcgagagcaagttccatacccagttagagaaacacagcaacaatgcaacccaaaattcgggccagcctacacttgcaaagctggacacgttcaaaaagcaggttgaagaggagaaggctaggtatctgaactccgtgaggactagtcgagccatgacactgaacaatcttcagacgagccttccaaatgtgttccatgctctgatggggttttccggagtatgcgtgcaggcgttcgaaggtatcagtagatgcagtgagattgtcgccagccactcgggagcagtttcacctgccatttcttcgtgactgcatccggcatggttcgttgtgattgttcattgtaagtaggcaaagaaactggttctacgtgaatacacttctcttccaaaacttaaaaagggaaagaatttagcgacgattttaagtcagtacaggcatagtagtcttttgaatagatcaacatagtctcgatttgggaagaggtggatgtctatgaggttactgggaaatgattcatgtgtaactagatacttgaacagttgaacagtagtctgttgctgcatgttctcaacttctcaattctcattatatgatgctattttctatttctcaacaatacagttccaatatcagagtactgaatgtcaagtctcacatgacagatgcttttattcattgcttggttgttatttttttgacgtatgggaataatgctctgtaatctaatctgtgcgtattcctctgcattttgttacagcttctgatttgttggacaagacgtttgaaacgtctgaattgttatatactgttactccctctgattaaagatgccataattttaatttttaccgtcatcgttgagtctgaattgccagagttttaattttgaccatacatatactccctccgtacttgtaaaggaagtcattttggacagcaacacggtctccaaaacataactttaacttcttatttttataaaaatatttattgaaaaatgatatatgtatacttttatgaaagtatttttcaagacaaatctattcatataacttttacattttcagacttaacaacttgagagttattcatgatttatattcccaaggtttgatttaaacattgtcctaaacgacttcctttacgagtacggagggagtataagagaaaaaaatgtctacgtacatgctagatagactcgtgacaatatgacatggatgatgatggatattgctaaaaaaactcaaaagacaaatgttttaagaaataacgatgactttttctttttggaacaaaagagcttttggaatacgagcatgttggctataggggtccgatcatttctcatgaaatatacttatgttgagagatacgaaagtgttcaaatcgagttgcagcataggcaccaccgcccggcttctatgcagttgtcttgaaaacaaattaaagtttacatgagcattttttcggatgggggatacagagtactatgttttgtaacatgttttaagtaatcatactttttaggtctaaatattttctaggaccctagatttatatgtacgtcatctatttgactaaggcatttgaaatacttgtacaaaatagcatgtggtacttttaaaagtaaatatacatactagtcttctgttttctgtttatgtagtcttggttaccttgaaacaaattgcaaagatcgcaaaccaaacataccatttgttgtttattttgactgtgcaaatatgacatttcaacaatcccttatatttcgtgaattgttataatcgtgttttcgccataaaagtataagtaatgttttcctctatgactaagtatttaacgaaaagttttatacctatattttcttccattcttcctataccttaagagttaatttctttcttccacgtctacttaacccaaataagagtgcattcagtttggaggaatttcacagaattttcaaggaagtgaactatttctggtaaaaggcatataatttttttccctacgtttctaagatgccctagcttggcgaggagggattttgtagcttataccgtgtgcaaatatcaaagcaggcacgatggcatttgaaaaaccaaggcactttctttttaaaactaagactaagagattcactattcattatatagagagaagaatgaatcatccttaaaggaaaaaccaaccgtagaagatgagcatggacaccatggagtagacaagaactccattaaagcaccctatgcaaacatagagcatgcgtcttacgagttaagacaacaaccaaataactttataatacattactcatcctccaataattaagtatagtcatagccaaacacaacgcggtattcacattcccaggactactactatgttatgacttcggacacatttttttagtttgttatacgcctccgacaaggacgacaagggtgtcatgagacggctcacgctggactacgacggtagccttcgcctctacagcctcgacggtggcggaatatccccaggaacgcggcttgtcggaggcggcgaggcgatctcatgttaaggcacgtcgaaggcagcggaggaggatttccggccgacgccaacacgagccgagataagttgagaagacgaggcggtgacgagaggagaagcatgtcacgttggatgcatggggcctatagccacagctagctccccgatcacctttttggtatattaagaccttaccgaggcgagcatagccgatggcaaaattgtcttttataaaaatttctctctttgttttcatcgaaaataataaaataatacagcggttgtccaccagctaattatcatatttttacagtgtccacgagaagataaacattctttggatgtctcttagacaaggccacaaactttgagtgtctgtaggaaaatttttatcttttttggtttgtttcgatgagattgaaacgaatgaaagtggttccaacttttttttttatagaagccctcgcaaatcattgacctatcaccatccactccccctcttcgccaaaaagtaaaattaactctccatccatccaaaaccaaatcaaacccaccccccctctcaaaattaaaaaaaaagcgtgctgttcttttctcctcctctcgtgcgcctcctccccctcccccaccctcgccctcgcgatcccaattcgatccgctccggcctccccctcgatccgccgccccccgccaccgcccctcgccggccgcggaatccgcacgcccacgcccggattcgcgcggcgccggccgcggattcgtggccccacccccgcccgccgtcgccgtcgccggaaaccctagatccgcctccgcctccgccgccatgttttggcgcatgaccggcctgtccgcggcctcgcccgtgagttcttcccctctctctagctgctgcctggttatctcatatcttcgtaggattggtgcgcgcgcgcgcggcgtagcggtgagctgcgtgtttttttttttccttctgtctgtttatttattttccgttgggtgttttttttgttgggttggctgtggatgaattgatggggcggttggttgggctgttgtgccagccgctcgtgttgagcttgtgattattgcggtggggggggggggggagcacgtagctctgctgctcccggcggatttggatggtgctgttgggtgtgctgtggccacgatttggttaggttttactgatttttgggggaggattggatcagccccgcgtatggcatgaaagggactggcgtattgttacaaatgaatcctgtgtgattctgtctggtgatacaagtcttagtttgcatttgcattgtgaggtgaagattccgattcgttgggcactgacagcgttgctcaaagaatctttattgtgagggtgtagcattgttgtagtacaataggctcttaccctttttgggcattgccattggacatcaatcttttgaatcactgaacttatgataaagtttttgttccattttatgattgctgcagagttcatatttgaacataatgccatgattaacctcgtttcaatgttatgtgttgatgagttctggaacttatttgtattgcctgatcctaattgagcgataatttcttttcccttttttgtattgttttcctgttgtcaaaatagccttatatctagttgatgcctcaagttattgatacatatgcaagtaaaggttctggttatattgcctaactcaacattttattgcttcaggtggatacaatcctagacaaggaaaattttacactggaagaacttcttgacgaggatgaaattattcaagagtgcaaagctctgaatacacgactcataaatttgtaatttccttaaatatttctgttattagtttgaggagacttgagtggcatgacatgattagtgtactattggctgttgcaacttaccattcattccttatgttgtacgtgtgtagcaaataagaaacatttacggtgttcttatgatttcacttattcattgtgattgatgcaaaggcaattcagttgcttcttagataagctagcagcttattgggtagttgctattttttcctggcacttattgttcgttggacctgcacaattctaattccatcatatggaagaaaaagtagctctttcatttgttgggcaatataggtggaatactatttttgggagtattgtatgtcatagtgcctttttatcccttattatatggttcaaaaatttcctctattatgtttacataactatttccatttcctcccttttctggggcacaattgttctttctcacttctacttcatgtctttttatttgcattcatatacccagagtctactggttgaatgcattacagtataatagtgtttcattgtttcttcaaatagatattagttgttacatttatttagtccgcctataataactaaaaattttgtttgtagcttgcgtgacagagcccaggtggagcaattgcttcgttatgttgtggaagaagtaccagatgatgctgaaaaaaagcgctctttcaagtatgacatttttgttaacatatgccatcatttatgtaaagagaagaattttccacctcaattttctgtccatctgttgtaggtttccattcattgcttgtgagatatttacatgtgaaattgatgtcattttgaggaccctagtcgaggatgaacaggttggcatttcttcatatccttttgaagtgtttgttcagaacattagtggttgtagctaatcacaattgtctagctaatgttatttatccttctgtatgttgcagttaatggaattgcttttctcatttgtgaaatccgatcatccacatagcacattgttatctggttacttcagcaaggtacttcatttgatcaggcattatatgtaactttaccatgggtaaactcatagtatgaaggcactgtagaagttaattttttaggtgattattgtggttacgatgttaaactccaacctgcttttttttttttgctgggttgaaatcagcttgattaattgtttgttctaggtggtaatatgtttgatgctgcggaagactgctcctcttatggcttatgttcaggtattccttgtctttctcatataattgaactaatttattgattctatttaagctgactaggtctgacattcaaatattcgatgcatctgtcctgtcttctgttcactttagttgtgttgttcttccaattatatgctgtttggttaactggaacaagctaatcatccacactgaaccattttctttgagatatctgcttaagataaactgttatgcacttacacttgtatgttgtttgccctgtgagattttatattttttgggttgatcattcagtggattcatgacacctaatctgtacttttatagggacatccagaaatagttgtccaactcgttgacctgattggcatcacatcaataatggaggtaagcaggctatcaataattactatttgctctgcgcttgcatttggctaatgctgcccttgggatccttcaggtgttaatacgattgattggtgctgatgagaccatatactcaaactatggcgatacattgcagtggttagaaaatacagatgtccttgaaatgattgctgataagtttagctcatcggtgagttcctaaagcttgtttgctaagaaatgtatgtaataaacatggaaatgtttttaatcatccatctggcacagtaggtcagcacttatatctgcttgtaatttctataaaattagcagtattttgatgctaatcccctaaatattattatcccatattcctattttttatatggtatgttatttttatgcaggactcccctgaagtgcatgccaatgctgccgaaattctttgtgccgtgactcgatgtgctcctccatctcttgctgcaaagatatgcagcccaaggtttccattttataaccttgttacaaagtcacagtttaatccttatcttgtgatttcgggaaacctttttaaaatgaactttgtgcatggatattttttttgcaatggacagaaaaaaagatgtttatgctgttctcccaactcttcgatgaactttataaccctaaagaggttttgaataatttagaacaaccaatcaaacaaatatgctgttcattgttgaattctgtttgtgtcaccttctatcatatgttctatgaaatttcagttttgttgggaggctatttcgtcatgcacttgaagaatcaaggcccaaatccgttctagttcgggctgcaggaat

SEQ ID NO: 8901 - DNA, 29367 bp, Oryza sativa
gccaccgttgcgtccgcagtcgctgaccgcccgtccccgcgccgtactcgccgtgcacgcagcgcgagccgcgagagagaaaaagcgagagagagagagagagaatagagagagaggaagaagagaagagtatggtaggcgggtcccacaattttttaattaaaaaacgctgactggattgccacgtgtgcgccacgttagacaaaaccgctcttaattggttcgaggggggtaattcgtccggtttgcatagttgggggtgaagaatgtccgattttgtggttcagggggtaattcggatgatagttcgggggggggggtaattcataatttttcctaactaggtaactgagttatcctcgtagggaatttatctctaagtacaagcagtttttgccaaaaaaacttgaagatgatcaaattaagataagctcctaaaaatttgctaggaaggatttataagaaactagaaaaggcaatcaagtccttcttttctctactagatagcaagctagatccatagctgcaacgatgatgaagaaactaagagtagctaaaaatgaaggtgcaaggaagcatacctacaaggagcctccacttggaggttaaggcttccatgataaaatcatgaaaatactgcttctctttgaagatgcaccgtcagtgatgaagaaggattgcaaccttgtggttgccttgttataaatgaaccaaatgaccgatgcaaccctttgtgaagcaaattttccttggaagcgtctatgccaaacccggagaccacttcatgaatggatttggttggaatctatagatgactaccgggacaagagaaatgtgacgctgccgaattcttacactacacaaatgtatcaaaaagaaaaagaaaacaaagaggaaaacattacttcgggaagaacctgactacctggactctcccctctcgccggtgaactgagtcactgaatcgatggaggaaaagggccagatgaagaggaaggaagacgatacttttttttttcgtctgaaggagtcaccaatagtgggagttgaagtgtaatcttaaacacgtataaacttatcctctactcctgaatattaggtgcacatattacgacaattttcagctcgctggtcatgctactaatcatttcattgagaacaaagtaaaataccatcctgtcttccaagttccaagacaggcaacttgagctcctaaaaggctgaaataccatcctgacatagatttgaggagccaaaaaggggtacgatatcttccggcaatgcagacaaacgccaaccggcaaaacgccaaggaacgccaaggaaagaagagaagacggcagcgccaggctgggggcgccgtagatctgtgagcaaaaccggcagccagctgcgctgcagccaaaaagagtctattggctgtcttcttttctcacgggaaggtttcctgcacatgagcgcaacaatttattatcgtgtgattaattaaatattagttaaaataaattttaaatatatattaatatggttctttaaaattatttcaggttgtggaaacataagagtaaaaagaggaaatataaattgggaagaggcgataaagaacacatccttataaatggcgtgggttttaaggaaagaaatagaactttttttcattggctttttcaaaaataccttttgaatcaatttttaacgtattggaataaaattaaaatttattttacgatccatcgtctatcctcgtttcagaatgaagctgccaatggcatggtcgtctcttatagttgttgggatcctctgcagtaggtgaatagtaaaatacaatctatccggccataaatatttagcgccattgactttttaaacatgtttaaccgttcgttttattcaaaaagtttaagtaattattaattattttcctatcattttatttattgttaaatatacttttatgtatacatatagttttacatatttaacaaaatatatttaaaaaagttaacggcgtcaaatatttaaagacggagggagtatatattagctaagtactattttttcaccgttggatctagaatgaatggatgatataaatcgctacagtaacatgacaaatttaaacagtaataaacagtgcgtgaactgtagaattggtacagtgctcagattagctgcgtagcagacccagatggacacaggtcgttcgttgcagtactgcaggggatctcaattggactcggattgctggaggtacaattctttctctgctgtaatgtagaggatctagatccgtatcagataggggtacatggagccctcgaacccatgtccatgtgttttctgcttgtctttagttaattattggttcgtaatcacatttgtaaatagcttcctataaaacaatgtagttctatttaaaagacaaattaccaacgaagaaaatgaccaagataaagttgtcatcttaacctttaaccaaaccccatttaataaaagacactaaagtatttctcttccaccttaacatttgtggatgaagttctactataaaagtgcacttattttggataaattttaaataaagggtgtaaatacatatgctcctctacgcaattgcacttttaaattgcgatgccccaaaatatccttaataatgtgtgaagtaaaaattgtaagttaaatgtaggaaaatgcattaggatattttgtgaaacatgaagcatccaatatgcaaaaaattaatctgaagtagcagtagtagtaccaccgacgataataataataataataataataataataataataataataataataataataataataataataataataataataataatatgatgatgatgaaaatgatgatatgtcggatttaggcctctagccatttagttatagccaaaggcttatgcccaaagaaaccacactggtatcatccaattaaaacaaattatctatcgaattgtcgagttgaattaaatatttctaaaaataaacatagaaaatagcttaaaaatatgtggtactaagtaatctaagtagaacaattttttttagaaaatatattttctaaagagatgtggagcaaataattcactgtaataatttaatttgatgaagtagctgaaaacaatttgatctaagactactattgttgacacaaattagggtgtgttcttttctctaattttccaactcttactctctcctttttcgtacgcacgtttactctctcgtgttccgtacgcacgtttcatgaattgttaaaaggtgcatcttttaaaaaatatataaaaaactcctttaaaaatatattgatgtattttcaagtttttagttaatacttaattaattatgtgctaatgactcaaccttctcccgcgaacacaaccttagaataatcaatagatgtcttgcccctgctcctttctatacttaatgtcatatacacacacgagcaaatccaatgctaccatttcgtttaggcttatgtttatacgttaatatcaattttagagtttttttattgtatattattttaccgtatttatttttaatcgttaaagacatgtatatacaaattttacttctactactactattattacttaaaaaaaagtacagataagtattagcataagcaacacaacgagcccaaatagagtaggcctctacctctgtttatgttacaaaagggtcaggatatcattgttgattgcttctcgcgggcagtgatgatggatagttgcgggcgtacgtggcacatgacgtggatctgactgtaaaatcgatccaagcttgcacgctcggcttgcaattgacgcgtgtgccgcacacacggtgtcgtgactcgtgaccggcgtcgaggtgcacactaaaaagaaaaaaaaacaaaaccaaacttgccggccacccaaaccagcaccaacacgtaaagcctttctccgagcaaaacatccaaacggcaaaatataccccacaaaaactaaaaagtgaaaaagagcagagaaaattaggcaagctccacgtgtcgggcttcctccgcgccgccggtcacatccaacccaacccaaactgccagccacacctcggttgggaactggaatagtatgcacggaaaacagagcgatccattagcacataactaattaagtattagctaatattttttaaaaaattaattaatttgattttttaaataacttttatataaaaactttttttaaaaaaatatatttaatagtttaaaaagcgtgcgcgtggaaaacgatggagagttgtcggaaaactgggtgccgaacacaccccaacccggcaacggcaacccgacccaacctgcgcgcgcctccccgtagccgcagaacgaacctgatgccgcggagtcgaagcgacgcgagagcgcgcacacgtgttcttcagccaagccgacgtcccgcctcgctgcagatcggccgagatgccacgcgaaaactcgcgaagaaaacgcaagggcgaaaaagaagaacagagcagatcaggccgcgcaccgaccggtccacgtggaacggacggcgaggatgaagcgacgattatagtttgttattatagtgttaaagtatgaacaaacaaacccacgggatggagcagatgtgaaaagaaaaggaaggaggcggaaaaaaataaacaaaacaaaaattaaacagaaaaaaaaaaggaaggaaaggtggtgtagattgagccattagaagccttcggctttacggcttcggcgagaggaaggggaggggaagaggagaggaggaagggactggaaggttcgatggcgtcggaggtggaggacgatgcggcggcggtgctcaccaacggcggtgccggcgccgcggaagtccggcggagggtgggttctcttctctttccctgaccatatctcccgtcccattttttgttgtttccgttttgcccctaatttcctccgtttttttgctaatcttttttgttccttcttcctcgggatggttcgttgtttgatgcgcagagggaccaagcgaaggagattctgtccaagcaggccgtcaagatcgccaccaaggccgaggagcacgagcgcttcatcttcaaggtccgttcctccgatcctttttgctcatctcgcgtcgcttcttgcttaaaaatctttttttttttttgggggggggggggggtgtccatgttctctttattcaaattgtatgcgtaacctgttcattttggcgggcattgatgcaaatgctttaaacgagcgtcagagggggtgtatatttactgtttgggggcatttgggcacaatgtaatgctgtagcttccaatttgtgcatctatttttttaaggagcaatttcggcatttattgacccgtacttgaagtattgcctctgtcctaaaatataacaacttttggctatgaatctggacgcacagttatctagattcatagctaaaaatgcttatattttgggacggagggagtatttactaccaggagaccaagattgcgaacaataattggatggctctggatggatgttcttacatggtgctggctttttaatgtgcaggtcacacacttgctgggtgttcttggatttgggacattttgctacctcctgggtgccagtaagctactgcagcattgatctgttctgttggcgtgttactgcatctcaatgttttggtttgtcactaagaatgctctggttttgtttgcaggaccacaggatgtgccgtatgtgtactgcctgttctatgtcatctttgttccgctccggtggatctactaccgctataagaaatggcattactatctcctggtgagtccaattatttttcagtttttcagagtttactatcctgcaaatgtgggaagtaccggtaaacttgtttccgccaaaatttgtttattttatcttgactgctggctggacaacatgtctaacagtttagctatggttattacaacagggaaggtaattcccgctaggcatttgtagtattgaagataggatattaggaattgccctttacctgatgaatgctatgcttgtgatttttgtgcaattcaacatcatgtttcctggtttactctgcaatgcgagtgttccatttggttagtgaaaattgactctgtttttatgctcttatgatagaagcattacagtttcaagccattgattgtttggtaagtcattaataataatcccctgttttataagcatcgtcatttctctgcaggacttctgttactatgccaacacttttctccttgttatgattctcttctatccaaaggatgaaaagcttttcatggtttgcttctcatttgcagaggtatgggaagttagaagtattcatgttgatttctggtctgcacccatctcgtagcatgtgtgattttttggtttgccatgaattcttgcaggggccgcttgcttgggcattaattgtgtggcgctgcagcttggtttttagctcatttgataaacttgttagtgtcctgattcaccttttgcctggtaagcggtctcacaattcaaagtcccagtttactctctaggaaatgttagttacgtaagtgtggtatcattttagggtagtgaaccacatgatttacttgtttatggaatctcttttactatcatttgcaagtaagatacagaggatttacagcaaaaccttgtagcatattattccaatatggtagctcatgattttttaaactagcacattcatttttagttactaaacttctggtatttttcttattgctgacaatttcatgctctgttctaaataaagggtgttgtggccttgtaaaatgttgtttacaagggaaaggcagtctatccatcgtattaaatttagaggcaattaagcgtgcaaataacctagaaatttagaccgtttggcagttgagcattttctagttgttgtacggtagaaatcctcattttggattacaaaatatagcatggaacatttaattgaagcattctagcaagctgaatttagtcaaacctttcttttttgcttctgccatggacattactggcagctccattctgtatagagtaataatgactagatccttattttgtatcaaatagacatggatacatctcttatttggaattgtaaaacgatatatagttgtggaaaactggaaggccattttgcagtcaaacactataaggtcagatggttgtttgttaattattaaatgttatttacaaggttgctttcatgacaattacaagtggaatccgaaaatttttttagcaacacaaacagtaaaataatcaacatttgttctgaggaatttgacaagcgcgtgaggaacctcctgaaattgttggtaccatggtcactggttgggtaaggtctgcagagtgaagacttgggtgcgggtgtgggtgtgtgccttggggggggggggggtctcagttctcagttaactctgaccgggcttgtccctgttgaactatcaagctctgtggcttgttggactaacttaagatttgttgtttgattggcaatgtggtacatggggcccctttatatgtatggatgactgacttgacccttaagaaagtaatcctaatatcatggaaaccagcagcctgattgttatctctaattttttgataaatcttatcacttccttacctaatcttccaaatgggtgccacaaggattgcaagaagtgttggtctacgaccataacagttgacaacctcaagttccagatatgaaacagacctgtctgtactaaatgtattagggttatatgtacttatattctccatccggcgcattttaaaatattttgagtttacatgactgacatactggcaaataatttttacaggcatagttatattcactatccggtggtggaatccacaaacttttgctgcgatgcatccagaaggaagagcagccagagtcacatggccttatgtggaggacaaatcatacctgtggacatggctgtttgctgttcctctagctgcttacaccctgtggcaacttatgtattttctcatagttaatgtgctgcgtcggcaaaggctgttaaaggatcctgaagtcatgacatcatacaggtacatctttgttgttcttggcagtgtacctatgtagtgtggattacattgcttgatatacagtacggtattaatgttgacttaaaagatataaactcatagagctaaaatagctggaattatgaattagagtcgtcgaaaagacgaattgcaatggcaggttgcatggatagttttgcacctggaaccctgtgattggcacactcaatacactaagacccgtaggtaatagttggcccatttccgttcaactaagtgaactaagtttcagttttgaacccctgaaaatgatatttagacccactcccattcaaataatatgggtaaattcacgggcccgtggttgtatccttaaacatttttttagacaatccttgaacaacattgtagtgacatgtgtgcactaccgttttgatctagtttacatttgttctcttagcacaccttttcctaaaagtttctgcccttgatcatttttagctgtgtcttttactgcacaatagtttccaattgttctagcttaacaggttagtttagtaactgttcacagttttaaacagtgtttggtcatgaaagaacatgaagtagcccaataatgtgtgtttcttcatgaatttcttgtagggagctctcaaagaaagcacagaaagcaaacaacatctggtggagactcagcgggcttcttggcgacaggaaccggccactcatgtacatactactccaagcgctgttcacggtggcgacaatggcgcttaccgttcccatattcctgtccttccagatgcatgtggtcttccagatactcaaggtgtgcgcgtcgacatggaacggtggaagcttcatcctggaggtgatgcctaggcaagtcgtccagaaggagaagaagaagctagagatgaagcccatggaagaggctaattcgagccagaatgctgaagaatcacaaggggacctgtcagcaaacggccagcactcatccgagcatagctaagtcactgaaaaaccaaaccatcgcaaacggtagcatttttcagtttttcaccagttaatacactgtggatagcttctctgtgtgttgtgtgctcgaaacaaattatccatgttctgttgggttgagaattttgatgcgtgtgtgaggtttgatctattcagactccaggcagggagcatttctcaggtagaaaattatttttcttttcccagtcaacccatgatattcactgaaacttctgatattgaccatgacaaatttccgtgcgtgacccgtcatctgctagtacttgctggacaagttattacatgactagtacgtaatttcgctgaagtacactgcgtttacgtgtttggcttgggtcttgggtcttgggtccttggggctctatatatacctcgtttctccaggccggtaaaaagttcttttctttagcttctggccttctgctgctccgatctactactacttattacgtactcgcatctcaccatgaagccgctatcgcttctgtcagcgctcgccctggcgttccacgcggtcaacacgggcgtcgccgtgtaccgcagccgcgccgacgccgcggccgtggcgctcgtgctcgcgtcctcgctcgcgctcgcgctgctcttcctctgcctgcgcctctacgagggcgcgccccccgccgaggccgcgaggcgccggtggctgcgccgcgccgtctggctgctctccgcggcgctcacggcggcgttcacgcgccgcgtcgcgggcgcaatgccgccagcgggggccgtcctcgtgtgggcgatgagcgcggcgaccgctggcggagggttctacgccctcgtcgtcgtcgacgacggccgcgatctcggcgcaaaatagctaattaataataataataataataataataaatgcatatgatgcgtatatatatgtgacgtgagttacttgctagtcaggcgatccatagaaacaaaataatactactattaaaagggatcaaagtacacaaaatgtgtacgtatgagcacttcacgctcgtgtcgatgttcagctagcccagtggatgcagtacgaaccaataccagcatgctctgctggctatggtgttatacagtgcttgttattgtgattattcgttgagctctatatgtagtgtggttgttgttgattagggatctcaatttgatatcaacaaaggattatatatttatccattgagtgatcgattgatttttctatcaatcattcttctttttttgtttcaatatatagcagtccatacaattttaatttttaaagggatgacatttgttatctcttcctaaaaatagggaaatatttttgtcatctcgcctcaagattgtcctttttgatgaggaactagaattttaaaaaaagtaagatttgcttaatactagccctggggctctgcagaaccaatttttccttgaggactgcaaaaccacagttaattaacaatgaaacccctgtgaaacctttggaaccctgccaattccattatattcgaaaaccaactattataaaaattacaagttgaatgaccgcgaattacaaaattacttaactaatagttgtttctgctcaacagcttaattcttgtcattctcaagctatgtgtagctatggatctaaactctagaatctatagatgacttcattactaaacctgtagtttgtgatattatgccttaagttttagttttaagataattttggtgctaaaatctgtagttttataatatatatagttgcatacgtattttgtgaaatttactcgaaagttctaaaatactacgtagtattttagaatttttgagtatactcactggagatgatttaaactctcacggagatgttttcttgcatgtcatttaaatagttatgaaataattaaaaagatttgataagatagattaatatattatatattgttccacaaacatataagttcaaattcaacatctacaaattgtaacaaaaagaataaattaagctcaagctagtatgcatattatcacacccattttttttatcaattcttagaagttaattttttaagaagaaaacaagttttacatatttgtgacgtgataaaacacatattaatttatcttattgtttttaaaatttttaattatttagataataggcaagaaataggtgtttaaaatccattgtcaactccactaaagaaagaaaaaaatccattgtctgctactatgtgtagtgacgccactttttaggtggagatgatgttaagcaatctgacgtgatcgcagtgcgtaagactgaattctacaggaagttcaccggcacaaactaaagttggtggaagcaacaagcaagtcaaattaacaaatgatccgataataaaccgtgggtacacttatatactaggtgaaacctgcgtgttgctatgagaatttactataataacaataaataaaaataatatgtaaaatagcttaaaaaacttaaggttatctaagttgatgtgatttaaatttaaatggtatataaaatgatgattcgaatggctttctgagagttcactgtgactccgctttgtttgtgtacacggctctgtcgagcatcgttgtccatcaactaattatatatgttggcatactattgaagagttcagttaaattgcgtttccgcttgtcatctaagggtgagtttgaggagagggggattgagaagattggtaagatacgtaaaacgaggtgagtcattagcgcatgattaattgagtattaactattttaaattttaaaaatggattaatatgattttttaaagcaactttcatatagaaaatttttgaaaaaaatacactgtttagtagtttgggaagcgtgcgcgcggaatacgatgtccttttctcacccaatcccccagaactcatcacaacgaaagcagcctaatttttgtttcatcttggaccggacaccatcactataagtacctgcacaatatacatacataagagttattactttagaagacgagtttctaaatcaaaaataatatacatacgacgctgtcgtccaactctagtgtatgaccaatgcaatgatgaaatgcctcacacatgatagatgattcaggtcgtgatgaatctttggttgcgcctgttagttgtgccacgttgtaacacggtcggacatcaatcagacaacagctttggacatcaatcttcaaatgcggcgtctctggcctccgctactagtcgagtcattccttccgatccttccccatccaattcccaatcctaacccttcaaaaactataggtgccgtagctcgtggctctacgacaatagacaccgtaagtcttattcaaaaacttttatgagatatataaaactatatgtatacctaaaaatacattttaacaataaatcaaatgataggaaaagaattaataattacttatttttttaataagacgaacaatcaaacatgtttaaaaaaatcaaacgtgtttaaaaaagtcaatggcgttacatatttagggacagagagagtatctgtgtcaatgtgtgtggtttggggggggggagggggggtttacttgtagagaccgactgagtaaacattgatttttaggcagtcaattttataaattcaagcaacagcaaacaatctcagccgttggggacaagtgataagaaacttacgaggggaaaagattatcatttcgaatgaaaaggagagatgccagtcaattcttcttagataatgctgggaacaagtcaatagcacacggtaaactaagtctggttaattaattaaggtgacttgtgaactttggttttgtttgcttgctgagcgaaacaatgcagcattaaccctcctctccgggccaactgacgtgatatactgattaaaaagatgtaatctctactgattttacgctcttgcatcggagagattcactaatttactactggccaacagaaataacgcgagacagacacaaaagtgagatgaaatcctactgacaaatattgcttacgttgttacggcgtacgacaaggattttctacacctaggtgccatgacacctatcatttatatatgactcaaatagttatagagaaaattgaaaaaaattagtaacatcgtttgtgatgatacaagtttatgcacaaacatgcatgactcaatttgatctatgaccagagaaacaaaaataataaaatcagaccgtgaatagtacccgcacagtgcagataaaatttattatttttgtttcttcatatatcgatcgaatttagacttgcatgtttgcatagtgtcttatattatcatggactatcttatcaaattttataaaatttttatataactgtttacattacatgcatacacctaggtgccatggcacctagtggtagaaaatactttctgtacgggagctgcaccctgcaccattatcaatgacaacctaagcacaagcgaaattgtccagccatccgaggaagcatttatgcgagaaaaatgctactccttccgtcccaatatataagtatttttagaatagtgccaagtcaaacttttaaattttaactattaatagcaaaaaaatttaaaaagattaatcatgtaaatttgatgtttactatatttatcattaaacgaactattgtagtatacaacttgtcagggttatggataccacatacctaacagtagttgactaaatttcggcaggacccacgtcttatacggaaacaaccttcagatatagaaggagtttcgcataaggaaggatgaatagagttctacatggaaacgacaagggctactcagattgtatccatattggtttccctagttctacttggacaatgggatacctatgggtataaatacaaggcccctaggaggagaggggacacggaacaatagatcaagacacaagatcaacatacaagccaacatgcgccaagacaagccgccggatatcgacatcagagatatgcctggactgaccctatctggtaccttcagtggcctgctgtagggatctagcgctgtctctgatctcgtcgggcacgaattcgaggagaaagactaccttgttgtcgactacgagtcagcacttcagaccgccaagtcaacaacagatagataggctacccgaaatattgtaccggtgtgattacggtgaataagagcaacgactggcttcagccaacaagagtagggttattacctaacaattcaggggcccaaacctatataaaaatcctcgttcccatctcttttattacaatctcgcatatatcctagtaccaacgatctctatactatgcaaataccagaatcgcgacatcaaacgtcgacacaactctttttatttaagatattttacttttattagatattgttggtcaaagtagcatctcggaaaccgtgtccagatccaaaaatgcttatattttaggatggagggagtacacaacttgttttttcatgccatcaaacacgtttaaaacacctaatgctttgtgatgatatcaaatcgccaaccaccttaatctaaaaaactctaaatccagatagcttttgaagattaaaccggctagtggagccaatttagatgaaagataaacatacgtctcgtggatagaacggaaggttttcaggacaaacctacacagagaggattcgcactctcgtggtgaagacgggtagttttcgatgcaaaccagcgaagatggatgaaaactaggctagaactagataaaaagtagatgagatgctgaaaaagtaatttaattggctactgtgttggagtagattgtgtcttaattgaaccaaccatagccattataaaggggttggttttacgttctagaggatcttttttacgtcttactcgggatagaaactaattagaataaaaaaattgtctttccaagaaaaaaaaccaaagaatcaatgtaattcaacttggagtcgaggttagctcgtcttaccgaccatatgccatcggtcagaccagccccaagtcaatggtcaagagccaaatagacgactgcacaggacctacgatttttcggggcccatatgaagatgacgacccaaagtccatttcccacaactataacatgcaaggcaaatcgtcaagcccaggtggccacgcgtacaatactgcaacatcgtcgcattgatcctaattccgtgattgcgtgcgccgtggctgctacgagaatgagacgagattgtcgatcctaattccgcaccgtgttgaccggcgaggcaacaatacagcctgtgactccgagcggcaacggcgatggccctggactctaatcttcgagcagctctacagtatgcagctgcttgctgagctcctggctcctgccctccccctccccctccccctccccctcctcactcttttagtagaacatgactacatgaggtcagcattaccttcttcactcttttattattattatcatatgatatatttcaaaatatggtacattatagcacatattgcatctatataatttaattgaacaaaaacatgttttatttatattagacatgcttttataaaaaaaaattataggccctcaatgtgtatttcaccctagggccccaaattcatggagacgtccctgtcgttggtcggacaggccttacgtgttgaaaaccgagtccttccaaatatcatcatgcttttctatttcatgtctaagtgtcaaatttaaatattaataacaagtacaattgaaaatttcaccactctttaacttgatgctcttttttttttttgccctggctgataataggattataataccaagcaacatattttaaatttagaatatgattttagggatttctatgttactaattttgcaaccaagctctttttaaaaatctaattgccaataagacaagtcggtagccctaaagcactagtagatttgaactagatttgcattataatccaaagcggaaataaggcggcaacttttggtgaaatgcattcaactcattataatcattttttccgccatcgctgattcgcgcgcgcctcctcccagcctttttttttctttttttctaccgtttttttttgttttctttcccacttttttctgatttatttttttaatctttagcatgttttgagtttgaaagtttttaaattttaagttgaaaattttcaaatctgaacttaaaagtttttaaatctcgacttgaaagttttcaaaattttcaaatctagacttgaaagtttttgaatctcgagttgaaagttttcaaatctcaaattgaaagttttcaaattttttcaaatttggacttaaaagttttcgaatctgagttgaaagttttcaaaatttgactttaaaatttaaaacttaaatcgaaagtttttaaatctaacttaaaaaaattttcaatctgttagaaaaaaatctccaaaaaaaagtctccataatctttcctaattactatcattagtgttaagtgtattggctaacagagataattaagacttaagaggggagtgcggagtgcacgcgcttgctaggagcctaggagccccctttttttcccgttcctaattacacaatcatccattgcagcctgaaactccttgaaatttacaacaaattttcatctcgagaaccagtcgatactagtaacacactaagcactgtataaatacggtgattaatacgtacatgtcctagtgatcatcaaaccctgcggcgacgatcagtcggactcctgcaggccggcgaggacgacggagccgacgaagaggccggcggcggcggcgaggaggacggcggcgaggacggcctggagcgcgacgagggcggcggagtcgtcggggacgaggacgacggcggcgatggcggcgacgaggagcgggagcgagacggaggcgagggcgtcgggggaggcggcggcggcggcctcgacgaggctgaggaggccgaggtcctcggccttggagaggaggccgagctcctcgagcgaggagagcgtgacgccgagctcctccgccctggacagcagcccggccttctccaccgtgctcagcaccttccgcctctccagcttcttgaacacgtccacctccacctcctcgctcccctccgcgaatatccccgccccgaaccactgcttcgaccacttctcgtcgtacctgttcacctgcacccccaatatccaaccaattaatccgccatggatggatcatggatgaacacatctccaatttcagtcgagacggggcatggctagcttggttaccttcttctggggagccatggccgtgaccttgaagcgccgcctcctcgcgaacggcggtggcggccgggacaggcaagacgaagagcagcaggtggagattgctgcttggacggcagccatttcttcctcctccccttctctcttctcttcttcctctggcgaagcaagaattcgacgcttctttttgtttcttttttttttaggaaggaagagaggaatcggagtgtggccaatggagagcagcttatctctgggctgggcccatcgtgtgggtgatcaaagcttgagccacagaaaatgccacggtggattggatttcctagtgtaagctgtggagacatctcagccattattcgggcacctttttggaagaagtttaataatttaacacttttttcaattactttaattattttttataaggatgataaatgagaacatctgagtgaatgaaagtggaccaaaatatcaaataatcgaaacccatttacggaggattaaattatattatcaaatctctccttttttttggccgttggttgggtaattgaacggctgagatcagagagtgaaacgaacttgctcgaactctctttctcacgtgtgttcatgggcccaaatcaacagcccaggtgtgtttctggtccggagagtggaggcggcctcgaaagcaagtagatagcccaaagcccaatctaagagggcccataggcccagatcgacgaccacaagacaacccgccgtgcggcccgcctggcagtttgcttttgctccacccaccaccaccgctgcttccaagttccaaccgctccctctctcgtcgctgagctctcctccggtgggcggcgcggcgatggcgggggacccggcggcggcggcagcggcggttggggcgatgaggccgtggaactacgtggtgacggcgcacaagctgacggtcgtcgcccgctcctgcgtcggcaacttcaccgcgcccgatcacctcgacctctcgtaagcgctcgcctcgcttgttcgctcgatcgatcacgcattcaccgcacatgcctgctcctcctcctccgcgggatcgcggcgggcgctagggctttgcggctgcgtgttggtttttttttttttacccgcttaaaccctatttcccccgtcgatgtttgctgtgatgatcgattcgatgctttcgtgctaggttgatcgtactacaccgaggtggaggtgctccccttttttttttgttttttggaatggggcgtgcttgcgatttgcgtcccaatttggacacagtgggttttgtgggaaatttaagagctcccccgtgtatttgttctatttttccttctccatgtattgttgtttggaattctcagttcgtgtagcacactagtcattcacactagtcattcatcagaaatgggcttgtggattcagttgtagtggatgttagcctactcatttattttaaaaaaaattcgtggtactgtgatgatggtgaagcagtaaaacatctgtgagttaataaaacttagattgattgtgttttttctaatatgttttttttgtgtgtatttgacttctatttttctccaaaattttatgtacatccttcatttgtttgggctaaagcttgaccgtacaacaactttcaggaaatttacccgtattgagattggagtatctgcttactcatcagggtcttcaggtcagacagatttgcctcgaccagaatatgttccttctgtttgaacctatctattattatggacagcaaataactgtgccttgttgttagcatcaattgttgaaaaggtgttttttaaggttattcataatggctactgttgttcagataaatgctgatatacttttagttgacaagttagaatttgtcctggcagatcaactggttacatgatattcttacaactataactctgtaagaccttttctttccttaccagcctatgcttgatgcacctgtgtatggtagaattgcaacaattgagctcttccgtccatgtgtaagtttgtactctgtttctacagctaaaaaattgaaagattctccctgccttcagacagtattgttgtaggactgatcttaagatcttatgttttccggtcccatcgttatggcatatttgcaaacgaaaaataatttgtgaataaaacttttatatacgtgtttttagcaatttaaaagcaaaagctgaaaaataaatttcaatgaaaaaaccccaaaatcaactccaaatttgaagttaaaaattcaaattttagttgaaaagcataagcataagcgaaaagataacgctcttcattccttgaatgaacctcaagaattaagattctcttttcatttgtacggaaagatacagatattgtattcttcactgggatgggagtaagtcaaagcttcttacaaggtttgatctctccatcatcacattatttttatatagattgcaattattaaactccatttttatcttaagttccttcctcagtagatattgttaggctgtgtttggaactccaagttaccaacccctctccctcgttttccgcgcgcacgcttttcaaactgctaaacggtgcgttttttaaaaaagtttctatacgaaagttgtttaaaaaattcaaattaatctatttttttaaaaaatattagctgatacttaattaatcacgtgttaatggaccgttccgttttccgtgcggggagattgggttctcaaccctactatccgaacacaacctaaaatatgtatccgtggcaacggtatttttcctgcaatcaaacattcagatggttttaaagtatgcatgtgatagtgacctgactgccagactgacattaaagtccaatctagcccctttagcctctcaaagaattcattggaaccaatcatagacatgcattcattcacttaatctatcaatatatccttgaacgagctataaatttaacatttttcaggaatacgtaaaaagattgcgcacaccttagcaagttattaggagtgagtagccatgaaaaggttttgcttaatttaagtatctattgatctagtgggcagggaaaatgtttcactatgttagttgtagatgaatgtatgatttcaaggttctgcatctttatattaggtattggcatctatcaagttctcaccagacagcagagcaaagtcatcttgcaaatttgtgaacgcttttgtctatttgaatcaggaaaatcggtatgtaatatgcaggtcagggagagatgcttctgaccacattggacgccctacaaacaagggacaggtactgtgttcatgattagaagcatttatttttccacttcgtgttctgtacagttatcagctatgtgtttcttgttaacagacagatgaactcagcagggactataacataacctggatgactgcggttgagatgctcgacgactacgtttatattggcgcggacaattgctataacctgtttaccgtgctcaagcgccgtgttgggaggcttttagtcattgggcagtaccatctgggggacctggtgaacagattccatcaaggcccccttgtgatgcaagatccaggctcagaagtagaccagattcctgccttcatcttcggtgaaagcagaatagactcaacgcaatagattggattgatatcggtgcggagtacatataggcacgaaatctcccttatccactcagccggttcatagaaactgaaccgagagagataaggggaatcggcaaaatagggaaacagagatatacacgagatacaattctaacattcggcacggccagtggcgccatcggtgtcattgcctctcttccacattactccctccgtcccaaaaaagacaaaccttgggtttgaatctggacatgcatcatgttcctcgagaagctgcagcttgtcctcgctgattacatcaagagcgttggcaaccttacccacgcgcagtggcgggcattctgtactgacggcaggagcgtaggtgcggcccagggatttgtggacagtgatctgatcgagtctttccttagcctggagccaagcaagatgggaggaggttgcgcggatggtgtggcttcatgcggacgagctgtgtaagagcatctccaacagcctctccataccactctccaagctaaattttagctgatttgatacaaaaacacactcaaacagaatggctatcccaattgccaaaagttagcaatggccaaacatgggctcgagctagccaaacttggccagcctttggccaccctcagccactgtccatccgtgggcccaccaactttttcctctctctccccaccagccgcaccatccctgcccgtgccctccctccttttgccgcaccgcccttcctcccgatccgctcgtgcctgccgccaccacggggaaggaagctcgccatcgccgtcgcttcgttgccgccggcgagatgggagaccagcagcgggatgatcacctccggctccgggtcggcgccacgggtcaggttgcagaggttgagcgggagcatcgccgaggcggggtggttccgcccgccgccggcaagcttggggagctcgcgggcgaccttgcctgtcctgttgcggcggcagcgcctgtgctagctgagcaccagtaggaggtgaagcagctgcttggggagcaacagcagatcggaaccccatgccgggctgacgcgaaggcgaggaggagaagggagggctcatcgggtcgccggccggtggtggtggtggtgatgcgcggatgaggaggagaggccggccgatgcagcgagcggagcggagggggcggtgcctcgccacgcgcctcctctagatcccgctacgtcatggctgctgaggtcaccctcctctcctcctccggcgactatcgaggaggacgaggccgacgaggagtggatctgtcgttgccatcgccctcttgtccacaggagaggataaagaggggtgtggggaaaatggagaagtacgaggaagaagaagagctgtagaggctgacacgtgtgtcctactgttatagagtcagaatagagagggtgaatggagaagctgttggagtaaacaacgtgtttgacttgctaaattagatggagagttggccaaatagatatttggagagttggatttagaaagactgttggagatgctataaggtagtgaaggcgctgaggaaactgcactgtcatgatcgccgaatagatggcactcatggcagctagattctgatctccatgtgctgctgctgatgtacatacaagactggatggaaaatctgtgcatagctccatcgtcaatcagcactaccaggtgagatgttgaaggtgctatttggtgttttaggcttaactaaacggccacacaagaacacagattttgtaacctcctggttctactggttcaatttttccatgtttagttggatactactccctccgtcctataatataagggattttgggtggatgtgacatattctatccagatttattgtattaagatgtgtcatttctaccaaaaattccttatattatgggacggagggagtactcggtaggaggaaatagagtaattgtcagtagttgcaaatcatacgtcctttgtctgaaaccttttagacaaaggttcagttaggctgcagcatagtgcatcaagatactccgagcatatatgccattgttctggagtgagctagtttggcatcaaagagaaaatgagtgtaattacgcatgcaattcatgtaacgcaactgatcggttattctcagctgtgtgatcatgggaaaaagaaagtgtatcattgtatttcgtcgctgtgtatgctttaccaggacatcggacaaaagtaatgttctcttgcaaacgagactttcgatgaattaaggcattgtctagccgacatgggctccactgctccagatgcccactaaagcctcccgacggaacagaggacaaatgaaagaaacagacgaatggcatctaagaattactaatagatcagtaagatcacaggtgattcttacgcttctttattagcagattaagaaaaaaaacaattatacatcgatactgctttttttcccctaaactttaatgccggaggcacaattattaacagcctcttctaagaggtaccgtataattgtccatagtgacgggcatgagtcactccaagaaagtagtattaataaaataaactaaatacgtagtatttattaaaaattttattttagttgatttttctcaattagaataagacattgctcttttcgcttattcaccagattatttgctctacccttcaaaaaaatatatttttcaaagaaatttcttacagtttattgtttaaatcacttgttttaagatactatttgttaagattatttcttaaattatttaattagctctataataaaatagatgatatgtgacaaataatttacttaatgactaaacgagtaaatttcagaaaaaaaaaccctgtattttatagtcaaaactttatttaaaaaactaggcattaaattggtggcacattaccataatactcttaaagttttataaaaccaaccattctactgttgagtgcaattttttgtaaattttaaaacatagagtatgattattattatttaattgagttcttcacttaaggttctgatcgagcaagactaccttctgaaatttactatcgtttaaatgaaaccagcgtgagttagcgagtagaaatacccacatagtgacccaccccaaattcctaattgctgtcatttctctctcatataattctccttgagcttgtctctggcatccaaggtctagggccccttcttttaagaagagaaaagaggcaagcctgagctggctcttcttaatgagttgctcgcagtcacatgctccatgggtggcgccgtgcaggcaggcagcagggagaagaaggtgattgtgtcctcaggcggcccaagaaggatccaccaccgaatacaccgccatcattctcggccgaacatgccatcatttctggatccaaccgctacgagttggccgccagatttacgctccctgccacgtactccgttgtcccgaaaaatatgttcacgttgattgacttagatgtatcacatcttattttagattgagttattttgaaacgaatagagtaaaactacctaatacgatgtacacggtacatgcatacacggctcattatctgtgaagccacacgggaatcagtcgctccagtgcctttgtccaagatggagctattagatcaaagaaagaaaaaagaaggatggagctagagtagatttttcctttttcttttacgtaagacagaacaaatgcacctatgaagcttacacgcacacaaacactcttaaccgcatacacctcattgtcaacttctcaacagggacgttatctttcaccaaaaaaaaacagttagatgcttaaccacgaacatcttactagtaatgaatacatcgtctatcactaaaaaaataattaactcatatataagtacatcgtctgctattaaaaatataactagtaataaatatgagtatttatgtcaatcgtaggacttaaacatgagtgaacaagttccattaaaaaaaacttaactagctgagctattcttaattcaaattaaactaattaataatgtgttataaaaaatatttaaattggaattgaaaatttagagaaaattttattgtttgaaagtaatttttgtgataaatgcactggtgccatttgcaacaattctttacaaagtttctctctctctctctctctctttttcatagcaactacttccttcgtttcatattataagactttctccacattcatatagatgttaatgaatcaaggcacacatatatgtctagtttcattaacatatgtctagatttatatatatatatatattaatgaatctagactagggatgaaaacggagcggatacggacggataatgctcataccgtattcattttcatattttttaccggatacggaaacaaatacggatagctcgaatacggaaacaaatacggattatctcgaatacgaataagaatcgaatatgaccggacacgaatacggaaacaaatttttctcggaacacgaaaaccaacttaacttctaatagaaacaaatatcaacatatataattagctcactttatattaaatgtagtataatttataaatatttttaaaaatttaaataatatgagtgtggactagtgttaacagataaaccactattaaaatctaaaaatgtatattgaaggtcatatagttataaaaaatggggtatgtctcatagcttctgcggatatccgaattattatccgtatccgacggaaactccgataccatattcgtattcgtatccggaagaaaatatccgtattcgtatccgtatccgaattatccgatccgaaagttatctgtattcgttttttgccggagcagatggaaactatccgctccgttttcatccctaatctagacatatatgtgtgtctagattcattaacatttatatgaatgtgagcaatgctagaaagttttataacctgaaacggagctagtagttgaaaacagatataataattgtctagaacatcgaacataagtatgttccattaataatgctttaaaatctcaccgtcatgaaatttgaccatttattcctactactatttgtttaggtgggcacattttgcaattatttagcattaattagacatctttttattgacataataccaactcagaatgagacagtcagatctgagtgatgtcacatcgaaggatagtgttaatctgttaattagttatgagatttttaaaatcttagagaaaagctcatgacgaacaatcttaatatccgatgggttttggaacattaacggcagtttttgaagaacgaatttttagcgaagagttttgtagggtttgaaatggagaacgttctatttttaatagatgattgtgatactgtgaaattcttttgaattattcaatacataaggattttagatgaaatttaacatggacctaacctctttttttttccgtgaacacgcaaaagcattgtacgtcaatatattaaaagaaaaaattttgttacacgacacaatcagctagattagcttatgccaagaaaagagaaaaaaaacacaacaaaaaaaaagaagagactactacgatgactaaacacaactccaatcagctggggttaggggggggggcacagagccacactaaccttgtagaaattttcttttggtttatttttctccttaaattatcgtcctatttggtggtctattcaaatcatttatgtgttttgtttcgtttcgtttcataaccctatgctttgcaaatgtcatatgtataagaatcaccttttttccgtttatgtgttttaccatacctactactcacgttaaaagaagccatttaatagcttcggccagcactgtgtcaataccctaaagaactagtcaataccctaaagaactagcgagtcaacgggcttatttggattgttaccctatcaattttttggtagtgccaagttttggcactaccaaatatttggtaagttaagattatttttatcatatttagtttgctaccaacatagagtcaaaatgtgaaattgtagtaaagaatgttctagataatgccaaatctagattaggtattaccaatgaatgggcttcaatccaaatcaaacgcaagtactattcaattaccaaaatattggtagggcatgtttttggtagcaatccaaattggcccaacacttatctttttttacttcgtatcatgtttaggtgtatctgtcgtcagtgtgtttgggaaacggttagtgccacccacaagtaggggtgggcattcggtctaaccgaaaatttctgtctcggtctttggtctttcggtcttttcggtctttgaaaagcgaagaccgaattttagtaaaaaaatgtcaggaccgacaaattcggtctcgatcttttcggtctcggtcctgaccgaaattcaacaatattttcatatatgcaaagaaacaatggaaattttcaacataaaaatcacaaaaaaaattcataagcacttatgagtaaagactcttaataggttgcatgcctagaagaagtaggatgtgaaaattagagtttaatctattaaacatagtggattgtatgttgcatttagacatttttttggtaattcggtcttttcggtctattcggttacccgaggagactaaccgaattgaccgaacaaaattcggtctttcactacctaggaccgaattgatgaccgaatttctcggtctcggtctcggtcttttcggttcggtctttcggttcggtctttttctgcccacccctacccacaagctaacccaaacttgtgctacaaccttttctagaagttactagtacactttgttgttaagtcgttgcaaattaaccaattagtattgactagctagttaagaggatggatggttctactaggtgcacgctactctgtcgtatgcaacactctttgattttttttacatacgtataagtacgctaattattaaaaatatcatcacatccataaacaaagaaagcttaccaacccaattataaaaagtaggttgaacagaaaaatagatttggcatgttgagaaagaatccaatgaactttgttggaacatgccaatatgtgcaagccacagaagataagtacaacgtgtcgtacaattgtgagatcctatttatgttttttaattaagaatgtactttatattctaagtgcattattgtttttaaactacatattttctatccacacaaatcaataatacataagagcatataacaaatgaataaatgaggtggctctaacatccattttgctgacgcggagatatgaaagggaggagaggggctgcaatacctctttttaaagaagagatttggccattgttctctaacaaaattgtgaagcttatattagttttctttgctcgtataaaagaccattattataggtaagtgttattttgactgttattttaaatatgatgcgagatttccaataacgagaatacatggaccaataatatccctcctctcaaagttcttatgaatcaacaacaccatcatttgctttttagcttatcagcatatttaaaatttgaatattaaatttagagctgattttaaagttttttttgttgtagttaatcttccaacattagttctcaaatcaacaagataccatatatttttttaattttttatggtttatcaatttatgccaagtgcccctaaaacccagtattcgaaggtgcctatagttgtaagccgtacatgtgtttataaacatgagtgtctgcgcgtatgtgagtgattttgtttgtgctgtgtttttttctaaaaaaaaaatagcaaaacacctatgctttggtataggtaaaataaattatattataatgtcatagaaaaaatatattttttaccaaatatgttagtatacttgtttgcttatttaaatataggaaaaagtacaaattacctcccccgaattatcgcggtcgaccgaattaccccctaaaccataaaaccggacattcttcacccccaactatgcaaaccggacgaattacccccctcgacccaattcgcggtggttttggtctacgtggcgtacgcgtggcagtccagtcagcattttattttttttaaatagtgggacccacatgtcatacccctctatctctcttcctaatgtctctctttctctctctctcatgggcggaggcacgcacggcggcgcgcggcgtgagacgaggaggggaaccagacgacagcgtgaggccgcgg

SEQ ID NO: 8902 - DNA, 43718 bp, Oryza sativa
  unsure (1)..(43718): unsure at all n locations
gcctgcagcaacaagacatatagagaaactattcagtgaaaaaacagaagcaaagacatccaaggttagcatgccatcaaaaaaaaaaaacaaagagtcacatacccacaagtccaatgataagaactctccacctcattacgcttgactttaagaatatcatttatatattatatatttgcataaaagttttggatgaagtgaatggtgaaacactcatttaaaagtcaatggcgtcatctattaaaaaactgagggaatatattctaccgatctctcataaaaaaataatctcataaaatgcatggccatttgcaccatatttcaccatactttcagaatcgacaagattcagttctaggctaataagccctgaacaaaacaaaccatagataaaaccaaaaaaaaaaaattgtagacacacatatagcaaatcccaacttttatgcgtgttactagtgatttaaaactaagggtagaagaagataaattatgatggaaaaacttcagaatatattaaaactgaactaatttcaaaacttaaattttagctgcgataattagtcaacaagaaggcaatgaaagttatgaaacttagtgataatacacatgcattccaggagagtacacatgcaatatatagctgctcagttgattcttaacactctgtgtagcatatatgttgttttttcaggaaaaatagaatttgaaacctatttaattactaccaaaacctaccaccatacccacaaatgcccgatcaaaatgtgccgataatctggtgaagggaagtgtaggtgccaacgatggtgacgcacactccaatgaccagtatcccaacaatcgccgccacctcgaagcggacaactcttcctcggggcatgtagatcttgaggtagctcaggcacgggaacaacatggcaacgacgacgttcagtgagaacccgatgaacaacatgaggtagccgaagaagggcaaagtgcacgccagcaccgtcatgttgacaacgacggctgctggtgagcaccctggttagcccgttgttcctattgtcagccaccgccgccatcattgccgacagcttgtcctctatcgccattgtgatgggctggatcacgagcgcgtacttcgccagcggggtgatcagtgtcgtcaagatggcgatcttggtgtacacnttccccgtgggtaagttcagtgtcaccttcacctgcacatcctcaccatagctcagatatcccaacactgttgtcactgtagagttgagactgcacatcaccgaagagattagcaaaacctgcacattaattggagaggaatagaacattattggagaggaatagaacattattggagtactgttccattatcatcatcgtcatggtttcataaaccaaattatgataactggaactgataatccaatgatcaattatcaattggttgccaaatctctctaagtgaaaggtaaaacttaaaatgcaacatcattgagctacatcatctgaagatatgtaccattgaatgcaacggttgatataatatccactgttagatcctggataagtatcagcaaaagaatggtaaaaggtccaagattgttcaagaaacttccatgagttaattgtgcaatagtcaatgccctaccacttttgcatcttatacctaacaattctcatagctgttggctgagtcaaaacttagtacaagaatatatacaacacaacacaatagatctatcttttaactcggcattaaaaattttatgatgcaacagatcttccaaatttagatacgctaccttttaatttatctaaaattgtattggactacgcattaaattacttaaaatttttttcataaactatgtattcaaatggctaatataattatttcattttaagtgctagacgcatcttccaactttaggttttagcatataaattaaaccgtattaggcggctcttgattagctttatctttaagctacattgcttttacctgggtggatgagaggtaaccaaatcccaacttgagaggcagccctaatcgctaccattcaccagtttattccgctggggtaataggctttaatatagcatagtacgcctccacgctagttaccagtttattccactggtgtgataggttgtattgtagcacagtacgcctccacatcaccgcacacgtcaaactagtcgaaaggctaacgcgacattaccctaaatttacatcattatgcaaaaaaatatattaatgctaaattgtgaatattgcacttgccattccatatatctgaaattaacattacaaaatttataagtagtacaacatcattttttagcgatagtacaacttattttaataaatgattttaatgttgatttcgtatgatcctaattcttattagacgaccaaaataaacttattagctcgaattttatctacatgatgtatatgtagacctgctatatgatgggagcgccaacaaagtatatgagagccatgcaatgctgagtatgatgagaacatagcagcgatgatgattaagaggtgtgcatgattagtgatgtacgagttctaaaaataattatgagtgtgcgcgtcttccatgcatacatgtaataaaaaagtaatttgtttgtattcttactaaacctggtgctaatttaataccaccattgacttttaaattttcattaaccataattctaaatttacattcttaattgttatcacaaattttagcaaacttactatcaagtacaacacataaatacattttaaaagtgtataggaaaatccttcttagacttcattgagcagtaaacggtcgggaagacgccatagccggcgaagcagacgaagtagaggctgagggcagtgggcaacccgctcagcgcaaccgacaaggccagcccgaccgccgagataggcaagcacgctgaggttcttgagccacgtcgtcgggaggatgacagtggccgccgcgagcacgaatagctgcttcccatgcacctggtaccctaggatctccaccaccgtgccggggaggagcttgtcgaggttgtcgcccaagaggatgacgaagctgatggcgacaagctagagctcgacgtacatgatgaggccgatggccgtcaggccatagccgctgaaggtgaggtggccgatgtccagtagctcagcgatcgacgcgcatgcagcggtccatgaggttgatggtgtagaagcatatagcttggtgaagagcgccaggctaagccacctgccctgcgagggtagatcagcgatcgacgcgcatgcagcggtccatgaggttgccggtgtagaagcagatggcttggtgaagccacctgccctgcgataccagcatggagagccacatgccctgagatagcgcgtacagcacggagagcatccttacgcttgagggagcatgttccttacgctggagggagcacgtgcgctgtacgcgatcgtccctagatcttcttgctcatgtttaccatagaagggagcctcgtcgatagggctcttatccgccgccataatctcatgttccagacggttgacgtttgaccgcacggaaaaaattgtttctctactagtgtactaacggcttctataattagtttttttctactagtgtacgaacggcttctataattagtttttttattagtgcccaaacaactcatgcaataccctatataatatccgatgtgacgtgccaaagctttatacccatggatctaaacaccccctatgaactgtaaatatgggatggatgtgctatttatttatagcctagctattatttgtaattttttccgacatgacgtgggtcagttcgaatggaacacgtcctttttgataaaaaagaaatctctctgcactcctcatacactacacaattgattttcgaaacgatttccacatcagccttctgttatgttacattactactaggttccatcaaaatttgaacaattttatatgttcttgtacagctctttcaaagagggccaattgatcttcatgatcactttagcttacgctgctttctactactcgactcccctggctgcacgttgcacctgtgcttagtgtaggggctctcctgatctccggtgggctcgaagtagagcttccggtgcagcctcgccgtggggctctcctcttcctcttcctgctcgcgtgggtcgtagtagaggtcgccgacgttgatgctccggtggcggcgctcctcgaactgcacgctcgccgccgcctccagcttcagtttggagaggttctccatggccgccatcctgatgccgtctatggagttcgccgtgttgcggttgcggtgcaggtgcttcgtctccaacttgtagtggagcttgtactcctggttcttgtagaacacgtcgaaaccatgcttgggtatgtcgttggggatctccttgccgatggccaccgccgtctgcatccatccacagaaattcatcacaacgcgggatcagcattgccatcaaatttggataaatttcgtaagaaacataaaaaaataaaattctaatatctcgagtggataactcatcgtgtagcttttacttccaaattcaatacatatggttgtaagaaattctgaaagaaattgaccgtgttgagtataatagcatctatcactctaaaaatcaagttgaaattcgacttaagctttgattaacaaatgataaattcgggtgcgaatagtattcatacaataaattagtcccttttttttatatctcaatgtgtgatttgattttgtacctaagttttttccttttggagtgggatatgtatatatgttgtatatatgaatattgctacgtttttttaataaaaaatcataaactaaactatttgaaagggttttaaacaaatgagggacgaggtatcaaaatagttaatttctcgtacaaacagttgagagtgagtttggcagaaattaaattgagtgagttttgtaaaatttagttacctcattgcaccagcaggaggcgacgtggttgatggtgtagccgccgccgccgaggaggaggagcggcaggttgaagctgcggatgaagctgacgcactgggcgtggccgcgcgtggtcaggttcagctcgccgagccggtcgccggcgagggagtcggcgccgcactgcagcacgacggcctccggctggaacacctccatcaccctcgccatgatcggctcgaacagccggtggtactcctcgtcgccgatgcccacgctcaccggcacgttcagcgcgcagtagcggccggggcccttcttgccgacgtcggcgacggcgccggagcccgggaagaagccgccgccgtgctggtggaacgacaccgtcatcacccggttcgacgcctcgaaggcggcctggacgccgtcgccgtggtggacgtcgatgtccacgtagagcacgcggcggaagtgggcgagcagctcgcggatggcgagcacgatgtcgttcacgtagcagaagcccctcgcgccgccgcggcacgcgtggtgcatcccgcccgaccagttgatggcgatgtcggcggtgccgctcccaagggtgcgcgccgcggcgagcgacccgccggagtagcggaggcagtaatcccagaggcggtcgaacaccgggttgtcgacgccgcggccgccgcccttgccctcgacggcgtagatgcccctggcgcgcgccatgtcgccgaccccgtcgtcgcctccgcagccgtccggggtgaggtcctggaggagggcgaggtagccctcgtcgtggaagtcggcgagctccgccgccgtggcgggcgccgtgcggaggcggcgcatgtcgccgagcatgccgtaggcggcgacgaggttgtgcgccatggtgacgcggtgcggcaccatgacgtggccctcgccgtagtcgacggtggagatccccgggtcgtagtagtagcacacccgccgcttcttgtcgtcgccgcacgacggcgaaggcagcgaattgccgccgccgccggccatggccatgtttaacctagctacaccggcgagatgcagacgtcacggtggcgcatgcaccggacgtacacacgcacatatataggctaaacatatgtaaggctgatcgaagcccagttcgtgccggagttggattgttaattgacttttaaattattaattaatccgaaaacaacttccaaattaacttccaactacctgatcggaagtttggaacggaactcgtatatatatcctcttaactttcttcccgtgcaacggcgtctcctccccgcacgcgcgcttcctaaccctacctttcctttttttttcttttaaccttcttccatatatagatctaatcctctctcgctattttcttttaaccttcttccataaccccggccggtgagagctctcgtccacagctcgtcacatcatcgttgtcacgcgcgtctccaccggtatatctcctccgggcgtgcggcagcggtgtaggcggtgcgcacgccgcggccgacatcgatctacaaattggtgggagaggtgagaaattagctacgttcctataatttcttctcttttttcccaatttttgttattaggctagttaccctgcatgttctgctatatctttctatacatgcttccttcgtaatttccttgcttggatgggactagaaaatcgatgcgcccgttggcgcgctcaatatttatagcctattatattattatttaatgggttttaaaatttaggtttaaaactagaatagtgcccgtgcgttgcaacggataaaaaaatacaataataaatggatgacaacgatttaattatatcttcaggatattatctaaataacattatatatttttttatgaaaccttatatgtttgatattgtgcattagagtggccatgatggtaaataacattccaggaaaatatatttgttaaaccagccgtatcatttagagttttatagaattgaaagaaaaataagtactcccttcatcaaaaaaaaactcaacctagaagtggatgtgacccctcctagattgatgtatgttgttctaggaggtttttgttagacggaggaagtatttgttgaatcgtcatggccagttcattagttatactaggtaaaaccccgtgcgttgctgcgggagttcagtataataacaataagtaaaaataatgtgtaaaatagctaaacaatataaacttacataagttgatatggtttatgataatttaaatttaaatagatatatataataatgattcaaatgtaaaagtaagatgatgtggctttatgagagaagaaagggagtgagatactttggaccgtagattaatcgtgtaaggcaaaaaaaacaattgatatgatatgatttaatgggagaagagaaaaataatactaactaagtgaggatgaatcatataggtatatacgatattataaaaaatgatgaagatatatattgaaatattatgtgaattatgtgggatgatgatttaacatgcttacattttaaaactctaaaatgtaataaattataaaattatagataatataacatgtttgcatgatgtttaaatgcaataattgttagtggatgatgatgtggcatctttgcatgttgagctttgggatctagtgggttataactttataataagaaaagattatatataaccctatttttgctcatattacaaccctgataattgatagcaaaatttctgaaataattttgatgccaaattttgtgaatttaattttgaaataatttgattgatagcaaaataattatgtctgaatttaaatatgcatcaatgcaaaataatgttgtatgagcaaacaatacaaaatgatgtgtgagcaaatgtttgcccagagataagattgccttttcatacaacttaacggagaggagttaacaatagtttggctgtgatggaatttctgggagaaatatgcttgtacgatggcattttcaggaagttgtgtttgtcgatggcatttctgggattagggtgtttgttaatggtatttcatggattttctcttgattatatggatgagtatatgttaaatattataaaaataatgaatatatatgtgtgttaaaaatattgtgaataataatgtgaaggaagatgattggatgttgtttcgtagaattaaatgaattgtagatgatgttgcatgcttgcataagttttctatttaattattgctagtgaatgatgaggtggtatatttgcatgttgagttttagaattagtgggggttataattttatagtaagataggattagcttctccctaagacactctcgctgtcaattttgtcctcattcacctaatcgctcttcttcttcaggtagaagctaatttctgctattactacttgattattgatacaattaggccgtcacaaaatcacattggttagggtgggtttacttcgtgaaaagaaaaattttaggtatcagatcggacgtttgaccggacgtcggaaagggattttcggatacgaatgaaaaaactaatttcatcactcggctagaaattgcgaaacgagtttattaagcctaattaatctgtcattagcacatgtggttattgtagcactatggctaatcatagactaattaggctcaaaagattcatctcgcgatttccatacaaactgtacaattaatttttttaatctatatttaattttctatgtatgtgtctaaagattcgatgtgatgttttttaagaaaaagttttgagaactaaacaaggcctaacgaggccttgttacaaattatgtaatactctgatcaaattaattaggcgtacatcgacgtgtgccgcctgcggccggcatgcgcgcgggagttcacgttctacaagggcgccataaaccaaggctgcatgcatgccgtcaacgtgcatcgttggctaccacgagggcttcggctgcgacagtactgtgcatgcttaatcaatcgcgttggcccgtgtggaaagtaaaatagaaatggaaagcgtgagtggaacgcgggcgaatttttttgcgcgggcatatgcctgctgttcggacgacggaagaaaaaaaaaatccaaatcctattgccccgtggatcggcggattagataattacggagtaaaccgatgacgtccaacatttgttaacaaaaatatcttcaatttttataatagtagcgaaatacacgatgaacaaaataataacatatgtgttgctttataatacaagcatattatttatggtccttttcaagtaaaaatatacataagattttacatgaataaattcaattcttgttaggatgtgctacctgtctaccggctgaaaaatttcttgctttcagccgcttattttagcgctggataaatgtatcggacgatccaacgatttcctgcggcgctatcagcctatcacacattccgtcagaatttaaaagttgtcctttttgcaaaatagccatcaattttgtgagaattttagatacacccttcttaggcctaagctgttacaactttttcgcataactacctatagtttttttttataataaaaccaatgaaggaaaacttcctttctccttcgcatataatacttaagtagttttgtatacaagattttaaaaatactgttttgtatacaatctttgtgtgcaaagtactcggtatgctagttttttttgctaatttttgccatatgtgttcattcacttttctaacatgtatatagactggtcaggatcacgtctttactaccgattcaccattctctgtttgttttgttacgaccttcacgaaagtgaaacgagacgagaattgtaggcttctttcctaaactaaaagcggtggttcttgcctccctgtgcctaaagcgcggtgggcgactgcggtttgagtctttatcgatcgggtagatccatatgttcttgggggagacgaggtgtagcgcagtctggtcagcgcatctgttttgggatagtcatctcattgatatttttagtacaacatctaatctagcttaatcaacgtgcgtctagcttaatcaacgtgcgtctactttagttatctcattatttttttgtcaccttttgtattaatttactaataaatgtttcttgtttgtttgtaattttgttagcaaatttttaggtgtaatgagtagttgtctagtatctctcttatttctattttgtttcactaaatgtaagttgcactttatttttaactataaggttatcattaataatgaattctatgttatgatacgtatgataagttatacacgctattttcatatgtgtatcatgtaagtattaaaaatctatcaggtgattttggtttaacaggtgcacacacagacacggggattatggcggcggataagagtcctatcgatgaggctcttctccataggcaagaagatctacgagatgaggtggattacgacatggagcatctcctcctccctaccggcagcaacatggagcagcatctcctcctccctaccggcagcaacatggagcagcatctcctcctccctaccggcggcggctcattttgtatgaccggcgcttcctttgggaggagctgcctaaaccttagcaacatcatatccggcatcgggatgctctctgtgccgtacgcgctatcccagggcgggtggctcagcttgacactcttcaccatggtcggcgccatctgcttctacactggcaacctaattgaccggtgcatgcgcgtcgaccgctgtgtacggagctacccagacatcggctacctcgccttcggcagctacggccggatggccatcggcctcgtcatatacgtcgagctctacctcgtcgccatcagcttcctcatcctcgagggcgacaacctcgacaagctcctccctggcatagtggtggagatcctagggtaccaggttcacgggaagcaactgttcgtgctcgcggcggccgccgtcatccttccgacaacgtggctcaagaacctcagcatgcttgcgtacgtctcggcggttgggctcgtctcgtcggtggcgctgacggcatcgctggtctgggccggcgtggccggcaagggcttccacatggagggcagcagcctcttgaatctgagcgagctgcccaccgcccttagcctctatttcgtctgcttcgctggacatggcgttttcccgactgtgtactcctcaatgaactctaagaaggattttcctaaggtacactttttaaaatgtatttatgtgttttactttatagtgaatttgctaaaatttatgataacaattaacaatgtaaatttagaattatggttaatgaaaattgaatagtcaatggtggaattaaattagcaacaggttcagtaagaatataaacatattgttttttattacatgtatgcatagaagatgcgcacactcataattagtttttagaactcgtacatcactaatcatgcacactatactcgcacatctcttaatcatcatcgctgctacattctcatcatactcatcattgcatgcttctcatatattttgttggcgttggcgctccattcatacattaggtctatatacatcatgcaaataaaatttaagctaataagtttattttgaccatccaattaaaagtaagaattaggatcagacgaaatcaacattaaaatgatttattgaaataagttgtaccatccctaaaaaaatgttgtactagttatcaatttcgtaatgttaatttacactgataaggaatggcgagtgcaatataaaattaatggcaagtgcaatatacacaatttagtattgatatacttttttttgtataatgacataaattaagggtactgttgggatagcctttcgaccagtttaacgtgtgaagtgacgtggaggtgtactgtgctacaaaacagcctatcactccagtggaataaataggttcctggaggcgattagggtcgcctctcaactatatttggttacctctcatccacccatgtaaaagcaatgtagcttaaatataaagctaatcatgagccgcctaatatgatttaatttatatgttaaacctaaagatagaagatgtgtctagcacttaaaatgaaagaattatattagtcatttgaatacaaagtttacgaaatttgtttttaactaattttatgtgtagtccaatacaattttggataaattaaaatgcagcgtatctaaatttggaagatgtgttgcatcataaacttttctttgccaagttaaaatagagatatattgtattgtatatattcttgtactaagtttagaccaaccaataggtatgagaattgttagggataagatgcaaaagtggtaggacattgactattgctccattaactcatggaagtttcttgaacaatcttcgacctttcaccattcgtttactgatatttatccatgaatattgacaaatattgtatcaaccgttgcattcaatggtccttattttcatatgatatagctcaataatgttgcattttaagttttacctttcaattagagagatttggcaaccaatgataattgattacgaattatcagttccaattatcataatttggtttatgaaaccatgatggtgatgataatggatcagtactccaataatgttctattcctctccaattaatgtgcaggttttgctgatctctttggtgctgtgcagtctcaactacgcagtgacagcggtgttgggatatctgatctatggtgaggatgtgcaggcgcaagtgacactgagcttacccacggggaagctgtacactaggatcgccatcctgacgacactaatcaccccgctagcgaagtacgcgctcgtgatccagccagtcacaatagcgatagaggagaagctgtcagcgacgacggacgccgagatcaacaggctgactagggtgctcaccagcacagccgtcgttatcagcacggtggtgctggcatgcacggtgcccttcttcggctacctcatatcattcatcgggtcctcgctgaacgtcaccgttgctgtgttgttcccgtgcttgagctacctcaagatctacatgtcccgaggaggagttggctgcttcgagatggcggcgatcatcgggatactggtcatcggagtgtgtgtcgccattgttggcacctacacctcccttcagcagattataggcacattttgatcgtgcatttgtggttatggtggtaggttttggtagtaattatataggtttcaaattcttttttattttttttctgaaaaaaaacatacattatacacagtgttaagaatcaactgagcgccttgtttgtatcataatttggcttttagttagtccatttatgcaagccaaattatttagaaaagtgttgagtggtttgctcgagagtcagttaaataaatatatatgtgcagagaagagaagtatcggttatttgcaagttactagcaaagaactatagcatgcagttcggtatatttctgtatctgatcagattttgggctaagtgctgtaaaaggtgcagatggtacagctgatgagattatcgtgttctttgatggttttggatggacaacatcaaggaggcacagtgaatagcttgacaacatgaagacatgatatggattcttgtatttttcattgctgtcaaagccttatggtgttaatctagaaaaaagcataagcaggagccaggtctgtgctggtgttaagggaggtgaccgagatgaatttggattgtatctcgtctatacatactgattggtcacgtgaagtgagatttggtgttggtttgcatgtgctgaggacgattagcgcatgcagtggccagccagctgaggattgagatatatttttatcactttgtttccttctaagatcagagaatagcattatacgcatacatatccatggtactactttatgtgccatatcctgctatggatattaagcactattattagtacaatatatgggctgttgcacttgccctttggctctgtttgtgcatgtcttgttttttattcctctatgatacaagagattctctttttattgggtgttttattttttaagtggtttatttatacttcatgaagggttaaattgaaccatattatctaaaaaaatcctcactagagcattaatcattggaataatcaataaattacttgagccacaattgatggataaaatattcttaaccactacttcttgctattgcccaaaatttgatattggcaaagaacaaaacagatcctacatctgtgaactgagcaaccggggtggcatcactagcacgttgcgcacgtacttacacttgcacagttttatcttccacaacaagagtgaatagccaatgcggtctcttaattttttttatgttagtttaatccctgattttatattgtccaaactccaaataaacctcttaatttatcatgtgacttgatatagtctctaatccaccgaaaccgttatacagacatgccacgtcatcctagcatacatagttaaaatcaaaatattcattctaccttgtatataccatagaaaataagaaagaagaaaggaaacgacaaaacataatgattatcatatctttgtgtctttatttactacatttttatttgtcctttttctctcctttcctctttatttctctttttcttaaaaaaaatggcataggtgaggataaaatcaaagttggatggaagtaagtcaatggatctcaatccgaggaaggcacataatctcattttgttataacgtcacacaaatataactttggataaaagcatatctaacaccctaacctaaacgcttcaacttactacataatattgttcatataacttctaaggttgttttgaacatgctgatttccgtatacagatactaaataaggttttggttaacaaagatgacaaatttcaggactaatcctcgattattgtgattgtatcgatcctcagttattggtgtaaaaaagagtgcatgggagaatttgacatatatcttgaatatatctactcctcagtccgaagataacttcatttctaacatgaacagtttattctaaaataagttcatttctagcctattataaattgtatttcttttataccttttattctaaaacactcgtaatactatttctttatgaaaaataagttcacttttatcctgttataagttttattccttcaatacctttatctatctacctactcatcaatactattttaaggattattccttcaatgtcctttatctatctatccattcatcagaatggaatgctattttttttttcttttgataaggagactttggtcttttctctcaaccttagtttgaagtttgaacaccaaagactaaaaatagagttatttttgaatagcgggagtgtggcgtcactaaaatcatctattgtacatgtaaaattagataaaaccgaataaaataattagataaaaagcactttagcggttatacgaacagtattatgaagttgatagagttggttatccgacttcaaagtatgaggtgttagatggacttttactgagggtatattgacttctccctatatagtaatttagtaacaccaagcaaactacattaagagaccatggagcaacagcatcactcttgttctacacactttcactgcagcaacaccacaaattaaacctgaatacatcagagttgctactgctccctaattcagtctgttattttggtgttcgcgttacagaaaaaggctcaacttgtgtccacagaacctgcacctttctcctcaagcttatccatggctgatgccaaatagttgtcacagtaaccaggtggctcatagataaagcaagagatcacgtctcgcagtgtcacgacaccaacaacctcgaagtcaccgtccacgacgtatatccggtgggttattcttgatgcaatgctgtcaatcacgctgccaagagaagcgtcaggcgaacaggtgagaggtggcttcaccaggccgttccctgaatcagaaacggtggaacctatggtcttcatgaactccatgacagtaagttgcctgtatggaagatttatcattaggaacatggaaatgcaaaattttgaaaatgactcacgcggtaacaaatagccggatggtttgatacctgaaattcgaaaacaagtcaggcctaagtaacaaaaagcgaatatcccttatgctcacactgccaacaagttttttgttgggaccttctactacaggcacaccaccaattttgttgtccttcatgcacttaaaagcttccaagattagatcaccactgttaacagtgataacctgaagaaagcacaaaattgttcaactaccagtttattgcaaagtgaagagaaaaaaaattacattgtagcatgtttcagcttgagatataacttttatcttgataatgtaggcagacatgatttctcattagtaaagaattggattagggagacacaattacctcatcaagtgacataaatggaagtcccaagtccgagagagggagcgctgaaatataatcaaaccaatcccttcctttgcactgctgaagtcctttaacaacaccagtctgagtaatgaagttcttaataattggcttatcaggctcaatcactgggacattccttaacctgtacttggatagcaacagtaatacagtaagcattgaagtgtccagtgtaatggggacaaaaggagaccagcggtaggattctacaattgatcgaacctataataatgagaaaaaaatatgaaggttagcaggatttacatcagaagatcatcatgcaatattcaaatgaggcaaagaggacagatatccaaactattattagcaacaataagttgcagctaagaaatcacaggaagttttcaatcacgccaagctgcggcatatattgtaactaggatagccaaacttcggtgtagccacacagcagaacagtggttcaaggtaaaatatataccaaataatttgagactgactggactctataaatgatcgacatttaacaaaaaggaaaaaaaaatccaaatatgcataataattcatcatagagtaaaatgcatactgtagttgatttgaaaggttcttgctgaagcagaactttgtagaaatcttctcctaaatgatcagcagcagttagtccatcctttgccacacccttttctgctgttaacccaccagcaacagcagcccctactgcagcggcagtcaagccagcaacagctgcaggaccagttgcacccaatgctgccactcccactgcaccgacagcacccattccaactcctgctgcggttgctgacccagctgatagagcaacggcggcaatctcagcattttctagaacccagaggatgatagccgagtaatcaatgatgccaaggtacctccctttccaatcagccggagctccacattccggatttagcactggcgctgccctaatgttgtgtttggagagaattctcacagcgtcaagaacggaagtgtctcctggaatttcaatcactgcaatgcaatgtgagggatcaaaaaaatacatggcgcggacaactagttagttaattttgtcttgcagacgtgtgtacctcggccattaggaacatcaggaaaagacgagacaggaatctgagcaaaggcagcagtgagcgattcttgcaaagagaggggcagcttcttcttggactgtatagtgtcaaaatacgcatcacagcttgggaatttcacggtttcatcaggtcgatccatttctacacaaaaaacaaaaaaaacaaaactcactcaaacattaatcccagtagatggcagcaatctggacacgcatctaatctaatcatggcacagtagatactcataactaacccaatcacgacaagccactttggcatatattagcaaagttcatcacaagttcaacggaggtacactattaatctactcctgtcaactaatcaggggctaacactcccaatccaatcctaacaaactgctactcttactctggttaggtccaattcaagaaaattgcttgcggatctggaagagaagctaaggctaacgaaatccgagaagaaaaaagaaaagggggttaggcgtagtgggtagtaaagaccgcaaagagagatgaggaagaggatgagcgtgagtacggatgcttcaccgggcgaagtggcggaagcagctgggacttccgccggcgtcggttgctcgcgggaggggaaggggatcgatcggggcgctgctccgctcggcggcggcggcgcgaaccgcggcgattgctggaaaccgtgggcggcggcggcaatccaggaggaggaggaggagggagatggattcgattgctagctagtactagtactacggtgcctcgcggccatgggggcgcggtgccacgtatgcgcttgggtggggccacgtcgcgcgaggggtggcgttttcgttattatattatattatattactatctccgttttttaatagatgacgccgttaactttttattacacgtttgaccattcgtcttattcaaaaaatttacgtaattataatttattttgttgtgagttgttttatcactcaaagtattttaagcatgatttatatctatacatttacataaaattttttgaataagatgatgatcaaacgtacatttaaaaatcaaaggcgtcatctattaaaaaacagagagagtatataattttattcttttttactaggccgcctacataatatggcccacggttgaaatagtccgccacatataccaggacacatataaaagtggaatatatttattggagttcccttaactttacaccaaatctgattttcatccttaaaccaaaaactagatatcatcggtccctgaacggtcaaaactggtacaaacgaggtccctcggcggttttggctgacgtggctggtttgacttgatcttcgtctcatgtggcatttgacgtggcgcttacgtggcaattttatcccaaaaaataataaaagccaggccccacatgttagctacacacaaaaaataattaaaaatagtggggcccccacgggtcccacatgtcagcctcacctcccttcttccctctctcttctttctcatcctcactccttttcttctctctccctctcttctttcctctcccctctcttcatcttctcttcccgcgggcgagccaggcaggcagcgggcggcgacctcggcgagacggtgccctcggcgaccttggcgaggtgacgacctcgcgtgccactattgcactccacctccaagccaccgccttcctctcccctcctccccccgccctcgccgccaccgatcccgggggttcaagggtaaacgtgtgagaaatgaacgagtaaacgtgtttttatgcgggtagtgagataggccacttacatcactacataaaagtaggtcaaccgctttgcagtgtaaaatacatcagagcttcagaaaaaaaatgatgaaaggctaaagtttgcaaatttaacttaacaaatttaaccaattcaacataatttgtttaacctagttacaaataataaattgaatttacataagaagttgagccaatctgctcatctggattcgagtctaagacttaaaaaaacaaacaaacaaatggaatgtcgttattcttgtatgtcaatgtcagcaattggaatttggatcaaaactaaggactggtatgatttgtgacctaaattggtcttaccaatttttaaaatgccaaattttggtaagttttgacatgactaattttgggaaggtaaagttgtgtttggattaaaggtaaaatagtctaagttaactattgaaatgacatattttcttaggcatgccaaaatttggtttcaaaccaaatagacactaaacactattgaaattgtcaaatattggtaagccaaatttaacccacgaaccaaaccagccctaaaaatttttttgttgtttaccacctgtgcattagtggtagataatttgtatatttatggatgctagtacagggtgtttgtcactcgtcagcatggaggagccaagttgaagagctctccggcacccttcccaccggcaacgcgcgcgctctgctcacggtcacggacgtagctcgcgacggcggccgccaccgtcgcctggaacttggggtcccagatcgccttcgccacgacatctgcctgaatagggtagtttctctggctccatgacgactgcgccgccggcatcgcgcgctgaagctccgaccacgtcgaagacgacgaggaggaggcgagcatggctaccgccgccgatgaggaggacgacgacgacggagggagcgcggcggcgtagggcgtgatggggtggttgtggacgccatcgtaggtggtgacgaggacggaggtgtcgtggttgcagcgctgcacctgcttcttcacggggcaccccggcgcgccggtgcaccggtagtagccccgcggccacgggttgcccttcgccgtcttctgcccgtacttgcgccattgacaaccgtccttcacctgtgagataaaattcaaaaataaatcagctcatctataccattgtactccctccttctctaaatgtctgacgccgttgacttttttaaacatatttgaccgttcgtcttattcaaaaacttttatgaaatgtgtaaaactatatgtatacataaaaatatatttaagaataaatcaaatgataggaaaaaaataataattacttaaaatttttgaataagacgaacggtcaaacatttttaaaaaagtcaacggcgtcaaacattttgggatggagggagtatttgcataattttttttacataaggctgtatattatgtctcaagttaatggtgacgtatgtatttctttttttaaaaaaaagagggaatatacaataatgaagcgtgcatatatgtctcaacttatacaatacttctttcattttatattataagtcgtttgatttttttcttagtcaaagttctttaagtttgactaagtttatagaaaaatatattaacattttcaatacaaaataagaatatcatcaaaatatatgcaatgttaaatttaatgaaactaacttggtgttgtaaattttactaattttctctataaatttaatttgttcaaacagaaaaactttgactgagaaaacttataatatgaaatatattaattggtcactatctatatgcgtgtgctacgtgcgtaccgtgggtgcgctgcatcgtgttctgagtacgacccggccaggccgattcgccgtcgacgcagccgtgatcatgcaagaccggtcgtcgtcgtcgtggcccgccggcacggcggcggcggcggcgccgcccccgtattcgccgcagatgctgctgctactgctgctgttggtggtggccctctgcctcttgggatgcaccattggctcgccggcggcgggggcgcaacgcagcgcgagggcgaggtacccgtcgccgccgccgttgccggcgtccgcttcgtctttcttgctggcgtggcactggcacgcatcaggagacgatccgaggctaagcccaagtgacaggaataacccggcctcgtcgtcgttcgcgtgatgccgatgaacctacagcaaaatcagcaatcgattaacctccagagatgtttaaagctactaaacagcatgtaactgtaataggttgacataattatcatcatatcatgcatgcatatgggcgttctctcggtcttaaatccaccaaatcaatgtaagtatgtaactgatgcttttcagaatagtttgttcattagtttctggtatatattgattacagagatctttgtcaaggtaacattcaaacattcatgcatgctaccaattaaatgtaaaatacacatgtaagagcataaacaaaatttcacaaaaagatgttcttctaataattattggtcaaattaatctgaaactatagggggcatatcctgtgaaaatatggcgaacagtaatagctcattatcttttatccttcaaaactcgttgttggagtttgatcttcagacaatacatagacagtaaaagtgtacgatatatgcctttccggcaacatgttgaaaatggaatttgcacaagaagtgcagaggtgtgtcacagagtcactggacatgttaatctccctagtagcaaccgatttgcagtaaaacatgtagtcccaacaaaagaattatatcatcttaatttctgaagctctgaagcatagaaaaaatcatctctgaatcaatgaaataattactgcatatatataccttctctgaagctttctgcacctcatccctgaaaagtgtaaaagtgttcatctcgatcaatctctgaattcagacagaatccaaaaccctttctttctcccactccctagtttttgctcctttctgcaataagccaataactaagcatatccctgcagcgagttctatctgaatatatagagggagcagcacctgaaaatgtcaaaagctgaccaaaatatccaacgaactgccgaattcaatctctgacagagccgccaagatgccgagggcaagcaacacatgcgtcaaaaacgagaataaactcggttgaatttcgtttagaattcgagacgtgaccgctttggtcatttcaatttgacggtttctcgctttgccgcacatccactcccacgccggaaagatgtaaattcgatctaatcctcgtgaattccatgtgcacgtgcgtgtccggccgtggtctcgtcaaaattcggtcagaattctgaactaaattaaactggttggtcgggtgttttttcttagccacaagctgggaggattatccctcgtgatggctacttgttaacgataaatcccgtgtgattattttgtagttttatcttttatatgctggtttggttagaaaaggagacaaatttgagacatttcgaagaagagtattcgctgtaccgtgttcaaagggaggaagtaggtttgagaataattctcggattgttgtgacatcagtcagctgcacgcgtaattaagggcttttgtttagaggctttcacgttatcaactcatcatcgtctgacataaagacggcatagaaaactcttcggaaggcacgagacagacggaacagcatagaaagagttttctactagtatgaattaattcagattgactaggcccatatacaaatacaaaggattattagttcgacaagactattgagtcttgtttttttcgcaccatggttatctccattgagagaagacaggttgtttttttttctttttctatatatcctctatatcatgagaggcatgtcgtggtgctaataaagataatatatactctttacatataagtcgttttgattttttagtcaatattgtttaagtttgactaaatttataaaaaaaatagtaacatctaaaataccaaattagttttattgaatatattttgataatatgtttattttgtgttgaaaatattactatatttttttctataaacttgatcaaacttaaagcgttttttctttttgcggggaaacttaaaagaagtttgactagaaaaaagtcaaaacaatttataatataaaatggagggaatatctatctatctatctatctatctatctgtgtgtatatctatcaatttagcaatcttctatactaactgggtactttgatggacctcctatgttaaagaaaaatatagatgttgattagatcgagtgcacaattatgttgtaccgcagattgtatttagaatgtgtcaatttaaacataaaactattgtggactcttcaaatttacttaacatattagataaaaccagactttctatctattacaaaataataattattaattatgtaattattataacatataaaagactaattatatatcatataaagtctaaacgtagtacaactttatttaataagagcggattgtatttttgggctccattttataaattttactttggaccaccatttagctaatattttcaattgaataaattgtgctttgagttattttttattatcaaagtatcacttttagatcaccctttatcttatccttttactttggactaaataattgtctttgttgcaatttaaaccacccccaaaccttctttttttttcaagtataccactgcaggggaagtccctacagcatcaccccagaccattttcttcagtacataaaaaaccttgagcacattgactacaactcaccgataaactccctcatccatacgcaagatatatctttgttggaggagcggttagtcatagctggagaaaatacttggggttgatccaaagtgcaaaaaaaaaagagtaaagttaactagtcctaagtgaaaaagaaaaatatagtcaaaaggtagtctaaagtgaaaccttgataataaaaggttagcctaaagcacaattcactcttccacttaacttggttattttgcttatgttgcactttggaacatcccaactctctgctcgagcacatcaattacttcatgcacatcggtgcccacacattagggatcttccccacttgcgtgtatgccaccctttgttggaggagaggctaatgtggctaaaaaagagagttataatggtctacaacaaatgcaaatttgcgtagtccaaagtgaaaaaattaaataaaatatggtccaaagtgaaacttagataataaaacatgacgtagattgcaattcattcaaaaataaataaatttgctatgaacatgacctaagttatgaagcatactaaatttaaactttaacacaaatacaattaaacactaattaattcaaaaatatttaaataaaacataaaacaatagaagatacattaggttggatttcgaattcagtattttattcaattctaaaaatttaaaattaataattagcaagtaataattgatgtgaactattattttaatctaatcatctataatttgaaaattttaattattgtattcgacatatgattaaattttaatattgatattactaacactaatatataactcatgcagcacattagttgacaatcacttattgtataggcctattgtatataccctaagaaagacacataagagcatgtgtagtgcggaacaccaacccgtctccccagaacctgccgtcctatcgccgtgagtttttccttaggagggagagatataaagttcttttttctatttctatggccattatttggtccaacattatagtgttgaagcttgtttcattttgccaatctataatgttcaatttttcataaaagcaaccatccagttatttctcaagctaacatttattttaacatcaaagtgaatgaaatggttgacttcaagcaattgaaggatgcacgtgcatatttgtgataaactggctgagtaatgaaccctgtgacatgagagtactcttggtttctatttgttacctttaataagttgacaaatgtagaatgaaccagagaacagaggggctggattgattagcatttaattaagctagggatttgtttgctataaacaaaacaaatgataatttggtatcgaccacgtgaaaattgcatcattggtccattggacatatacatgaatggctggtccttttcgcaaggtagcagtagtgtattagaaaaacatactatagataatgcgcattcaatttaaactgtttagtcaccaagctttggcccttccttaaaataaaatcaaaccagaactgtttcgatatatgagatgacacatctgcaacggtagcttgcgtacactcaactatatagtaatagagtaaattaaatgtcaaaaaagtcgtctggtattagttctctcggtgcaaagacacatataatattctttgatgcgtacctttatgtgttcctgttggttatctctcaccttgaaggaattaatttattgaatcttgtagaccatggatttttttccttaattaatttatacatagtatatatgttttatattgtactagctgaaaacacattgtaacatcctcaaattttaaactaaaatttgactgcatcatgctggcttttgattaaatttgtttggttcaaaaatctatttgatttttatttaaaattggttcaagtattagagcccaaccaatttactctaacttattccctttattctaaaccctagtgaatttgagcaaattctctcaaattcaaaccatagattatttctttagcttattctaatattagtggagatttgctatactctaaaccctagtaaaacctttccaaactcctagtttgaattcaaatcttttctagggaaatattcaaaaattttgatttttcctgttcattgcacacaagctgctcgataaaatgcttagcccaactagagcagcccaccttcaacttaatcttgcacaaagtctaggtttggtcctaggggaccacatcccactcaaaaccgtggctttctttgcctcttactccccttcatgcgcgccgcccgggcatccaactttgccgcgcgccgtgtcgctgcgcgtcggcctcggggcctcttgcgcatgcccgaccgccttggcgcgccatcacccgtccgacgccctccgcccaccgccgccgcaccaatctcgacgacgacaaagccgggacgacgaccgccgcacgaaatcaccgctcgacgccgtgcgctcccatccaagccaccgccgaatgtgattttgcttctacccggggtgaatcgcgccaattcttgccgcacggttggattgaagatagacggtggtatcccctctcacaattcaaaccattcaccccctagccggccgttttcaccctcgccgccgccgcgcgtcgcgcccagattggcgccaacacgtcgccagccgattccaaccgcggtcaagtcaatccttcgccggtaagtattcgaacgtggcctcccgccactcaaatagatcttgcccgccctctctcagcctctgccacctttgcctcatccaaatctcgagctcctccatggcgatgacggtgcccgagctcatccgctcctcctagccctataaataggaccccaatcccttccttgtccatcatcgatcatcaacaaccatagccccacaaccccgaagctctgcttcaccaatccatctcatcaaccaccctcgcctgtcggtcgaacaccttgtgcgcgatcgactccacccctctccatccatcttccgccctaaataacccttagaacacctatattctaccatgttctagcgtattaggccctaaccgaagctctgcgtcgagttttacctcgccgcaccaagccaagcaccgccgcccctgcgctactctgttcttctccgccgcgaagtttttccggccgcaatccgtcgtttcaatcgatctcggtgagttcttccgtttcaaccatctacatactacctagagtccatttttgcaatcggtttgcactatcttgccaccctctgagctgccgacgtgagcacggccgccgcctatggaggcgctagtcggcaactatgctccgcgccttgccaaaggttggcaagctgccggaatccctctagacacctcgtagatgctctagaacccctcccctagccatgtctaactctcatcactctggtcgccatcacagcctaaccgtgccaccgccgctctagccgctaggccgtccacacaccaaattagttccatcgccgccgctcgccgtcgccggagatccctagctccctcccctcctcggccgcaaccactttctccctctagtgccgccgcaatcctaaaccctagcgccgccggcccgatttggggaacggccggaggtagaagaagaaaagagagagagagactgacaggtgggacccacatagtgccatttcacatttatttgattttcaaactttagaagaccatatcttttaaaatatagatccaatttcattaaaacttggaccaatattcttctaaaatcatcctctatctactagacccctttttgctatttttacattttattttatttactctatttttcttatttttggattttatttaaactcctttttgaatttgaattttatatgtctaaccctaggtcttgaggattcctctgacactctagataatatcaatcaatctcaggacatcgagcaaggcaagttaccatatacatgttgatcatttcagcctatattttacaaattatttatttatagccttctattcaatattctattttctatgcataaattaatcatagaaacccagataatttagtattgcttattttgtttacaatctggttaaaataccctatacttagattgggacaatacgtaagatttggatgatttccgggtggctagtattgtctcaatcgatataagttttaccaggtacttatgtcgaatgaacgagtacgaccgcagtttctagaatggggatagacctagttattaggttaattggcaatatggcacctctgtatagtggttcttatttttaagtcctcgcgcaggaggcaactatagccgcgaagggcaactttaaccattaccatgtacaggtaaatggcttgtgatactcgagtataaactatatggtatatttataaaccctgatcgagatgacgtggtgtcatacgatcagttccccttaaatacctcgggaacgccagaactcctcttgctgctgttaacattatgttcagagcatatgaggatataagttcatggaacaggtgccataattgttaatgacttaatgttgggctatgactaaagccgataattatcagcaagtcgtggactgcgggtaaagcgtacatctgctgcagtagaatatctttgaaactattcgaatagctgtactcgtggagttgagtaccgggactcatatggtaccctggttagaaatctaaagtttatatgttttataaattctgctataacttttccagattgtctaatactgctttttgcaaagaaccctattatatgtcaatgcataacatattttcattataacttgctgagtattgtgaatactcatccttgctcttataacccctttttcagatctgggtcaagaggaggacccatatgactattactacgaagaccccgataacttagaaaatccctgagggttttacctcactagtcagaatgtatagaaacttccgctgtgtactaattagataggtgagtacctattattgtaaaacccttagtattgtaagactttaacatatgcaatgaaaaaccagttatattgtatgtatcaatttttaatgatccagggattgatacattaatctcagtcggatccaagttattagttttgggctccgacacacatgtatgatgtgacaaacactacaagaaaattggtgctctaatgaaggtaagtcttaaatttgctgttcatataggccgtctgaaaatgaattgttttattgatctgtacgtgctgcctttctatatatacagctgcctactagtttattttgagcaattttacggtccttaagtagataccaggaggtaaaaaaaaattagtataaaatttaggtatacctcgtagtaactagatactaagaggtaccaattttacaatagaaaaagttatatcttatattatctcctcaagaaaccgtaaaattgctcgcttaccttgtgtagtcctaacaaattaatatatgtattatctatctatccatatatctgtctactagtagtgtatctattagctagttttatgtgttctacacttttatgtagtcttaaaatcaaaaatatgtattatctatctatatatgtatttgcatgttagtttatctattattagtcagtgtacatactttatatagtattaataaaattaaatatatgtatcgtctaccttactatatgtctactggtgtatctattactagtttatgtgttttacacttttttgtactcttagaaagcatatgtgttttatctatctatatatctgcctgttagtttgtctattagctactgtacacgtcctacacttttatgtacgtagtcttatttttttagatacctactatctttttttttagataatgacatacctactatctatctctatatctttcttgaatatctattagctaagtatagatacatgtattacaattttcggtagtaaaaaagatcttgccaattatatgtttgctctccttatggtgcatgctccgatcatccgtctttctctggcacgagcgctgcatgaaggcctctcataatgagaaaaattgggaggccaaacaaaatgaacaaaacccttcgaggttactctataaacacttatacgttcaaacatgcacaataatctcaccaactcaaaaggtgggaccacctctagtctaaattctttgttggtaaggaatcaaatactggataattcatttcaaatagatactcaaatggaaaatttcgataccaaagtagatgctactccctcgttggatatttagcaaaagcccaattttgtataggattagggtatcttattagtaaccaatttggacctatttatcatatttggatattcttgattggtttggtggttattacatttttttttgcgagtgacatacttgtagagataagaatatcataattttggtagagatgttgagggcgctcacaatgcgtcaccaatttttgccgttcctcatataccacatagacgaataacctcataagcttcatactccacggtgcaagtaccagtagtgggtcccactaatacatcttttcacttttcatctcccaatctctcaccttcgtttcttttctcacccagtactctctctcaagtactagtagtggagcgaccggcggggcggcccgagcggcgacgaccggcggggtggtcgagcagcggctcgagctgcgcggcaccaggcggcgaagcggtcaagaggacggcgtggcgggagcaacggaaggaatcggcgcacgagctggggaaggcgatcgaggtcggcggcgggggccgactaggtcggcaacatggacttggcgcgggagtgaggacggcgaggtcaggagcgacggcctctggtagcgggagcgaaggagggcgagctcagcggcgtggaatcggcccgggagagagggacagcgggcggtgcggatctggcgcaggagcagccggggccgcgacctgccccacgacagcgccggtcctctgcccccgtcggtggctctcccctctcccttctccggcatcgtcgggcgaaggaagccggcaagcttcttcagccccaccaccttccccatcgacccagcgagcatccagcggccctcctcccctggccgacgagctcggcgggcgtggagcgcaacgatggacaacgaggtctctctcctccctctcccatccttgacgtgacggtgcggagcacgagcgtgggtcccacctgcgacgaggaacccgtggccaaggtttcctacgtgttcttgaggaggccgcgcggatagaggacatgacaacgaatattcgcctttttggttgaggccgaacgccacgaagacgcactgtgaatggcctgagaatatgcgtttttgcagggggcatagataggagaggcgagcggtggtttagcctcccccatgtcttgaatttttcactagctaaagttactgtcactttagcaaaatttgaaaaaattaacattattgatcccctcaattataaactttttaagttctagctccacggctgctttttttttttgtgtcaatcttttcgaggaacacttctacgtcatcgccaacgtcgaatttttgcttctatacatgcatagtatgcaccactgggcacgcatcaggcagtttcaattcgcctctaggcttgacttgtcacaaatgaacccaaaaaaaaaagaaagattgagcataatcttcaggtgtcagagctgacgagacgacagaaggaagttttcaaagaaagagtggaagaccaaacgattgaaatgcttagctagcagatgcagtgcttctatcttctggttctgcccttctcctgcagtaaaacatggatgctttcgtgctgctaaatgataaattattggtcaaggtagtatttggattcttgattgccacgaaattaactatgacttcgtctgacggtcaggatttcttccagggatctattctacggatatgtattctagtattctacggttgtatagaagagaagaatcttttttgcagaatagcatgtatcttggtatagaggttttactggtcaattttattgatcattttactgtttcaattcagagtccacaatttggagatttcctttcggtctttatttaccctttgaaatcagttacacagatttaagaatcttaaatcgtataatttattatattaccaagaggtcgaaagggacttaaatagattggatggtgggtctaaattataacggtcgcgtagatcagttgaatagttgatataattataatggatgtgaggtcgaaaatatatgtttgaatcaaaacattcacttgaaaaactaacataggaaaaaaatagagttgtcgataaacaggacacatagtttcaccacaaaagattattcaaggaaaaaaaataatgcttggtacacaaatcttgctagcttcttaactcacatcctttgatcactctccctatctctttctacgactatgcatatctctataccaggcaaagaatatccaaatttctgatggaagatttgcatgccctcaacataaaaaggggatcaagtcattgtacttggcttcacaagcacagcgttcatattgaaagtgcaacgttcttttctcaaccaatcagatagttcatcagtaatccgcctgcttactccacctacggttaaaaaaaagtcacacaaattagcaactaacatttagtgttcaaatattacataaacttagctaatacaaagaatttggttgtgtatcttatggcagatatcgggggtataaaatatttataatgccaaaataactagtaataaatagaacaaattggaaaattttagagcttacgtggcgaaggacacactccatagtatgagcagtcccttccttcaactgaggaatatggtgggcccatgacatcaagcactgcacaagcagtttctgcagtgaagcaatgaaggtttcctccactctctgggtatagaaccgttgtcttagatgaatcatcgtagatggtgttagttctcaccttagcaaaatgagcacctgtattttagaagactggatattagaaaaaaaaacttgtgaaaaaatgtggtgtaaatgggaacatgtgagagagaaaaaagagtgaatatgttagcgagaaaagcactcaaactaaccatctatttccctgcagatacgatttttaccattgggagttttaacccagtcatacgactttatgtgcattgagccatgaagaatcttgctaaagacagtcatccctagatggtcatggagtggaatgacagccgattgtggtagacaaaacacaccaaactacaaaaaaatgtgtaaaatgtgtcatctaagtggagtttacactaaatagacacattttccatgattcaatgtcaacaaaatgtgaagtactaaattaccgagaagttaagactatcatcaccaaagtgcacatatgttactttaggatgcccttgaggatcagctctaaaatacggcatgcttgcatcaagcccaaaatcctctagcttcaaggtatctgcatcaatggtttaatgtgttgatttgtgtgaataccacaagtgcatgtagctaaaaattatgaattggatttcttgaaaacaattatcaattggaagcaaaacgtttccattacattcccaacaaattctcatatttatgcagcatccacaagaacaaaaaatatatatgtaacttcctatatcagatcacataattagatacacttttagctagcatatttcaatatgtgcgatgaaaacattgcatagtaggcaattacaacaaccattgctatcgcaggaaaatgtccatatgaaaagagacgcagtggacaatgcaaccaccaataaaagatcatgcctgagatttatggattaaaatcttgtaagaatacgtgtatgaaataaaaaccactaaatcaaactaacctccataaaagctcagagtatagtcatgctcatgcaaagctcaaagtgacgggcatttctagatataagatggtatgcgcatgatatagatgcaaagacaagaagatgactgctaaccgagcaacttggtgaggtttgcctcggctaacgatgatggaacaaagcctggcgtggctgcaaagaacacatccctagcgatgtcatgcacttcttggatcttgttcatcgccgagtttggcagttctagttcttcaagagaggaagtaggcggtttcttctgacggcgggtggtcttcttggatgatgagaaggatgactccaaaacacccttgctccctgcccgtttcatcgcgtaacagacctagaaaaaaattaaatcctacaattccaatatagaaatgaccttttcaatcaccaaaactataaacaaaatcaccaaaagaatcaacaagaacatgaatacgattaattaaaacctaccccaaaaggaacccaatgattgagattgtataagcggcgaggaaatgaggcaattagagtaggcacaaaggtgaggaacggccgattgggtatatatgagcgaagggtcgcatatggtgggtttggaggaaggagaaaactaggggcgggctgtataggggacaaaggcgagattgccttgcttcctctagaagattccattttctgtgggctataagaacttggaatccaaaccgctggtttttgtaaacttacaattaaccattcaactatatcaacattttagggaaatgacctacttaagcattaatcaataaactccaatatgtcacatcaaggtaaatcccaaacctcacttaacactaccccgaagtatcacaaatttctagttcacggccgatttgcaaaggtagcccttcctcaccatactctggttgttattcatttgagaatttcattattcaattaatttcacaacactacatactttgacaaaattatcaccaaaactgtaaatttaaatcatcatatcacaaaaccacacatttaatgtcaaacctacctcaaaactataggttgaaggcataaaactataaaatttagcatatgatttatctactatagtaaaaaaacggagtccatccgcccacgcaatgggtaacccactactacataaaaaccatccctagagaaaaaaaaagaatttgatccaatcctacatgaaaacgaactcagaagcaaatcaacccttcacatccacatgtaaccaactaggctagagttacttataaaggtgtgtaaattttggatttttgtttcaaggaatgaccaattaactaggatggagcttttaaaattcatagttctgtgataaaaactaacactaaatctgtaattttacgactctatgacttaaatatatagtttcttggtaagttcagcaccaagtttgtagttttgtgatgcaatgggttaaatatgatacggcttaaatatgcaatattgtggtagttttatcaaagtatccatagtttttctaaattttactcttcaactttattggactgaattttggacaaaaaatattggactaatagttggtggaaacaaagtggtggatctacagtaataccactggtgtcaggcgacaccgacgacttttggcaaaagctatgcttaaactgactatccatatattataacactatattctaaatgtaattagcatgctatgacaccgataaacacgttatgacaccaacgaactaaatttctggatccgccagtaaaacaaacacttccggtagtgaacacaggaagcaactccaagttcgtaacaagtgcagcaaatcaggaaacacttgctatagttgagtctcatgtacattgttaggtccatgattagcttacatatttgacgttctagataagaatagcagcatttgaggtggtcagtggtagcggtggtagtgcatgtaatgactactgctaacagcatcaaatggaggaaaggttcatgttttgtatgttatttttttgtgcgtgtgtgtgggatcaaggaggccgactagaggggggtgactaggcggtttttcaaacttttggctaaaaccgagttttgtatgtggaagcgtaaatcaaaatggttttgcacaattcaaaacctaaatcaactagtctcaagtaagtgcacaaagaagctagcctatgttgaggtttgcaagcctagggtgataatagcacaaataaactctagtatgtaaacttgctcaaagtaaatttgcacaaaataaaggagacaagagacaaggaattttcaccgaggttcggaaactcgccggtttcctaatccccgttgaggcgagcccaactccaccgctcaaccacgaagccaccgcacggccccttcgtcaaggggtgggcaaggcgggagccggcccacggagaggactaccaaagcctcgatcactgggaaagttctatcttcactccgaaggtggtgaactcaaaaccactctcaactggcgccgggcctcctccacaatctcctcggagaggtcaccgggcaacacctccacaagccgtctaggaggcagcaaccttcaagagtaacaagtctaggatgcttgccaaggatgatcaagtgccacactagctataacaatgaagcaatgcacttggattggcttaactcactctctaacacctcactagataaactaagtgcacaagggtgtgagagctcttgcaagggttcaagataatgcaatggagtgccaaaaccttgcccttgctgctggggagtgggtatatatacccccaaccaccaaaactagccgttggagtcgaaatccccaactctatgctctgccagtcagaccgccatagagtggacggtcagaccggactactttgtaacggctagaaaactagtagttacagggcaatcattgagcccactcaacctggccggtctgatcgcagtgaagcggccggtcagaccgtccacggctgggtcagaccgccatcggctcggtctgaccggttgcggctctggcggctctgtatcgccaccaaaaaccagaccagtgcaacagaccagtaggaccagtcagaccggccttaccacgccggtcagaccggctaacagccccggtcagaccgacctaaggcccacggtcagaccgctggtcacttttcaacacaactaaccgttagtaagacggcgatatctcttgactcggatctcggaatttggcgttctctgactctatggaaagcttattcaaagggctatccaacccatgaacaatccatccaagaaacacaacttttctcagggagaaatggctcacactccaaaggatactccaccggacataaccacgtgaggctacccaaacctataggatgtgcccacttctctctttgtttgggacttgataaaactcaccacacttggctagacaagcccacaaaatgcatctatatgcatatgaactaatatggcacaaaatcatccgcatgctcgcttcatagacccctcttgatagtacggcacctatctagtaaatccggtctacaccaaacaccaagaccggcaaaaagactaagaaaatattcttagctccattatacctttgccttgtgccatccaacttggggtcaatgcttgagccaacatcaacacttgtgaccattcggttgaaccatgtttatgccgaggtctttgccatcctttgtcaagacttaattctcatcacaagcttgacttcattcttgccaacatgacgatgtccttggcttggtgaccattaacccatggtgtcattcattagcctcatcgcaattagatctattcctttgcacggctcaaaggaaaacgttagtcccaacaaatcggttggcatcctccacttggtgaccaaccggttgcatatgaaagatatggatatgtttgttgagtattcattaacatcataagtgtcatatactcgtatgcaagctcaagtgcaaagatccgatatatataataggtgaacaacatggatctaaaacatgaacaataaatgtataggatttgctcccctaagtatatgcatacaaagaaatatacaagagagacaagtgtatgcataagtaaagaagaaccaatgggggtttatcctatacatatagagaaggcatatgtagtaatgatgaagataaacaaaaaaaacacatatcttcatgatctccatgttctcaatgcaaaggagactaaataagataagactcaagtaaacattagtctcacacttatataacaataacatggaaatcatatatatatgaacctatcaaaaagtaggagataagaagtgatacatatcgctttatctccatgaatttcatccttgtcatgattaatgtccatcaccaaagaatgcatatctaccacatctcattatcgggaaataaccttgttgaaaacttatgtaaaagagaggttaatcccataaacataggtttatcatctatcaccaaagtaacaattacacaaattgtttaatccaagatctttcaatcttttctctcttttgtgatagataataatccgatataaacaatacaaagagatgagatgaaagataatttcaaatcaaggttgagatcttataatgaacaaaatatagaataagctccaccttaagatgtgcatacatatggatatgaaggaatgcatatgcacataatcaatcaagatcaatgagggagctcacactgtattttggatccacaagagagaccaagttagaatatgtgaagtttaatacatacctcccatcatttttactttcatatccaaataagactagtcaaagaaaggctcataaaaacgttagtctcatataattagatttgtcattaatcaccgaaaccaaattaaggcacttgaacttacaatctccccctttttggtgatcgatgacaaatccattaataataaccacatttggatatgaaggatataaaccaacattatattgaagcttgacaattgaattatatccatacatgtcaatgagtaaatagaagtgaaatatatgccaatgacatgcttatgcatatgatgcatatgtaatggtatgatgtgggatcctagaatatttcccccttttgtagctatgatcataaggagatcataaatattctctccctttaagatcaaatgtgggatcctcaaatattctcccccttttggcattaatcacccaaaaatgaaaagggctagaaaataggcaattacaaaagcccaaaaaggaataaagactaacaaggccaaataatatttttgtgcaagcacaaagcaacaagtttagaaatgacccatttaggaaaactcccccttactcatagagtcttgtctttgaatatggaatttggaatagatttcatatgtagaaggggttagtttgagcacttgaactttcacttgagatattctcatcaaaggttttctcaagaatgtcaaaaattgagaagagcttggtcaaggctatttggaagaattttacaagtgcacaatatcggcaaagaatgaaaatgatgagatagtgccgtgttcaagatgatcaagataaactaccatttatttagagaccacttgtgtataggaattcgaattctctatgtgtataggaattcgaatttgggatcaaggaacggtatttggctttagtagcaaggattaacttgtattttggtggaaatgattggaatttggagtctatccttggaggcttggttttgaaaagtccaaaaataacttttgagtttaggtggtttcatatatcatgggcatttcaaaaaccaaaagagttcaaataaggaacatatccaaaagagctcaaggatcatgaagttttcaaaataacaaagagctcattacttgaaacttcttatatttcaccaccatgctcaaataatcaacaagtgatatgcactttgaaatccatgtttagctgaaaaagcacatagcaatggtggcatcttttagcaatagaaacttgtggaaccaagatcggaaaaataatccataaatcctggagatagttcatgtaaaaatgcaaaaatttcattttggggtcctttcccagctctcaaccgaattgaagaaacaaatctcacaagctttcagccaactgaaaatttcagactttttcagatttttggagactgaaaatgaggttgaaaagacatacaaatgaccacttaaaattctgagtaaatttggaagtaaacttcaactattgaggatcaaaattcatattgtgatcttcttcaaatttgcaacccatttggagatacaaaaatcacaaatcagcccaaaaacatggttgttctgaaaatttcagcaagctgagcaaaacgagaaaaagtcaaaatctttgcaaatcaaatagaaatgagttgaaaccttgcagatttgatctttatacttgtgaggaacttttccaaaaagaatttcttaaaaatcatttttctatcaaaagataagacaaaaagagcattgtaggcctttagggtgagtaaatttgagttgagagctcaaatcacattcaaatttgaaatcgatggattttgacatttgtaaagccttaggagggttatagatacacttccaagccaagattcacaaagaactttggctctaaaggcttaacacaccataagcaagtttaggcgaaaacggtcaagtcaagatttttgctgaaattcaaatggttgtagagtttgaatggttggtattttggaaaaactttgaactagagaaatgtttgaaatgactaactctaaaagttttgtatagaaagattttccaaaaactcaatagattttgattgagaaataaaacattttcaacaaaaacaagatcctaaaagatcctattgagaccaattttgctattttgcttcacaaataaaaatttttacaccaaaagccttgcaaaacatttgaaatacatattaggatacttttgaaaggattttcacaaatttgggccatttaaataagaattttgacttttgaccaaaataggctcttttgaaaggctataaatgtaatcttttggaaaattcatgtttaggagcaaagggaatatgggtttgattcagattgctcccccttgatgcaactctcctttttgcttcatgaattcaagatttgatactaaaggccaagtttgagaaaaaggctacacaagctctcttttcaaatacattccttcaaaagtgcaaaaggaagcaaatgagatgatatttgagagaaactaatatgcatgaagttcaaatatgatttgagccaaaaagatgcaattattcaggtttaagaaaataactcaaccaagtgctagaaagtgaccatatatggtctagttaaaatttttgggagttttgacatcaaatttcttttaatagattggtcttttggataaggttcaaaaaccaaaaacatttgaaatcaccaactctatctaacttgttttgggctctttttcaaattccctttagaaatccttgtagagagaaaaatagttttgctccaaaataagatcctagaaactagaattttggccaaaaatgcattttcactttacaaatactttttcttgcaaactaaagtttggaaaacatattagagaccttttgaaacattttccaagtaatagttttcaagaattatagtttttttctcaaaaaattgacttttggtcaaaatgggccttttgaaaacctttctaccacttggattactttgttcacattctaagggttgtagtgcatacgtaagaaatgcaatactttcccttaatgtgatattcccttcaacccaacaaagataagcaaatagacacaagatccaataaatatcaaataagattgacaataagcacaagatgataaatatgttgcattaatatgatcgagcctatagcttcatatgccactactcattatgctcaacatgcatttatgatgactttcataagagaaggaaatttaattttggaactatgagtatgcaatgcaacatacacaaggctatataaaaaaaattacaaaccaaaagcatgttaccgagatggcattggtccttgatgtgaattctccatcctcattattggctccaattcttgaacttggtgagaatcacattttctcgcataggccaaaactctaatgcctctcatgtacttatattctcattttggtgcattttggtccccaacaaaattgggtccatcaatgttagttaccaaaatacgaggcacccaaatggtcctccttctagatgcaagtctaggtaaaccaacatatctagcaaacacattgccttgcctattttttctaagcacataatcatcaaaaataatattaggcttaggagtattacctatgggacaatttttaccaatatgtccctttttgcagcaattgtagcaagttaggttttggcctctatgacttgtctttttgtcttgcttcttgccggtttgcctcaatttgaagttgcacttctcatccttcatgtttgtgcacacggagacaaagtgtcccttctcatgacaaccaaaacatgtaatgtgaggatggttcttacttacatttttctttccatcctttcttaagtatgcatgcttccttgcatatttaggcatgtgccttgtcttcttagcattctccttgcgatgaaagctaagtccacacttgtcatttgagctcttttgcttgcttaggatttcgtcaagtgagttcttccctttgtagcttctatccaagtcttcttttaaatctttgacttgggcttgtgattgcttgttttcctctacaaggttagcaacaacatacatagaggaggaagaacaagaattttcatctatgtttgagctacaaggtacatctaacaagtcatcacaagaggtggacacactagccttagatgtactacatgagctagctacacatggcatatcatcatcaattaaattacatgtgatgcctatgtccacctttagcttactaaatgcattgccaatgagaagagactcataagcttcttttatcttcttataagaatcacaaagttccttataagaatttattagctccacatttgagtctttcaaagagagaagagttttctctaaaatttgatttttcttcttctctttggcaatgtatttactagcctccctaagcatgtcaaaaagatcatcatatgaaggttcatcatcatcaccatcatcatcaacaacacaagtattttcaatagtactatcgagagaatcattgtttacctcattcttaccatttgtcattaagcaatgag

SEQ ID NO: 8903 - DNA, 21108 bp, Oryza sativa
aaagaactgaacttgttgagcatgttcttaatgactgtgacattgttggtaaaattcttgccgcggaaaaactttcttctttgtcaacagagtctactggggtaagttgttaacagtctgtggtaattttggatgtaataatccccttacatcatttttgtcttgtgtgtagcctactataccttcagatggtaaatcgattcccaaaattgggaatattggtcacatgacaagaataaccaacaagcttattcagttgggaagcagtaacggcacaatccagattcacttgcaggtgatatttcctttctttccattgactcaacagtctttaattttttgaactatgaagtacctgagttctctgctcactgtctcgaattattttttaacaataggaaaatagtgagtgggttgactggcaaacagatgttctagtcaagcgtaatgaggtggagaatgtttatcattgggcttgtgggtatgtgactgtttctttttttgattgcatgctaaacttgcatgtcttgcttctgttttttcactgaatagtttatctatatgtcttgttgctgcaggcgcccaacatcacttcatgaccgtggtagggatagtgatgatgatgacttccgagacagggattatgatgtggcagctcttgctaataacttgagccaggcattccgatatgggatatatagcaatgatgatatggaagaggtgtgtgttttgaatgattttgtttctcttgctttgatggtttgcgtcagtcaacatgtttctctgccagcacattttgttaggtttaatttgagaggattctatggtggataaaatatcattctgttactcgtgctatatattatctacttgagtgactcaccagctctaaccatgttccagttttgcagttccttaaagccttactataccagatactaatgatacttgtttgtttcttgaatgcagaatcaagggacacttgaacgggatgatgaggtatatttaaggatgctagtttacccccatttattgcttttttgttcttttcacctggtattaagttcaatttgattaaaattcagtatagttcctaaatgcttgcttcaatcaaccatgtaaaaagaacagaatgttgcatgcggataatatagtgtctagaaccatatttgttgaagctgtacttttgagtgagtggatttccattgttttctcctttcaggatgtctattttgatgatgaatcagcagaggtcgtaatatcttcactgcgactgggagatgatcaggatgggtaatttgtgatcttaaaacatactttggtatctttggtttttttgtccttgggctaattatgtgtttatgtatttaaaagcagttccctctttacaaattcgaattggtttacatttgatggagagagaggtattactgaccgtttggctgcggttccttcgtcttcacctaattcagaggagatttccccagacactgaggaaactgatgatggtgaagtcgtcattggtactgaggatcatatggatactgtcaatcttgggaatggtcctatcgaggaggcagaagatgcagcggaatttactaaacacccggctactagcacggaggatgagcaactacaaaacgctgaagggattgagcgacacctggatgtttcaaatggtgatgctgaagctagtacagaagctgcagaggcagcaccagtatcttcagccccatcttctgatgaggtgcagacagagagaactgcagatgaacccactggctcatctgattcgggtaattctgtctcagaagttttgccagatcctgaagatagtagcattgatccagccaacacagcagtatcgtctgaacaaactgtggataacgaagacgtggagttaccaactaaggaagttccgtctgtggatgttgaaactaaaaccgatgaaatcaaagcaaatgagtgaaggggcaggaaatctcatgggctaaaatggcatagttgaccagaacagttgttagtcagatcggtcagaaagacaagcaagcctcacctgctcatcaggcatggacatgtccgaagcaaactgctgtacaataaaaagagtgtactatttttgccatccattgtggtctatccctgtacaaaaatgatcaccatcatctaaccgcacgctcgtcatcgcaacatctgaaactggtcaaaatttgtttcaagttcgcctccagttcatgggaaaaataggttggtgccaaacgtcatttgtcagttagtctctgtgtcgtgtcttgatatatggaaaagaacattctttggatggcagctagttttgtcaacgtggtcttttgtttccttttaggtttaacactttgaactgtaatatgggatgtgctatttatttatagcctagctattatttgtaattttttccaacatgacgtgggtcagttcaaatggaacacgtcctttttgataaaaacaaaatttctctgcactcttacccatttggttttcgaaacgatttccacatcagccttttgttatgttactacatcactatactagctttcatcaaaatttggacaattttatatgttcttgtacagcccttttaaagagggccaattgatcttcacttgagcttacgctgctttctactactcgactccccgggctgcacattgcacctgtgctgtgtagttcctctccatgaggcgctcttcctgctcgcgtggatcgtagttgagggcgccgacgtcgatgctccggtggcggcgctcctcgaactgcttgctcgccgccggctccggcttcaggttggagaggttctccatggcagccatccttatgccgtctttggaattcgccgtgttgcggttgcggtgcttcgtttccaacgtgtaatggagcttgtactcctggctcttgtagagcacgtccaaccgccaatttccttgtagttctcttgtagaacgtgtaatggtgcttcggtatgtcgttgggaatttccttgccgatggccaccgccatcttcatccatccacggaatttcacaaactggatcagcattgccatcaagtttggatcaatttcgcaagaaacatgaaaacatatctaatctctcgagagaacattcttctgtaatctctttctcgataatctctcactcgttatttttttaacattcttctatgtatcggtttgatacctctctcgctaagcgctcggaattacccgcatgtgtgccggtgcatgcgcatgtgcgcccggccataaccccggctggcaagaggtgaaaaattagctacgttcctataatttcctctctttttatccttgttgttattaggccggtttcttgcatgttctgctacatccttatagacttgtttttttagtaatttccttgctcctctaatttggatgggattattattttgtttgcgctctcagtctagcagtatgctacccgcatgttaaaagaattattaatcggttttgctataattgtggtaacacattttttatggaatcagagtcaaattttagacagttagatttatgtaagatttgtgcatgcgtacgagggccactgacttggttttttggcgtcattaaacaatgcagtcagtagaagaagcagaagaagcagttgtattctatcaaacaaaataacgataatctgtctggataattaattaaggtttgatttaatatttttttcatctcgatttgtcctcacacttttgcatgaagagaagcaaatccaaacctgagtcattaaatatgtgctttgctttctccttacccgagctaatgttgctcatcttccggcacattacctagtagtagcaaacattgtccaaggctacacatcagtggaagaatgaaaatagagaacaaaagagaatgaaaagtagagaagttacgatgtgcatataatgttcaacactataattatataattatattgtacttacaacacacttatatgatataattacactatacttacactacatttacattgtacactacatttacattgtacttacactacacttacacacttaaatagtacttacgttggacttacataataattatgttgtacttacattttaattattatgtaattcctatattaagcatactgtaatagtgtcaatcggttaattaattagcttgctagcttcaggggtgcaaatattatttgttttttcacggtttccacaaattcccgatgctgttcttgttcctttttctttggctaaaatttaagttccaaaaaaagctgtgtttatgctaattttgatcggaagtcaaaaaaggtcatcttttttaccaagggactactagatggatatcccaataacttccacaggctctacggtttgagataattaaatatgcaacttcttcccaagggctgctctactatttggaaataatttaacatgaacttcccaaggacgctacggttttaagataattcattaaattgataactgcattgcattctatagtttgatatgcgtacatgtaatgcgtacatgtaatcctcaagatatctctacgtataactaatctcgcatatcatgcccattcacaattagatctcatctcaactcacaataataatcgactatgctaaaattccatcgacaatttttttcattaagatttgtcgaattttcagccgttaatctaaccatgagattcgtgccctctttgtgtcggcactcccatgaaacgtaactcgtgagcacttgaccacctggtggtactgtacatccatgcacacggctgattatctttgtcgctcactaattaaatagtttaaagttgttgttaatcatctagtgtacggtttcctgtcaaattcatgttacccaaaagcgtagagaggattaaagcatggtaatgatatgagagagagagagaggaggtaagttgaggaaaaaaattacagtgtaaatatagtacttttagagtgtaatttgttgtaattacattgtgactcgttgtaaattacaatgtaattctattagacttgtatgtaatttattttttttctatttttcactaagtgtaagttacactttatttttaactataaggttatatttaataatgaattctgtgttatgatacgtatgattatataagtattaaaaatctgagtgattttatgtcgggtgatctagatactacattaatataacatgtgcacaaacaaatacgaagattatggtggcggataagagccctatcgacaaggctgtcctccatggcaaacacgagcaagatgatctacgggacgataaggtggtttacgacgtggagtagaagcaactcctccttcccacatgtcggcggtgccgtacgcgctatcgcagggcgggtggctcagcctggtgctcttcaccatggtcggtgccaactgcttctacaccggcaaactcatcgaccactgcatgcgcgccaatcgctgaatatggagctacctagacattggccaccgccttcggcggctatggccggatggctatcagcctcgtcatgtacgtcgagctctactttgtcgccatcagcttcctcattctcgagggcgacaacttgacaagcttctccccagcacggtggtggagattctatggtacagctgcacgggaagcagctgttcgtgctcacggtggccattgtcatcctctcgacgacgtggctcaagaacctcgctggtttgggccggcgtggccgacaagtgcttccacatggcgggaagcaacctctagaatctgagcaggttgcccaccacctgcccaccaccctcagcctctacttcttcatctatttcatcggccatggcgtcttcccgaccgtgcactccttgatgaagtctaagaaggattttcctaaggtacactttttaaaatgtatttatatgttttacttgatagtaagtttgctaaattttgtgataacaatcaacaatgtaaatttagaattatggttaatgaaaattgaaaagtcaatggtggaattaaattagcaacaggtttagtaagaatacaaacaaattgttttttattacatgtatgcatggaagacacgcacactcataaatatttttgagaactcgtacatcactaatcatgcacacctcttaatcatcatcgctgctacgttctcatcatactcaccattgcaggtctatatatacatcatgtagataaaatttaagctaataagtttatttgatcgtccaataagaattaggatcagacgaaatgaacactaaaatcatttattaaaataagttgtactatcctaaaaaaagatgtaatgttaatttacagtgatacggaatggcgagtgcattactggcaagtgcaatattcacaatttagcattaatatatatttttgcataatgatgtaaatttagcgtaatgtcagattggcctttagactaatttgacgtgtgcggtgacatggaggcgtactgtgctatattatagcctatcaccccagtggaataaactggtgaatggaggcaattagggtcgcctctcaactatatttggttacctctcatccacccatgtaaaagcaatgtagcttaaagataaagctaatcatgagccgtctaatatggtttaatttatttgctaaaacttgaacttagaatatgcgtctagcacttcaaatgaaataattgtattagccatttgaatacatagtttacgaaattttgtttttaagtaatttaatgcgtagtccaaaacaattttaggtaaattaaaaggtagcatatctaaagttggaagatgtgttgcatcataaacttttcaatgccaagttaaaatagatatctattatgtcgtatatattcttgtactaagtttagactcaaccaacagctatgagaattgttagggataagatgcaaaagttgtagggcactgactattgctcaattaactcatggaagtttcttaaacaatcttggaccttttaccattcttttactgatacttatccatgatctaacggcatatattgtatcaaccgttgcattcaatggtccatatcttcagatgatgtagctcaatgatgttgcattttaagttttacctttcacttggagagatttggcaaacaatgataattgatcattggattatcaattccaattatcgtaatttggtttatgaaaccacgatgatgatgataatggatcagtactccaataatgttctattcctctccaattaatatgcaggttttgctgatctcttcggtgctgtgcagtctcaattacgcagtgacaacattattgagatatctgatctatggtgaggatgtgcaggcgcaggtgacgctgaacttaccctcggggaagctatacaccaggatcaccatcctgacgacactgatctccctgctagagaagtacggactcgagatccagctcattgcaacggtgataaaggagaagctgtcgttgacgacggcagcggcgacggacgccgagaacaacaggcagaccagggtgctcaccagcacagccgtcgttgtcagcacggtggtgctggcgtgcacggtacccttcttcagctacctcatgtcgttcaacggatcttcgctgaacgtcaccattgccgtgttgttcccatgcctgagctacctcaagatctacatgccctgaggaggagttggccacttcgaggtggcggcgatcgtcgggatactggtcatcggagtgtgcgtcgtcgtcgttggcacctacacctcccttcaccagattataggcacatttttgtaacatcccggcctagggcttaataggattaatagaatactcatatcaacaagttgcaacttcttttccggaagccgatctccaaagaactccagggttaagcatgcttggcctggagcaatttgggatgggtgaccgatcgggaaattctttccgggtgcacacgagtgaggacaaagtgtgcagaaaagacatgtgttggtccgtgagggcagtctatgacttatgaaagctgccagatgtaagtgggctcgacctgggagaggcaggtcgttacaaaatggtatcagagccgactctcgcggtttcacgggcgcgtgtgtcgcagttgcgcaggcatggtgcgcatggctggtgtagacctggagtggtcacacagcatggcacatgcgctagcactggacacacggacgtggccaagagaggacgttcctggcctggggttgatcgacgggggcgtcgatctctcttaagggggtgagggtgtaacatcccggcctagggcttaataggattaatagaatactcatatcaacaagttgcaacttcttttccggaagccgttctctaaataacttcagggttaagcgtgcttggcctggagcaatttgggatgggtgactgaccgggaaattcggatttcccgggtgcacacaagtgaggacaaagtgtgcagaaaagacatgtgccccctctctatgacctatgaaagctgccagatgtaagtggccttggcctgggagagggtgcagaaaagacatgtgccccctctctatgacctatgaaagctgccagatgtaagtggccttggcctgggagaggcaggtcgttacaattttagtaattaaataagtttcaaattctttttttactttgtcctaaaaaaacaacagatatgttatacagagtgttaagaatcaactgagcggctatatattacatgtgtactctcctggaatgcctacgtgtattatcactaaggaagtttgtcacgcccagaaattcacaagtaatttccgaactaatttgtacattaagacccttgttcaggaatcagccgaggtacacaaactgacaatttaatatacagattcatcagaataactaaaacaataaatacttacataagaggcacttagtcctcaccatgaagaaaactgcagcgaaaaataaaatctagcgaagcttatgctccactcccacagtcagctcaactgggatctaagccaaaggtcttctccttctggatcctttttcttcaactgaggttcgatgattattgcaagaatgagcatatgacatactcaacaagccacacagtaaatatgcaagtgcacaaggataccaaaggatggcataatataggctcatttgcaaaagcagcatttagcaaagatactcaacaagccacacagtaaatatgcaagtgcacaaggataccaaaggatggcataatataggctcatttgcaaaagcagcatttagcaaagatactcaacaagccacacagtaaatatgcaagtgcacaaggataccaaaggatggcataatataggctcatttgcaaaagcagcatttagcaaagatttaagagtagtaaaacagtagagtaattaatcatcaatattaatcaacactgaacagcacaccaatgctgctcaggcccaatcaaacctgaacaaccaatcccggtcgtacagatcaaacctccaaaccaggaattaaccattccaaaccaggagtcaaattaattatcacattgttatcattaatcagtagtgtgggactaatcatgaaaaacattgctcaactcgcccataaccgcaggcatggctattcgaatagttttactctggccagaggtgtaccactgtacctacaagacacgattccacacatgttgccatgccccgaagtaccactacggcactgcaaagggggaaatcgtgacaatacccttcgcacaacacaactcaccacagtgcaccattcctggatcataatcaccccctctataaatataaccagaggcatggactccccagcgacccccacggacttcttgccgcttctcagtctggtgccccgtaatgaatcatgctatacaaaaggtaaagccgttgcccacgctagcttgtggttggcacggttaatgtctcacaacagtagctcgcgaaccggtccttaattgccatgagcacgaccttcaaaaccatgtgctcacaacccaccattaaccaggttttaattattaattaattaacataacatgattaaccatcgtgatctaccattaaatataaccataattaataataataatataatataatttatatttaatcctctttaattagctaatgtttctaagcatgactaagcaaacatacatatggcatttagctgaaccaatccaatatataaggttcatgctaatcaaattataacccataggaaaataaagtcatcttcagccgttaattaattgggaaagactcaccacccgatggcattcgaaaataattcataagttgaaataaaacattaactttaaacgggttcaacatgctcaaagtgttgtttgggatttgtgtgacttgccttgcaaacaagcgtcttcaattcatcttcaggaacttctccaacgaacgaatgatcctccgaaacaacggaaaactaaacctagaatgcaaaacgagaaaaacactaataaaaaccaaataaatagtacaattaaagttcataaatagatagagcttgaatttagatgaattatgagacttgaacgacctccttccgagttcgtatgaattagatatgaattttacaagatttaattccaattaaacctattaaagaaaagactattccaaattgattaaacaatttacaaatgatttatagctgagacaaaagattaaaacatcctccggaaaagattagatcatatttggtagatgacatttattaaaaaggaataatatgtcattgaaaagagatgacaaatttatattaattttggatggccaagatggcgcggttgtcagcgatgacatggctgccacgcaggatcgacactggcgagcccgggaacggcggttaccagcgaaccacggtacaatgacgcaaacggagggcaccggaagagaggagatcaaggcaacccttaccaccacttacgcaacgacaaacggcgagggagatggccggcgacgagctccaaagggcggcaaccttgggttgacaatggcgacggctttccggcgatgggcggcggcaacggaggggtggacgagcttctcctcacagctacgaatccaatggaagcaacggcgaccgaaggcgacgatagacgacgacgaacagcgcggccggagatagattagatcggcttcacggtgacgaccacttccagcgggggtttggcgcaaaggaacgggtggccggggtagctctcacccttgcgaagccgagggaggtgacggggctgaccggcgacgggcggggcgacggcgcacgacggctggagaggcgaccggaggtggagagagagggagctcgcggggaggcggctagggttagggaaaaaattcgggaaagagggggaaacggaagaggaggtcgaggggctgctatttataggattcgtgcgaagagattggatcaaaaacaacgggatttggcgagagaaaaacgagggtttatccgagttcgccggaaaaacggagctcgaaaccgcgtcgaattcacgcgatatacaacgatattcaaaggggtttcttagggataaggtagaggagatcgaggggaatccgtttttgcaaccaattttggaaacggagcacaggatgcgacggattttgcgaaggaagcggcggcgcacgcacacggctcggctctgtacggctcggctggaggaggaagaaggtactgtagcgagggtagataaagtagacttttcctgggcttccttttccttacttgcttggcccgattgctagagggaagaaaactggacttcggctaagagagagggagaggagtgggctgaattcggcccaaacaaagaagaggaattttaattaactttttaatttaaataatttctgaaatgatctttcatttattaaaaatacttccaatgctcaaataattctggtaaaaatacagaaaatacttgggaatacaaagtatttaataaaattttatctagctcaagtttatgttcaaatttttcatagattttattcacacacttgctttaattattaaataaattctaaaaattcctttttcacaacaatttataatttagcgattttcagggtgtgacaaagtttcataactttcattgtcttcttgttgactaactatcacagctaaaatttaaattttcgagttagttaagtttttagttgttatgaagttttttcatcatagtttatcttcttccacccttagttttaaatcactagtaacacatataaaagttgggatttgctatatatgtgtctacattttttttggttttatctataaattatttttggtttgtttcttttagggcttattagcctacaactgaatcttgtcgattatgaaagtatggtgaaatatggcgcaaatggccatgcattttatgagattatttttttatgagagatcggtagaatatattcccttcgtttttttaatagatgacgttgttgacttttaaatgagtgtttgaccattcgtcttatccaaaatttttatgcaaatgtataagatataaatcaatgcttaaagtcaagcataatgaggtggagaattcgtatcattgggcttgtgggcatgtgactctttgttttttttgattgtatgctaaacttggatgtctttacttctgttttttcactgaatagtttctctatatgtcttgctgctacaggcgcccaacatcacttcatgactgtggtagggatagtgatgatgacgacttccgagacatggattatgatgtggtagctcttactaataacttgagccaggcattgcgatatgggatatatagcaatgatgatatggaagaggtgtgtgtgtgaatgattttgtttctatcgctttgatggtttgcgtcggtcaacatgtttctctgccagcacattttgttaggtttaatttgagaggattctatggtggataaaatatcatcctgttactcgtgctattgcattatctacttgagtgactcagcagctctaccatattccagatttgcagttccttacagccttactatactagatactaatgatgcttgtttcttgaatgcagaatcaagggacacttgaacatgatgatgaggtatatttaaggattctagtttacccccatttattgcttttttgttcttttcacctggttttatgttcaatttgattaaattttcagtacaactccttaacgtttgcttcaatcagccatgtaaaaagaacggaatgttgcatgcggaaaatagtgtctataaccatatttgttgaagctgtacttctgacagagtggatttccattgttttctcctttcaggatgtctattttgatgatgaatcagcagaggtcgtaatatgttctctgcgactgggagatgaccaagatgggtaatttgtgatcttataatatactttggtatgcttgtttttttttttgcccttgggctaattatgcatgtatgtatttaatagcagataggctaacctttggaatcctattttcagaaagaaatacatataccaatatgaattcattctaggattaactagatacacacaattcgtgagagcacttttctaatgtatatatgctaacctttaccataggcttaagacatagttatactaatcttggtttatttaataattgaaaattacatatgtactcgtagtatgtgctatgaattactcatataaatttaaattcagtacttaattttaaaattgttttatctatttttaatacttataggcactttttaataacggataaagttaaatactactcaggatttcagcgcatgcctatattttaaacctattaagaggtcagcgtaatgtatagtgacgctgagttccttttacatggctaatttgtgccaagtcgggtagtgctgagacgttttagttcagcgtcatcagggttagcgctgaggtcacggtctatttttttaaattagtttgacatggtttatttttaaaatttttatagaaggattaatttgtcaaaattacagtgtaaacagaagtatccaaatcaatacgtatagtgatagaccaatcttttcctcttttctttcttcccacgtgggcctacttagtccattcaatcgtgcatggaaccttgcccatgatgctgcatgagccatgcacaactgtgtataggcgggttgcatagcatcgtacacgcgtcagaaaagcattatgccacctagaccaacaggcagctggcaaaacaaccatcatgagaataatagatagattattattttgtttgctctccgtccagcagtatgctacctgcgtattagagggattattaattgagtacctatatttatgtcgccatatttttcatgaaaaaatagtcaacatgtatttacattgtaagtctttaaattacatatgtaattttagtgtatttacaatgtaagtcccaaaattacatatcaagtctctaaattacatatgtaattttctaattttacaatgtaatttaactttgcaaccggttgtagacataatggaggaccgtgtacacaatataggagaagaaaaagcaaatttattatcaattgtacgagtccacgaaatgcaaatgcaaatgagcacataagagttggagcttgataaggtgtcccaagttagttacgctttcggatagctttgatctgacacaaaaaaatatctgactgtagtcaggccccaaatatgtcgccacacgtgaagcaaaaccttattaattttgttgacataaatgaacgaacaactaataagcatactgtaatagtgtcaatcggttaattaattagcttgctagcttcaggggtgcaaatattatttgttttttcacggtttccacaaattcccgatgttgttcttgttcctttttctttggctaaaatttaagttccaaaaaaagctgtgtctatgctaattttgatcagaagtcaaaaaaggtcatcttttttaccaagggactactagatggatatcccaataacttccaaaggctctacgatttgagataattcaatatgcaacttcttcccaagggctgctctactatttggaaataatttaacatgaacttcgcaagggcgctacggttttaagataattcattaaattgataactgcattatgtagtttgatatgcgtacatgtaatcctcaagatatctctacgtataactaatctcgcatatcctgcccattcaaaattagatctcattttaactctcaattaataatcgattaagctaaaaataccttgacaaatttttctgttaagatttgttgaattttcagccgttaatctaacctttagatccgtgacctctttgtgtcagcgctcccacaaaacgcttaacctgcgagtgctggacctggactacctggtactgtacatccatgcatacgactgattatctttgtcactcactaattaaatagtttaaagttgttgttaaacgtctggtgtactgtttcctgtcaacttcactttgcccaaaagcgtacaggggatgaaagcctggtaatgatgagagagagagagaggaggtaagttgaggaaaaaatacagtgtaaatatagtacttttagggtgtaatttgttgtaattacattgtgactcgttgtaaattacaatgtaatttcttttagatttgtatgtaatttatttttttccctatttttcactattacactttaataataaattatgtgttatgatacatatgataagttatacatgctatttccatatgtgtattaggtaattattaaaaatctgaggtgtttggtttaaaagtctgtcgggtgatctataaattcattattactaataacaggtacacacacaaacacaaatattatagcggtggataagagctctatcgatgaggctctcctccatggcaaacatgagcaagaagatctatgggatgatgaggtggtttatgacgtggagcagcagtagatcctcggctcgttctgcatgactggcgcttccttcaggagaagctgcctcaacctcagcaacgtgatctgcagcatcgggatgctctacgtgtcgtacgtgctatcgcagggcaggtggcccagcctagtgctcttcaccatggtcggcgccatctgtttccacaccggcaacctcaacgaccgctgcatgtgctgatcgcggcgtacggagatactccttcggcggctatggccggacggccatcggcctcgtcatgtacgttgagctctacctcgttgccatcagctttctcatcctcgaggccgacaacctcaacaagctccttccggcacggtggtggagatcctagtgtactaggtgcacgggaagcaattgttcgtactcgcgacggccactatcatcctcccgacgacgtggctcaagaacctcagcatgctcgcctatgtctagcggctgggctcgtctcgtcggtggcgctgacagtgtcgctgctctgggccggcgtggtcgacaagggcttccacgtggctcttgagtctgagcgggttgcccactgccctcagcctctacttcctctgcttcgcaggccatggtttcttcccaaccgtctaattctcgatgaagtccaagaaagattttcctaaggtatactttttaaaatgtatttatgtgttgtacttgataataagtttgctaaaatttatgataacaattagcaatctaaatttagaattatggttaatgaaaatttaaaagtcaatggtggaataaaattagcaataggtttaagaacatgaacattttgtttttttattacatgcatgcatggaagacatgcacactcataattgtttttgagaactcgtacatcactaatcatgcacacctcttaatcatcatcgttgctacattatcatcatactcaccattgcatggccctcatatattttgttggccctcatataagtttattttgatcatccaattaaaagtaagaattaggatatgacgaaatcaacattaaaatcatttattaaaataagttgtactatcccaaattaaaagatgttgtactacttataaattttgtaatgttaatttatagtgataaggaatggcgaatgcaatacggaattaatggcaagtgcaatattaacaatttagcatatatatatatatatatatatatatatatatatatatatatatatatattgcataatgccataaatttagggtaatgttgggttggcctttcgaccagtttagcatgtgcagtgatgtggaggcatactgtgctacattacagcatatcaccccagcggaataaattggtgactagcgtggaggtgtattgttctatattacagcctatcaccccagcagaataaactggtgacttggaggcgattagagtcgtctctcaactatatttggttacctctcatccacccatgtaaaggcaatgtagcttaaagataaagctaatcatgagccgcctaatatggtttcatttatatgttaaaacctgaagttagaagatgcgtctagcacttaaaataaaagaattatattaaccatttgaattagagtttacgaaatttttttaaagtaattttatgcgtagtccaatacaattttagataaatcaaaaggtagcgtatctaaatttggaagatgtgttggatcataaacttttatatgccaagttaaaatagagatctattatgttgtatatcttcttgtactaagtttagactcaaccaacgtgtataagaattgttagggataagatgcaaaagtggtaggacattgactattgctcaattaactcatggaagtttcttgaacaatcttggaccattctccattcttttactgatacttatccatgatctaacggcatatattatatctactgttgcattcaattgtccatatatttagagatttgacaacaatgataattgatcattggattatcagttcgaattatcataatttggtttatgaaaccatggcgataatgagaatggatcagtactccaataatgttctattcctctccaattaatgtgcaggttttggtgatctcttcagtgctgtgcagtctcaactacgcagtgacaacaatgttgggttatctgatctatggtgaagttgtgcaggcgccggtgacactgaacttacccacggggaagctgtacaccaggatcgccatcctgacgacgctgatcaccccgctagcgaagtacgtgctcgtgatctagcccatcacaacagtgaatgaggagaaattgtcgacgacaacggtggcggcagcggacgtcgagcacaacgggcttaccagggtgctcaccagcacagccgtcgttgtcagcacggtggtgctggcgtgcacggtacccttcttcagctacctcatgccgttcaacgtatcttcgctgaacttcaccattgtcgtgttgttcccatgcctgagctacctcaagatctacatgcctcgatttggagttggccgcttcgaggtggcggcgatcgtcggaatactagtcatcggagtatgcatcgccttcgttggcacctacacctcccttcaccagattatatgcacagtttgattgtgcatttgtgggtaaggttgtaggttttggtagtgattaaatatgtttcaaattctttttttacttttttttcctgaaaaaacaacagatatgttatacagagtgttaagaatcaactgagtggctatatattgcatgagtactcctggaatgcatttgtgtattatcactaaggaagtttcataactttcattgtcttcttgttgactaactatcgcagctaaaaattaaattttgagattagtaaagttttcagttattctcaaatttttccatcattgtttatctttttctacccttagttttaaatcactagtaatacatgtaaaagttgggatttgctatatatctgtctacaattttttttggttttatctataaattatttttggtttgttttgttcaaggcttattagcctagaactaaatcttatcggttctgaaagtatggtgaaatatgacgcaaatgtccatgcattttatgagattatttttttacgagagatcggtagaatatattcccttcattttttaatagatgacgtcgttgacttttaaataagtgtttgaccattcgttttatccagaacatttatgcaaatgtataagatataaatcatgctcctcttatttggatgggattattattttgtttgcgctgtcagtagcagtatgctacccacacattagaagaattattaatcggttttgctataattgtggtgacacattttttatgaaatcacagccaaattttagatagttagatttatgtaagttttgtgcatgcgtacgagggctactgacttggtatagtgtcgttaaacaacgcagtcactagaagaagcagttattgtcaaacaaaacaacgataatctacctaggtaattaattaaggtttgaactaatatttttttatctcaatttgcccacacacttttgcatgaagagaagcaaatccaaacatgagtcattaaatatgtgctttgctttctccttacccgagctaatgttgctcatcttccagcacattacctagtagtagcaaacattagccaaggctacatattgatgaacataagaaaatagagaacaaaagagaatgaaaagttgagaagttacgatgtgcatataatgttcaacactataactatatagttatattgtacttatactatacacactttacagtacacttatatgataattacactatatttaaactacacttacattgtacttacactacacttgcacacttaaatagtacttaagctggacttacatgataattatatttatattgtgcttgcattttaattattatgtaattcctaatttattaaactgtaattttgtgatcactagttttctagatgaaatttaatttatgttgtgtattttaatcgacttacttatttttaaatggctgtaatctagtctaaaattgaaccaactattataggctcaattttgtggcgcctgagctatagatagtcctcaatgagcgatgtaaataatatatttacaaatagctaataagcaaactgtaaccgtgtaaatcggttaattaattagcttgatagcttcaggggtgccaatattagttgttctctcatggattctacaaattcctgatgatgatcttgtgcctttttctttggctaaaattaaaagtttcagaaaaagctgtgtcatgctattttttatcagtagtcaaaaaatttcatcttttttgccaagggaccagattactagatggatatcccaataacttctaaacgctctatggtttgagataatttaatatgcaacttcttcctaagggttgctctactatttggaaataattcaacatgaacatcccaaggccgctatggtttttagataatacattgaattgataattgcattttgtaatttgatttgcgtatgcgtaatcctcaaggtatctccacgtataactaatctatcatccccattcacaattagatctcatctcaactctcaataataatcgactatgctaaaaatccgtcgacaaattcttttgttaagatttgtcgaattttcagccgttaatctaaccttgagatccgtgccctctttgtgtcagtgctcccatgaaacataactcgcgagtgttcgactacctggtggtactgtacatccatgcatacgactgattatctttgtcgctcactaattaaatagttcaaagttgttgttaattgcctagtgtattgtcaaattcactttacccaaaagcgtacaggggatgaaagcttggtaatgacaagagagagagagagagagtgagagaggaggtaagttgtggaaaaaattacagagtaaatatagggcttttagagtgttagttgttgtaattacattgtgactcgttgcaaattacaatgtgattt

SEQ ID NO: 8904 - DNA, 4836 bp, Oryza sativa
  unsure (1)..(4836): unsure at all n locations
cgttcgtactctatccaagcatgaatgaactgtatggtcggttcaggttgcgttatcggcccgccacttgaagtaactctgactgtgtcaatccattgtacgaaagtgtgttgtcgtgagcataagttgttctagcaccatatgaatgaaaagaactatgtagacgagacaaacacaagtagtactgcagtagtaatagcaaaagtagtactgctttacaagtttgtaagccaaaagaaacggtcacataaggactgaagaggtagaacactactgacgaggcctcttacccctgtccctcctaccctgcgccctaatgtgcccctgggagtacgtgagtcggtccgggggtacggcacagccaacccgtcctgcctgtacaggtgtgacctctggctgctcctgagtgtgcgcctctggagctcctccaagctgagaggagcctagtacgtcgtggtggtgtgcaccgtgcaagtcgtcgtcgtagaactggctagtaggaccagtcctaccgacgtgagacgaagaggccccagtaacgaagatcccggctgcaaatcctgctggacaaggaccatcagtttcatacatgtatttaatagtattaataaaaagtaaagtaccgtgtgggcgagggatcgacgctccgtgagaggaagagctagcgaacgcgcccgaagaggtggcgaacgcccctgcggagctcgcggaagcgccggtcgtgcctgcgaacgcgctcgaaggcagacgaggtcctgcgatgaggaaacgtgcagttaaaacatggtgacatattcgtgcaaaagctgaaacaaaaatgaactaatgtctgggctgaactgtaccatgcgaaaccggtgctgtaggtcgcactgctccgaagctagggacgctcgaaggcaaacgaggtcctgcgaggatggaacatcaagttacgacggggtgatgttttcgtacaaaaacataaacaaaacttaagaaacctctgggctgagcagtaccgtgcgaaacaggtgccgtaggtcgaggtcctgctccgacggtaggcgcgcgaggccgtggttgtaccggaccagctggaggtacgacgtccacggcgttgcgacaggagaagacgcgcatgaccgcacgcatcttctcctgcatccggtcgaaggtcaccctctgctcaacgtcagtcaagtgcaaacctctgttcaacctcacttggactgcggtgatatcggcactgatatcccgtgcggcatcagcctatgcaagatggaaataaaaaattcagtagttgtcctatattatgcaagataaatgaaataattgtaagaactaatacaaattcgacgtacccccacgaagtagtctcggtcacggtgcgtgggatacgcgtccgtgacagcggcaacgtgcggctctggggcgtctggagtgaaggtcacacgcgcacgagtgcgaggaaggtaccagcgaaggtagtcacggtagttctcctccgtgtgtgggaagagctcgttgatcacctcctctgtagctaacacccagtcgtcaacgtactgttgtacacgtggagcccaaagtgcgcctgctagctgtccccgtcgagtcaacctgtgaagagaggtaaattatatggctcgatgaagtaagtatcataaaaatttagaaatgaacaatccgaactcacaagtggtcggcagggaggacggtcggctgcacgttgcccggaaacacctgcctaagtccgaactgtctcatcacacgctgcgggcagtgaggctcaacgaaaatgtcgaacaccatcggtaggatggtgagccagtaagcttggtcgcgtgtgcacaaggacgaaagtcctagcggtgctctcacagcgacagcctattatgtgaaccgctcccagatgacgtcgctaggctggagaccgacaagctggaccacgaaatccagatgagctcctttgagatggacgtgagcgctaacacgctgcattaaacatgatcggaattagacatgttatgtgaagaaaaaaaagaagacgactgataaacttataatgcagcgaagttgcactaaccccacgtgacaccagtaagtccccatcgtgggaccgtcctctggccactgcgcgctgcgtccaaccccgtagggtgcgctgtccaccactagtcgacctatggcaaacctctcggctgcccaaagctgaagcaacatagggcagccagcgatgatcgctcccgcgtcagtcttcgtgcacgcctcacagagggcacggtacgtggctgctagcacagcagaaccccagctccattgcagcacgtcctgtggctgagcatccgcgatggaccgtgcgtagtggaccagccggaagtccacagcgtgcccgtgggtgctagtgaacatcacccacccgaacaaccacaacatgtacgcctcaagggagcgtcggaccgagtaatcatcagcgtcagggtgcagaaggtccgcctacaattaagaatgaaatgttagtacaaaacactctgttgatcgcaaataagcatgtatgataataacaacttatttacttacagtgaactggagcaaccaagccttgctaggcccgactgtagagtacggaggaagggtgttggccggtcctaggtgtggaaggcgcatcacctgctcgaagcgcgcagtgatatcctccttccacccaacaacaccgtccacgggaccaactggtgctcccgccagcagtagcccgagcaggtacgacacgtcctgcagtgtcggagccatctcccccagggaaggtggaacgtgtgcgtctcaggtctccagcggtctaccagagcggcaaggagtgaccggtctgcatcccaccgcttcgctgggtcacggtcaatacttctcctacccaccgttctccaagtgagcaatanccagcgacatacccagctgacgatcatgtctaacgcaaacgttgggcctcatacgcatcactgcaatgtgcactctctctaagaaccagtaccagctttcagtgttctcactctctacaaatgcaaaagccataggtagaacctggttgttcccatcacacccaattgctgtcaatatctgacctcggtatttacctgtcataaaagttccatctatgcatagaacaggtcgacaatgcacaaaagcattgatgcaagcacccaatgagaaaaaggctctttgcagcacactctttgttcgatcatcaaccgatgtaaatgtatgtaggtcatagtaagtattattattcctctgggcaatggtggctaacaaacgaggcaaattatcataagaagcttcaaatgtgccatacctcatctcaataatcttttgtttggctctccaggcctttgcatagcttatggtgtacttgaatttgttctcgatgtgcctaataattgattttggttcaagccaatgttaccaacaacactgctgtacatctcacttgccacaaaagctgaagtgatgtttcggtgatacttctccaccccttgtaagtagcacttgtgctcggtcacaatgctaactttccaataatcattccatttacccttatatgcatggacacgccacggacaatcttcctttatgcacctcacttcatacacataatttgttgacttgaccaccctaaactctctctgcaaggaaactgcccaatgcttcaccgcctccttcatctcatccttatgagcataccttgcaccctcaattacctcgttctccttatactcccagggtacatgatcaccctctgatataacaagtccagagaagtcctcatttgcccaatcagtggccattacatcaccttcctcatcggatgatgcgtcgtcgtccgcttcctcattatccgaatcttccctctccatttcatcaacaattataccgactctctccccctcatccgccatgcccatggcctgctcctcccttggttgattttcctcattttgcatcgatggtccaacaacatcccttgcattgataggaccctctacatcttcggtttgcattgaaacatttatatctttctcttgtaccgacacaaatataacgaggggccatgaccgttcaaaagccatttccacataccgtctccaagcagcagtgctgtccatcggcattagttcccaaaaagaaccttctgttgcacgactcactacaactgatactgacattgtgtagacttcttggtatattctaaatcctctcaacaaccaactataaattgactgaaatgttttctccgcaggcctatcgatgcccttagatgtcattacaaaatctgacagatcaacaccatctggaccaaatctaatatttccttcaccgtgaactatctgaaatgtgaccttatttgacattgtgcctgatgaaaacaataactgcgttaacctcgcatttctgtactacgccctaagttacattctctacaatattgttctccaaaattctaaaagtatgttacattctccagatcaaactaaactacatcttacaattaacactactgtctatgtctcaattcatacaattatattctatgctctggatctacacatatgtgctgtgtgctacagatatgctaaaatatatggaactaaaactaaaacgcaacatatatactcaaacataacatattagtacaaatgcaaaagatgtatgggagcaaacctgtgatgaagtgagcgaaccagtagggcttcgccgctccccttctgctgccctctcctctctctctttcattttttttggatttttagtgaatataatgaaatttcagagaggggggactgggctttataggggggaggc

SEQ ID NO: 8905 - DNA, 9196 bp, Oryza sativa
  unsure (1)..(9196): unsure at all n locations
tttatctattgtcgtcatttttccttttttacgttgaggtattttttttatcggtgtcagtcttctcattatgcgcgagaaatccccttccggacgcgcgagtcccccccccggccccctctcttggcactctcttcgattgtcctctttttatttaaaaaaaaataaataaacaatctaaattcataatcacaaaaagataaaagatctaatctgactatatatatatacataggtttccggtagtatttttagttcgcttccgcttgcgttaaaatattttccatgtgcgtcgaaaaaaaattatgtatatcgttgctcagaaatccatgcacatgttatcgcatgggtcatttggggatgactagggatcggtcgcccgatccaaatctttaaaaatcggcatgacgtcaacgccgatttacgtgtaaaacaaattcaaactgatttttctcttaaattatttatccaaatcatgatccgattgcaccattaaattcgttgcaattaaatcttctaaataagaccacacatggatatattctgatgaaatattttttagcttattattgattttttttaatgttgcacgatgttccaccaggtatatcggaattgtttcaataagtagatcgaaaatgtttcactcgtttaaatcgggtgttgtttcaccttatataaaaacaatgtttcagcaaatagcgaaagaatgttttagttcactgcaacatttgatccatacatagtgaaacattgtgagtatactaaacgaaacattttttaatggaacaaaaaaataaaacgaattcccttaataaagggtttccaaaatatgtgggttttttgttgcaatagagtatctcagatcactgtaactttagatctataaatagtgaaacatcatgagtacactaggtgaaacatttttggttgaacaaaaaataaaacgaattcccttaatagcgggtttccaaaatacgtgggtttttatgttgtaacagcgcgttccataatatcaaaatccaatgcaacatttgatccgtacatagtaaaacattatgagtagactagctgaaacattgtaaaactactggttgaaacatcaaaagagaccatatgcaacattaaaaaaaatcaataaaaaactaaaatattttttttatcaaaatataatcatgtgtggtcttgttgtaaagatttaattgtaacgaatttagtgatgcaatcagatcgtacattagctaaatagtttatgagaaaaaatcttttgaagaaatgagagatgaaagcacgtagggaaagattctttgcatgcaaatggcagaccatgcagcgtctgatttttcttccctcccatcggacgcccgacaactagcattctccgggtcattaccgcagaaagattgagaaattaacccaatcctaccctattgtactattgtactgcttccttgccagcttgaactgaatcgaaactataattccacgagcgtaatttctactccctccgtcccaaaaagactcaattcctaagtttccgtatccaacgtttaattatccgttttatatgaaatttttttataattagtatttttatcgttgttaaatgataaaacatgaataatactttatacgtgatttatctttttaattttttttataatttttttaaataagatgaacggttaaaggtcgtaactatcgatctgagacacgtccccatgatcgtccatccgtgcgctcgtgcgtacgagattggaagtgcttttgtttttttattatctataccttttttttataagaattacacagtacaacgcagacattgacaacatacgtgcactcacccctataaatgcacgcacgcaaaccgtacccctagcatcttcgaagactgggccggcaagtccttgagagacaacgcacgcacactcacccctatgaacgcacgcacgcaaacactacccctagcatcttcgaaaagactgggccggcaaatccttgagagtttgacgaagtcatcataggcacctcgctatcgaggggtacgtcgcccaccactgaaagcacaacgccgttaaatcctggaaaattcgctcccattgggagtcgaacccaggacctcaagtgctaataaggctcttgtaaccactaggctacatgccatttcgcttttattatctatatctaataaaaaatacctaagactttcggtttaatttcggtaaatctgtttttttttgttttttttccgattagtttttctcttacgtggaagttttttttttgggctttcggtttttttttctgactgaaaaaatacccgtgcgttgcaacgggtaaaaatatttttggatcgttatatattttactctttggttttggaccaaaagctcatttcattccttgtcaagtggagttgtatgtcctgctcgcatagctgactgtcctcttcaatcttcaaagacaatgttgtgtccgtacatgccaaaaccgatacccgtcaaatccggtccaatcttttacgatctttcaaaattggttgagggtttttgatacacttttttttataacaggcattcataatacccggcttttaaacaaagccaaagataacagaggtcttacacaacagaacgagaaaaaaaatccgacttaaaagaacaagttaacactggagcataggatcactgcagaggcccatcaatcagataaaaaacacacccacgaaacaccctaaaacaagacacctaacatgctaaaccaaaacccaaccccttagccaagatccagatcatccggcaacctccctagcgggcgtagttgtttttgatacacttgatctcctctatccgtttttattaaaatcgaagtgataaaactcgggataaaaacggtgattttttaaatagagattaaattcagtggattagagcagagttaaaagggaaaatcgtagaaaaaatgatgaggggtagcggggaattgatttttggcaatcaattggaggagggaacgcatgggaaggcagatcgacctagtgtttagccgggcgataaaaaaacatggtacataaaaaaacaaatccttaccgcgtgcgagaaaatacaactaaaaaacagcagcaaacatatgaaaaaacccggtaaaaagacctaaaaaaagtaaaaaacagcatagggtaaaaagcgaaaaaaaggtgaagagaaaaaaccagatggaaaaaaaagcgaaaaaaaaacaaacggaaaaaactgtgaaaaaaaagaaaaagagtgaaaaggacggaaagaaagaaaaaaaatatacggataaaaaaagaaaaaggaatcggacagaaagaaggaaaagaaacgggcggagaaaaaaaaaggaaaacggactggaaaaaaggaaaaaagggtgaaaaataaaaaaagacggacgaaattttttacggaaatagatccaatccccagcatcgtcacgacatagatatgcctcgccgtgtatttctactctaattgattgaaaaaagcaattccctgttcatccttcatttattgctcagcttctaatgctattcccaatccaataactaggatggtgtctatagcattaaataagctgccaactaaaatgaaaaatgatgtggtaagtgaataaatgaggaaagagaagaaaccatatcttgcatgagacatagtttctacacaatatcgaagacatcacatgagataagtagtattaaatttaagtattgagtagtggtgtatgcattggaagagtagcatctttagtactattttctcgatgacgtgaagtttatagaaactatgtctagtgtcttgggctgggaatggcctaatagctgttttatcaatgagaaaatatttttacccgttgcaacgtacgtgtattttttctagtttcataaaaagtacagaaactacataaaactaaggcaataattataaaactgcatatttagtggaaactaaaaaaactatatatttaattaaagcatattgtagagtttaaatctctatcaatattattattagggagaattggtcattcgactctattctgaagtctaattaacaatctgaccctacgtttttgtttccccaaaaaaaaaaaaattttttttgcccttaatttagaatccttgttttttcaaaattggagttgccattagacccttgtttctattataccattctggtttcatttaacaaaagaaaaaaaatgtgttctaatagaccaaaatacccctgattacacacattaaccctatccccaaatttatcacttcccattccttttcctctccctctcccctctctccctctctctccagaggagctctcctcgccgtgcagaagcaggcacgcgacggaggaacagtggcggcggggcccgggtggcggaccttggactgcggtggtgttgatgtaaaaaacacgaggccggagagatctgcttaactctagtgcaggtccaaaaatcttgccttttaggttcgtgagcgtgccaattgatttgatcctgcaatcaacaagaaataaagacaaagaaatcgtggttaaatccataaatgatagccgatcggctagttgacgatgacatattatttatctctgagccgatgtcatatgtgaatcgatcggcaaccatgaataaataagaaaagactaaatctactcgatcggctgtagatattaacaatatataatccttatgtcgatataaacttaaatcaagtaattgggatagatcggtcgtcataccgagacagtataaatcacttagatcgaagtatatactaacaatgagattatagatgttcatagcatagccgatccaatagatctagcatgtatcggctaataatccgatatcactctatactaagatattaaaacaagtaaaatatatcaaacaaaagcctaatatactttattgtaataagatcttaatataaagggaagatctagcatatctgaaagtgtaaattaggcctagaggggggagggtgaataggctaattcaaaaattcaattaaaagcggaagcactaattttcggatatttctgaaatttttggatatatccgaaaattttcggagtcagcacaaacagcaaagtaaatcctagatctagttgcctacaacaagaatatgctagcacaaacagcaactagacctgtagcggctcaaacaagcaaagctagtggagagggaggaagtaaagtcaccaaagatgaagctcacgaggttgttcccgaagttcgaatccttgaggggattctactctccgttgaggagctcactaagagtcgggtcttagctaaccctttcctcaagaggttgcactaagcactcctccttccactaagggtatctcttcccttttggaggtgagatccgaccttcacaaacttctcccggccaaccataagtagatcggtggctcgggagcgacacctagccgcctaggagtcctcaacctccaagagtaacaaatgaagcaaagaactcccggagatgatgaaagtgctcacaaatcttcacgaagtcaacaacaagcactcccacaaactcgaatccacaactctcacacacacaccaaatccaaatcgaacacgggtgagagggaaaacaagaaaacaaggctcaaaagtgctagagaaagagcaagccaagggcacaaatgattggaatggaaccagcagccctcacaagtgaggggagggggctatttatagccacagcccagattctgtccgttatgcacaataattcagattttcggatattccgaaagattttcggacatgtccgaaaattccagctcagcaccaacaacaaagttaacgaaggatttttcggacattccgaaaacttttcggacaagtccgaaaatttctagtaccaacaacatcgttctggatgttctcggaaaagtccaaaaataactttcggacaagtccaaaaatatacagaagcgaaattgactctactgatgattttcggaaaatccaaaaatcagattcggacaagtccgaaaatatacaaaaccacttttgctttcgcagtctttttcggaaagtccgaaaatcactttcggacatatccgaaaatttccagaagcgaaaatctggttctgtgtgttttcggaaagtccgaaaatgagtttcggaaaactccgaaaaaatccagaacacaccaaactgaggagaaacactttttaaaaatagattttgagcactttgatcactcctcgtatgtcaatgcatcatccctcttaatagtgcggctttcctattaactcaaggaaacgaaaacgtacaaaataccatttgctcatttgccgcattacatcacatcaacgtattcggcgggatatgtattacgctaactcattgaggacaaaacaaccttcacatttgcttaaataaaaatgttagtcctctctaatcgcattgtaattaatcaccaaaatcattaggggcctagatgcactttcaatatcaatcaaatacatgaaatataaagctaaatcaggtaagatcggttgaaaccccgatactaccctaatcggcaaccaaaagcaggctagagattgagattctaagacaacttataagatcaaactcaactgatgcagctataagtatgaaaagaaggacaatatctagacaatcaagccgttggatatttcatagagcggtagatatcctatataatctaagtcaacaatagtatttaacctgatcggctgccttttagcaacagatgttagccgatttgagggttagataacaatattgcctgagattatatagaatatctgataactcaacgaactacataaacaagattagagtatcataaagatggaagcactaatcccgaaaacgcaagccgccataacaagttttacctctagttgaagatcgaaaccgatgcagctcaatccgaaagcaagaactcgtcgaaacaaaaccaaagtaaaagggtggcgatgcgtcgagattgtattgaacgtgtgttgttgtattacatggggctcggggtctatttatacctgagattacaaaatatgtccgtgtcggacacgactcttatttctaacaaacttttaagataccataagtctttgcggcagacttttgcccaaacatatctttaaggaaattacatgaaatatcataattaatagatacaattgccttctcaggactctatccgtgcatggcaatccatatgaagcacattaactcaacccgacaacatgcattacgtcatattgtcggtatcggctcaatcggccaacctagtccgactcgaactctgctgatcctgatcatagccgattcggactttagccgattctcgctatgtttccgtaacgatctccatcttgaattccgcttcgattctatcttcatctccgatacttggattaccaaatttggttgttaacaggcgggcgaatcaaacgaggaggggcggcagaggcccgacaataacaaggacaaccaggggtggcaaggcccaggcagcgaacctctggctacggtggtggatccggcagggcttaggcattttgggcctacgggaattccgaacaattttttgggttttccaaggtgtgccggttgcggatccggtggcaacggaacaacaacagtggcacggcggtagcagctcaggctgtaattttgccccggcggccccgaggtgtatagccggggnatntgnnnnnnnnnnntnnnnnnnnnnnngcccanggcaccaaatttgcnttggcagtggatgtaaaggtgactggccatgcgggctgcaaatccggcggtcctgaggtgtaccggtggcggttcantgatgggggcacaccattgccggaaatcaccggtctgcgacaatgcatgacttggcgaggatgatggagtctaaaattttattgaagtttattcatatttttatcaaatctatgttaaatttgtcaaacatctatcaaattgaagtccattttgtcaaactgaagtcaaatttgaaaaatttaatataacaaatataggtcaaatttgaccaaagtctgagtcaaacttgtcacaaatcggtgaaacttacactaagtgcacaaatcattctcattattgccaccatacaaaactatgctaaactaactaaatgctttggtaaaatagggtcaaaagagcaagggcagaagagaaattttatgctccttttaagaccgttacatgcctttgatagaatagggtcctaccgtatcttcagttttgaaatgaagggtcaaatgagcaaacttgatataagatggttaaattggtagttagctttcaaaagagggtcagatatgtaattgccccttattattatgttggaactattaggcgttgtagttttgtacttaaattgatgcaaaacttgtagttattaaatttgctaatcaatctttatttttgggatattatattttaaatctctagttctatgaaaatttccatgctaaatttgtagttttgtaatacaagattataaatatgaagttttacgataatttggttgtagttttctgaaatttacttgaaaatatatcattactatttacctatttaaattagtgtacagtatggtatgaatccaattttcatattattgtagtggtaccatttcagttatacgaataatggtagtattctttaaaactgtcaaatttataatgatatgatctaactaaccctttaaggtatatcattttagttcatatattttttttaacagggtaactataatttatagctactccctccgggctgataatacatgtcgttttggacaaggctgaagtcaaactttagaatctttgattatgaatcatttttaaaatatttgtctttcaaatatggtgactacatgtatagattagtcttaaaagtactttaataagatcatatatttgctaacaattttatacatattataatgaaacataatggtcaaaattgttttttttggagaccgtgtccttatccaaaacgacaagtattatcaaccggaaggagtataagcgatgtcactttttatattataccagtaaatattttcttttagcccctgtcctttttcttcctcttccttctcttttttcctctatgaccaaattgcaatgtattctaccaatca

SEQ ID NO: 8906 - DNA, 3673 bp, Oryza sativa
  unsure (1)..(3673): unsure at all n locations
ttaccgagtgcagggtagtcattaatggtgcagaacaatagaactcttagcttgaagttctcctgaccatatgcatcccaagtttccacaccttctttccaaagaatctccagatcgtcgataacaggctccaggaatacatcgatatcattgccgggttgccttggaccttggattaacaagcacaacataatatatttccgtttaaagcataaccatcgtgggaggttatagttcgcaataagaactggccaagtgctgtgagtactactcatgtcattgaaaggattcatgccatccgtacaaagacatatcctcatgtttctagggtcggcagcaaagtctttgtgttttcgatctatagtcctccattcaatcgaatccgctgggtgtctaagcataccatcattccttctttccgtggcgtgccaacgtactaacttcgcttcgttcgggttggcaaagattctcttgaaatgatcaataataggtagataccacacaacctttgcaggaccacccctctttgacttatttccttcgtcagcacttttctttcgcttgtaacgagaagccttgcagacaggacaagcatccaagtccgcatattgcttgtggtacaatatgcagtcgttgggacaagcgtgaattctacgaacctctaaccccagtggacacagaacctgctttgcttcgtatgtcgtctcgggcaatgtgttctcaacaggaagcatagccttcaaaattcctaaaagatctgtgaaactcttgtctgtccatccactacttgccttcagcttcattaggtccaaggtaactgacaacttagtgtgttttgctttgcatccagcgtacaaaggcgtctcggaatcacttaccaacctgctgaatttcattccatctctctcattttgggctaggtcctcaacgtcacgtaacatgtcttgtagtagatcgtgatccacatcaaccatttcaccgcccaatggagaaggtataaacatgtcatgctcattttcatcttcctaattatgcgcaccacttctgtctgctgctgctccacttctgattcttgctctccatgcttcacccaacatgtatagccctccatgaatcctcgttgtatcagatgaccgtgtacgtcctctccgctatcaaacatattctcgttcttgcaatctgcacatggacaacacatgtaatcactgtttcttcttatccgatcctcctccgcggcgttcataaaatttattacgccctttcggtactccgtagaatgacgtttcaaatttttggcatacatccaacttcgatcaattgctacaaaaaaaaacaaattagaggcacatattataagatcagtattgcaaaagtaagacgtgatgaaattgctcaattaatgatttatattactcacttgattgatccattttgatcacttttgggaatttaatttctgttttccttggaaaaaggacaaaaaatcgccccctacagcctcccaccaaaatagtgaacagtgggatacagttacactaggtggtggggggtatttatactgtgcaacaaatatctgtaacggccctaanacaatcaaccgtgacgggcatacaagttatctctatcgggccgtaataaaagaccgtcaaaaaagagtgtcatctgtgacgggcaataaacttatctcaatcgggcctctagttggagcccgtcacagatgaccctcatctggacgggcttcttttagggcccgattgagatatggaaccctcatctcaatcgggcctcaactatagcccgtcacagataagtgtcatccgtgacgggctttagttttgtgccgatataccatggctgtgcgaccatatctcaatcgggcgaaactttggcccgattgagattacttccttgtgacggcccgcaaattccagtcttgttatgggccgtcacagatggaaggatctgtattagtgactcctatatactactgttactatactaaacagtatatacctactgactaaataaaaaacggtacatacttcctaacctatcaatatattatatattagatacttgaaaaaacagtacataatccttaactaattgatttaatataatattggatacttgaaaattttagtatatactggattaaaaaatcagtatatactggaaaaacaatcagtacatgcatactccttataccagtatatataccattcttaagaaaaagtagtacatacttctacaagaaagtatatacttctaaaaaaagaaaaataataaaagtagtataaacttctacaagaaaaagtatatcattccctagctaaagatattatacatatagtggttacaaagcagtatttatacgtactactactatgtaaacacaactactggagtacgtagtatacaatgctactgctattaaaaaattagtacgtatacactagtactaatccacgtgtttggatcagttctgtgcatttaaaatttgtaatgcatgcactcgatcagttagttgtgcattaaaactaaagaaaagaaaatgcattgttttaaaacagatcagattcaccatggccctattagatgctattggatcatccattaacaaaggggagtatatacacttgggtgtacagaagagtcgtcctatatatatatatatatatatatatatatatatatatatatatatatatatataaaacacaactcttctctttccatctgtgtttccaactcttatcttcacaaacctccaccacttattatcaattatgccagaagtaccccccccaaaaaatgccagaagtacactattaccacttatcacccatacgttttgaaacaaccacaacgttaatcaaatagggatatgttaatgagacatctctgggggaacagggaatttaagatcaacatgggagcgtggagtaggttgggtccaaaagggggaactccaacatattcagcatggctttcaagggggacatgattagaaatccaaatacccaatagttgcaagtctgaaattgattgatactttattcaatggttcttatttctagtgtttgcacacgatagtatgcaacaccttattactagagtacatgtaaccaacgtttgatcaacaacaaccacaagaagagagttggaagttgacaggggccatgttgcacatgtatggcatctgcatcgccatgttcatcatcatctgctgctgcccgagtccagcacaaataacttgttgcatgctctgcatcatctggtaactggtgtcacagttgcactgaggcatcatgccttgcagctgcatgcaacattgctgctgcaggggagccattggctgtgatatgaacatggctgtggagctacccatgcccaacgtttgcatcatgtactgcctatacggatccgtggtgcccatggctaatgttgctgggaaatactgcatagtggtgattgcagtagtggcacttgcagaaagagcaattaaggcaaacagggcaaatatcttggtggtgtatgctgccattgctgattctacagtactagtgttaaacaagatcctagatggtgtagacaatattgttgagggtgatggaatgatggttgcctttgcctaggggcctatttatacatgctagtagctatagctgtg

SEQ ID NO: 8907 - DNA, 16601 bp, Oryza sativa
  unsure (1)..(16601): unsure at all n locations
ttttgaataagacgaacggtcaaacatttgctaaaaagtcaatggcgtcaaatatttcgaaacggatggagtatttttttttgcctatcatttacatccaattgaatatatgtaagcttttaggacccctttaaaatacaggattgagaaaacacaggaatagaacaaaacataggaatagaatgtcatgattattggattcctatgggattttcaaacacgggaaagtcttcaaaccatcgtttgattaacatacaggaaaaatactggaattttagacacacgtagagaaaatcatgaggtgagacctcatgttattttcctctaaaattgttctagcaaggttaattccatagtaattttaaagggattagtaggaaataatccttagattcaaaagactctataggataaaattctatagaattcctatagtttttcctttgtttcaaaggggctcttaaaattgagaacttgacctttcaaacaacccaatgtaaaatttactttcataaaaatttaaacttaaaatttcaaaatgctactcaggtgacggcaactattacgctacctactctttcgctgcaactgcacgcctgcctcgagacctccttctctccctctcctccggcgcggtggccggccgggcggcgctttgacccacactgcccggccacggcgaggcgtagatgctacgtaggagcaggagtagggtaggagctagctgggccggccatggcgctccttttgcagcagctgggagcagtgcatcgagacccggagacccacgagagctacggtatctgtgtctgtgtgtgtgttttttaacgtacgtgcgcgtagcacaaggctgccgagtaatacccagatgagaagaccatgatgccatctctctctctcacacagagtagggtgcgttcgtttccggtgctttggaactcattccctccataccgaaaacaagcggttcattatcacgtaattaattaagttttagtgtttttttaaaaaatagatcaatatgattttttaatcaactttcgtatagattgttttttttaaaaaaaacacatcgtttaacaatttaaaaagcgtgcgcgtaaaaaacgagaggggagagttgggaacaccctcttgcgaacagagccaagagcaggtaaactagcagcctataaatcagctttaaaagtatatcgagatgataaaaaaagagagagaagcatgtggctacagatttatagccaactgtagtacggactttaagacacaatgtgtgtatgacagatgtgaccagatattaatagtgtagtttttatttataggtaactattatatgaattgactattaaattgactatagataatttagagttagtagttggctatactattaaacttgctccgagtttaacactccctccgtcccattttaagtatagttgtgggtttctatgtaatgttgatcgtccaccttatttaaatatatttatgattaatatttttattatgacatatgataaaacataaatagtattttatgtgtgactttaaaaaaaacaaatcataaatatttaaataagatggacggtcaaacgttagacatgaaaacccacgactgtacttaaaataagatgaaaggagtatatagtagcgtagctataagccaactgtaaaattatgtggagaagaaggaatttaaaaattgaaaaagggttagagtaaggataatagcaagcataagtcaaaaattgaaaagggttagagtaaggataatagtgagtataagtcaactatacttatgtggaggagagagttaaaaaaataaatgagagttcacttaacacgtgctcctggataaatacactaaatacataagtgagaaaaggagagaggagaagaaaaattgaaggctctattatttaacttgtacttggctttgatggaagagctgactattcacatacttcaacatgaatatattaaatgtataggcgagagatatagagaggagaagaaaaatagagataactttataacttatctactatacatgttaactctattattatttccgttctaaaatataacaactagtattatctatgaacgtggacacacatttatctaatatgagctatttaaagatggagtgaggccgtgtttagttgttttggcaaaaaaaaattgacatatacggacacacatttgaagtattaaacatagactaataacaaaacaaattacagattccgcttgtgaactgcaagacgaatctattaagtctaattaatccgtcattagcaaatgtttactatatcaccacattggcaaatcatggtgtaattaggcttaaaagattcgtctcgcaatttacatgcaaactgtgtaattgatttttttatcacatttaatgctttatacatatatccagacatttgatgtgatgtttttagttaaatttttttttatctaaaccaggcctgagaatgaaacaggaggttcgatttttacccgggtcaagtggcgaagaattccaggtagtacaggtagtactgctttttactgcggtgaaaggagcaaagcttctgcgtctgcttggcgttggtctacgtctaacgtgagcgtgcgtgcgcctgttggtcgtcgtccgaatggcctggtctccaacctcctttttcgttcaacgcctttgttggtcccccggcccctctcttcctcttcttcatcgatcaccaccttttcttttttctttcttcccctaaagattatatttgcgcgcagctgatgcagtgcactgcagcagggagagcagctgtggcactggcagtggctggctgctgctctttggtttgggtttgcctgcctagacgaacctctgcaccgtcgtggtccacctctgtcttgttaagtactcccttgattctcatacggctcgtttggttggagggagtttttaggagagattgggaatttaaagggatgatgttattaagggcctctttgaatcaaagaatttatgtaggattttataggatttaaatcctataggaaattttcctatttggccctttgattcaaaggattgaagctttccaaatcctatgaaattcctatggaatggcacattgcatgtggattttggaggaaatttagcaagagctccaacctcttggaaaatttccttttagtctatctctctcattcgattcctgtgtttttcctgcgctccaatcaaacgaccattcctatgtttttcctgtgttttgcaatcctctattttacacttcaattcctgtcagaatcctatgtttttcctattcctccgttttttctaccctgtgattcaaaggggccctaagtgttttgttttgtcgaaacaagatttcggctatactaaaaagaggtggctatcaagctagaaaagtggatgggtttggagacgaagaattttatacaggttcaggcctttttattcaagaagtaataccctactcctgtccggggatgattccgccgagtatattattgattgtataatctaggtcaaaaaaccgtgccccgagaggcatccggacccctccttatataggggagggggtccgctttacaaaatacagtccatatcctaaaagaacatggaattacagataaaatacaatcgtaaccgactaggatctcgggtatttccttgacatacaagtttagaatctaacccgagtcctcatgaaggtattctgtctttattcggtatcatgtacccagctggaatatgaccgccatgtagatatagggtatccataatctctacagtaacccccgagacctttgcagtcgacgaaatagccatctcagaacaaaaaacaataatccgagtgcttcaattcaacctgctccagcctgccgagtgctaaaatcaaagactgtgaagggcgaaaagaaaacatggtgcatcgagtagatgcacctaattaggtgtagcccccgactatgtggttagttgaaaaactaaacatgtagtcaagaaccgagtggttttacaaccaaacattatatagcaaagcatgtgtggtagtcagtaaaacacccagccgtctgcttcttagctgcaatacatcgagaaaaaaatatgaaaaggcccgagtgataaacactcaaaaggtcctcaaatagacatatttgacaggaatccgagtaaaaactctaaagacaacccatcaaatatgataaaaaatcatggtaatcaacgagtctaatagcctaggctatggccctcatcataaccaaaatgtgcatataacatgctaagagaatgactattaataaaccagtcatctcaaatcaacccaaacaacttttgcagcctaataaagctgacaaaaatggtataacacctttctgtcgggcacctttttatttgcagcataataattccaaagaattatcgaaccgcgttaaaaaggattttagcagcatcgggccacatcattgtgagcacaaattgccaaagcaaaaagcacctaagtccctagggatcacaacgggccacgctgattataatattgggctgaagtactgtacagacccaggcccattagtactcccgataccctaacaaagcaccgaagtccaagcatcgcttcgtcttccccaccgagactctcgccatttccccactccttgctacagtagcaaaccgcaccgtcgaaactagggttcatcaatccgtcccaatccattctcaaaaaatcccacgaaacttctccgcgtgtccaccgcaccaattcctcattcccctccagctatatcttggaccaaatctaaccatgcaactcgcatccatggcggaggagagagaaagtttcgagagtcagtgggctccctccgatgtaacggaagagaatctgaaagaaatggtggtgcacggcgttcttccgacgaaggaaatcatcgggtggcgaccagcgttcggcaaagcattcccgacccccgacacacacgagattgtggtattctctcacttcttctatggcggattttctcttccaacctcaagattcttccggggaattctgaacttctatggaattagcttgcatcatctgaatccaaactccatagtgcatatcgccaattttgttcatgcttgcgaagcttttctgggcattaggcctcatttcgccttgtttcgccgcatcttcttcctcaaaccctagccaaacaagagcaaactgtgcgttgttgggggtgctggtttccaactcaggggaacactaagccaaaaatatttctccatgcccttcaagacctcaaacaaaggctggcacgccaactggttctatgttcaaaatcctaaaccagcccttcccgagtactcttgtctccctccagtctaccaagatacatggaattcattgcctacaggagatgaggcagcccaggctgtagaactaatggagcgcatgataaagctgaaagagcaaggtttgcagggagaacagatcacttggcacttcataaaaagccgattagctccaatcaaagagaggtcccgcacagcttttgagtttgacggcaaacatgatccaaatcgtgaagatccagactctcttaactttaagattatgaaggaaaggatgtacaagatcttctcgaatgctatcgtcgtcagctattcgcacttgctgctagtcatgccattcaatgctttcaatcctcctccaccgatatgtaatcaaacatttcaacttttcacagaatatagtcttgtctttttgttgaatcaattaacaatgaatgatattacgaccaggaatttgctttgatgaaatcggaccccccagtcgtccaatgccgatcaccccaccgccaaaccggtcaagggagcggggtcccaagacccgttctgaagcccggccaaatacttccaatccagccagatttacgcaaaaggaagttggtgtcaagtgatgacgaaagcgatactgctagaaagcctggagaccgagaggcaaccagaaactgccaaagcaggctactccaaggaagaaaacatccagttgtcctgtgccaaagatcaggaagtcttccaggtacaaatcatataacgatctctcttgcattgatgtgcacccagtgcagaaataatactgacaaccaaacttgcaggaaaccatctgatatagatccttctggaaaagactctgacccgactagcagggaaacaaacttaaaaggaatcgagccaactgacgaggatcagccgagtcacagccagccagcaaccgataatgtaggatctggtgatcaacccccgactgagaatgagtcggccgaagctggagccggagttaatcaggagcccccgactaaaaaccagtcggacactaggccaagccaagagattccagaagttggagctcgggcagacagccctcgtagacaagacgccagcaacgacccgatgccagggtctcccattaaggtgcaagagtcgactcgttcccgtccggaaatcatcacaggtaaacaccttgcctgaaatcgtgttgatccaaataactctgatcaattgtctaacctttgtcagtggatacattaggaccaatgattggtgatgaagaagaaattcccgtatacaagcagctgaagactcgcacccttctatcttagtcaagtggtgggacgatgacaggcaacctcaaggaatcataataaacaaacaaaaagaagatgaggaagtatgcttgctgaaaaaggcactcagccaggccactcgcattgtgaatgtaagtccatttacgcatagctttaattgttccccttcatattttgctgaaaacgccggtaaattcttattgcagagaatccatctcaggaatgaggcaaagaccacgacacttgagaaattagttccccatcttggaactcttgaagccaccaaaagccagttacatgaggtcagagagctcgcgaggaaaactgagcatgatctgaggaatagaatctctgagcttcaaaaatctaactatgaattgagtggttcatccaaaggtaaataccatatccgtctgacatattcgtgaaaccttccttgtcatatcgattaaccgaagagcatttcagtgcaagccgccaggatttccgacctagagaggcaggtcgaagctctggagaaggacaaggccgaactagcaaagcagagggacttggccttaaaagatgttgaaggtaatgataactagttccccatgctcttatagccacctgttgatacaaatttattcgtgcaaatcgcaaaatcaagtcccaggcacagtttgatgtcttaatcaataagatcaataggcttgaaggggccagggataaagtcgctaatgccgctaccctactcatccaagccatgttcttcaataacgccggttcgagtacacttgacgcttccgagatcttcgacaagctgagagtcgctccggatacttacttcaagaatattagggaggttggatgtatgggagcaagcatggcgttagctatgaccaaatctttataccccaaaatcgatattgacgccgttgatgggtttgcagacgggacaagcgaagaaacagccctcaacctcatcaatgatgcgcaaaaagccgctgacaagattgctgctgacatagttgagagattccaggatggcgaccttcggccgactgggtctgataattccgacgatgaaaaaactgacactgattgatgttatattgtaattgtgattctgatgatgatgatgacgatgatggaggtacaatttgtacaatactgataaatttatgctgtgcatgatatttcaaacttagctcctgatttcttaaaagtttttgtcaaaccttgttgagcctaaaactcgcaaaagttgttaaaaaactttcagtcctcattgactaagccaaaaaatcaaacagagcaatgataaatcaagtaagcgaattgaattgataaagatcacactccattatcatagtagcccccgactgacaactcaagaaaaggcttgatgttagcagtcgaagaggaaaatacagaagtgatgcctaagcataaaaacaacgaaggtgttcaatattccaagaattgttgacaagagtaccatcttcacgcttgagtcggtaagaacctggccgagtgactttagcgattatgaatggtccttcccataagggagataacttgtgccgatcctatgtagtttgaattctcctcagaaccaggtcgccaactaaaaaggctcgcgatcgaacattccgattatgataacggcgtaacccttgtaaataccgagctgactggattagggctgcttcacgggcttcttccagtcggttgatgtcatccactcgatcctcttcatggcgctcttcccggaagttacgaaatcggagggattcaaactctacctcactcggcagcattgcttctgcgccataaaccaagaagaacggcgactggccagtagcccgactgggggtggtgcgtaaagaccaaagtacagacggcagctgttctacccacttgcagcatagggacgcagtcggtcgaaaactcgtgctttgatcccttgaagtaccatgccattggcgcgttcgacttgcccgttactcatggggtgtgccacagaggcgtaacaaattttaatgccaaagtcttcacaaaaatctttaaatattccgcccgtaaattgagtgccgttatccgtaatgatacgattcggtactccaaaccgatgtacaatattgatgaagaaatctctagctttgtctgcggtgatggtgacgaccggtttggttttaatccacttggaaaacttttccacagctacaaagagatgagtataacccccgactgcctttttgaatggaccgaccatatcaagcccccaaaccacgaacggccaagacaacgggatggtttgtaactcctgagctggtaagtgagtttgtcgggcaaagaattgacaaccttcacatgttcgcacaattttgtcggcgtcggaaacagctgtgggccagaaaaaaccctgccgataagccttgccaacaatggttcgtgcagcagcgtgattaccgcagatgcctgaatgaatgtcttttagcaattgtcttccctcttccaaagatacacagcgttgcaggattcctgatggacttttcttgtacaactcggtctcatgaatgacatagagtctgctgcgcctggagatctgcttggcttcatttttgtcttgagggagttcttgtttggttagaaattttatgagaggttctctccagtcggcttcaatcatgcttacgccttgagtatccatggcttcaattgtttcttttctgggcacggttggttctaaagatgttcgacgaacacatctgaaggagccgcttcctgttttgaaccaaaattggccagcctgtctgctgcctcattattatgtcggaggacatgggtgagcttgagtccgtcgaatttatcttccaacttgcgtacctcttgtcgataagcggtcatattgtcatctagacaggaccattctttcatgacttgattaacgaccaactgagaatctcctcggacgattagtcggcgaatgcctaaagagacggcaatccttaatccatggagcaacgcctcgtattccaccacgttatgggacgcagaaaaatgtatccacaatacgtagctcaatctttctccagtcagggaaattaaaacaaccccagctccagtgcctgtaagcctcttcgacccatcaaaatgcatagtccaatattccatcttttcctctggcatgttttcttgacactcggtccactcggcgaggaagtcagctaaagcttatgacttgatcgaagttcgtggcttgaaagatatgtccaaagatgtcaattctaaggcccacttcgctatccgtccgtttgctttgtggttatgaagtatatccccgagtggaaacaatgtgaccaccggaccgagtgaccttgaaaatagtgngnnaggggctaacggtaattaagacgccatataataaattttgaacctgaggatatctcgtcttggagtcggccaaaacctcgctaacgaagtatattggtcattggactttttgaacatggccttcctcttcacgtttgacaaccaggaccgtgctcacaaccttagaggtcgccgacacgtataacagcagcggctcttgtggatgtggcgaggccaaaactggtgtagtgagaaattttttgaagtcttcaaaggctttttgtgcttcgggtccccactggaaattgtcagttttcttcagcaacttgaagaagggcatcccccgttcaccgagtcgcgaaacgaaccggctgagcgccgccatgcaatcagtcagcttttggacatctttttgtgagcttggcggtttcatgttgagcatggcgttgattttctccgggttggcctgtatgcctctttgagataccataaatccgagcaacttccctgacggtactccgaagatgcacttttcagggtttagtttcatcctgaaagcacgaatgcttgcaaaagtttcttctaaatccgcgatcaggtcatacttctgcttggtcttgacgactacatcatcaacataagcttcaacaatgcgaccgatctgagttgaaaaacatctttgaatcatgcgttgataggttgctcatgcgttcttcaatccaaaggacatggtgatgtagcagtaggacccaaagggcgttataaacgaggtcttcaagtagtcggattctttcagtcggatctgatgatatcccgaatagcagtccaagaaactgagtagctcgtagccggccattgagtcaaccacctggtcaatgcgaggtaacccgaaaggatctttagggcaagacttgttgaggtcggtgtaatcgacacacatgcgccattgcccagtcttcttccgaaccagaactgggttagccagccagtcgggatggaggacttctttaatgaagcctgctgctaacagtttggctaattcctctttgatcgcatccttcctatcttgtgcaaagcggcggagtcgttgtttgatgggtttggcgtcttccttgacatgtaaagagtgctcaatcacctctctgggaataccaggcatatcggatggtttccacgcaaaaatatctttattattctgaagaaaggtgatgagagcgctttcctatttacaatctaactcagcgcctattacagcagttttggtaggatcggagggatctagtggaatcttcttagttttgtcgtcgccttcttcggtctttgacagcttggtcgtaggcacctctccttcgcttgccgtagtggcagccaatcggatctcttcgcgagcgagagtgatctcgtgggtttgggctatttcgcaactttctttgtcacatgtgacggcttgcttgatgtcgctccgtagtgatatgactcctcgaggaccaggcatcttcatcatcatgtaggtgtaatgtgggacggccatgaatttggctagagccggtcgtccaagtatagcatggtacgttgtctcgaaatcggcaacttcaaaacaaacgttttctgtgcgaaagttttcccgagtgccgaaggtaaccggaagagtgatctggccgagtggtgtagcggataatcctaggatgacaccatggaagggtgcattactcggctttaattccgttcgaggaatctgcatatcgtccagagtcttggcgaaaaggatgttgagtgcactgctaccatcgatgagggttctttggagcttgacgttacgaaccactgggtatagtaccagggggtaccgccccgggtggaccactcggtcgggatgatccgagcggtcgaacttaattgctatctctgaccaccgaaggtattggggcgtgttaggctgaaccgcattgatctcccgttctgttagcttctgctttctcttagattcataagccaggggtccgccaaagatgtgaattagttctttgcgatgatcttgaaaaccaagtgggacatcgtcttcaccatctttcttctttgatgtgccttggtctccgtctgagggcttacgtgcgttcttgacgtattgctctacaaactgtttgtagacgaagcaatctttcgccacgtgattggagttgggatgatgcggacattgggagttcattatcttgtcgaaggtgttgacgcgggaacgttgtcgggaagatggagaggttgttgccacaagctcttcgggcttacgcttgcgatccttgtggttgttacttccactccctcctgcggtcggctgcatcggatcccatataagagctcgctctttacccgatcattcaaacattttgtgggcggcgctcctgctctattgttgcgtagcaatacaagcctgctcatgctgcttcggcggcgctttttcgccttctcttcgctctggacaggagccctaatggacacggggagggagcaggcgaagcgtatccttttttggcttccaagtggtgcccgactgcttggacgccgtaatagcatcttcggctttggcatactcattggctttttcaaacatctgcttgaccgtaannnangtttgtgtccgaacttgccgactaggtcctcgtggcgaatgcctttagtaaaggcggcaatgatgacgtcatcggntgatgtcggagatcttgttgcgttgctcagagaagcgtcgaatgtaatctcgaagagattctccagacttctgaatgatgttgtagagatcgaagtgtgtaccagcccgttcaaaagtgcctgagaagttggcgattaagtggtcgtgtagctctgcccatgatccgatcgtgccgcggggtagcccgtgaagccatgaccgggcagtatccgctagggccacaggtagataattcgccatggcttgctgtctcctcctgctacgcggattgcgagaccatagacggtgagccaagactcagggttggtggtgccgtcatatttctcgattccggtcgacttaaagccagctggccaatccactcgacgcagatcgcttgtgaaggcagcaactccgtccacatcgtcgtcgtagcgatccggtgaatgatggcctcttgctgcgcggtgctggttgatggtgtcacgaagatcgatggggcgccttcgatgtggggagtgtggtcgttcaactcgacgctccctgtatcgttcgggaggcgaacgaacagaccgttcatcatgtcccctgctcctgcgactagatctggcgccgtcaatgctgaggcttggctggtgatagtcctgagatcgaaggtgagggactcggctaccagtcggggtgcgggcgcttgcggagttggctggaaacgaagcaacgatcatggtcttcgtttgattcaagatgtttacaacatgatcagcttgattgagtacgtcttccttgaggagggtgtcgaggagagtgattgctgcaaccgcgttctgctgggggtgcgaaaaaccgctgttccatcgacgtcttgttgcccaatgagctctctcgctcgtcgcccaaattccaaggcgcgctgccgtcgatcttcaccctcctttgcaatccgttcgcgatcttgttgctcacgctgtagtcgttctcgctcctgttgctgtcgctcttcctccagttggcgacgttcagtttcttgccatgcgcgctcttggtccacttctcgggctcggcgttgttcctccgtttcgttgtcagccacgaatacgccgaagaagagaggcgtgtagttatcctcatagctgtcgtcgaagttgtcgaagtcgtcgtggtcgtagtggtagccgaagtcgtcgtagtcgaggatctcggttggtcgagaactgacaccgggggagctaaggtagccatccaactcttccgtcgagactgtcccaaggggttggagtataacgccaacctccctggatctagatcggatcggggccgaagccggagctcgcctagatcttcgagcaggagatgtcttggctgtgaagacagcggccaaatcatcaggaagttttatcaggattgagggataggacccgtcatcttgatctggtcgcggaggagtagattagatctcgtccgagtggtttgaagccgactcgggagagatgatcttggagtaggcctcggccgagttcggaataccgaacggcgcggggacctgatctctccccgactagttcgaatccgagttaggagagagatcttgccgaagtcgttggtgatgaagttgaggctgccgaaccggaacgcctgtccgggagggaaggcgaagtcgtcgatgccagaaacggaacccatcgcacttagccggtaaaaacttgacgctacccctacctggcgcgccaactgtcgaaacaagatttcggcaatactaaaagggggtggctatcaagctaggaaagtggatgggtttggagacgaagaattttatacaggttcaggccttcttattcaagaagtaataccctactcctgtccggggatgattccgccgagtgtattattgattgtataatctaggtcaaaaaaccgtgccccgataagcatccggacccctccttatataggggaaggggtccgctttacaaaatacagtccatatcctaaaagaacatggaattacagataaaatataatcgtaaccgactaggatctcgggtatttccttgacatacaagtttagaatctaacccgagtcctcatgaagatattctgtctttattcggtatcctgtacccagctagaatatgaccgccatgtagatatagggtatccataatctccacatgtttatttaggagacatgagaattttggtgggatggggatggggatgtggaattgaggaaggaactccctccttttcaatacctgggtaggggcaggtgattgggagggaattcctcctttactttgtctatgcaaatctcaactatccatttttattaatgacataatctccaactaaactccctatcagtttccatcactccaaccaaacaagatactgggattaaaaatcaaattcccatcttaatctcatcataaattcccttgtgtaaactctcaatccccttccctcgagttaccaaacaagccgataagacttagaattattttatattttgatttttcaaagtaaatgggtcataccttgtagttttcatgtatatatctgaaatttaaatgatttaccggaacccaaatacacattcaatactcatcgattgcattatatacacttacaccttcatcggttggcttatgttgttgcgtttcagcataagcagactgatgtttatcggtataagcgtttccatcgtttggcttataaagagtaatggctgattagtggatcttctgtggcatggtgatcgttgagaggtagggttcgagagaggggagtggggaatcgaggttggtctcctagcgatgtggccgtagaaaggtgtcgggaaggattgtcccactaccaatggctgatgcataatcagcccaataagctaaccgatggacttttgctgaaaatctgcctctgcaacattgaaccgatgagagtgttctttgatctttgttacattacatgtagttttggtcatggtgataaaagtaatatatctaactcttttggatggatagaatatattactaaattttcatgcgtgtgtgctataattgggatcaaaatgcttataaacgaccagaaacaatattgtttctatgaaaaattagaggatataaattctatgtatatagctaggattcaaatctggcgataatggtaccacttttacagaaaccaatctgaaaattccgtcaccattttcatctcctaggttgctagccagctgcttatggttgatggaccagatgtatagttactgagctctaaattggctatagtattgtattatcctttttaatggtaaatagtctgaaggctgagattttcttttggctgtggtttataggccataatatgtgaccaaagcaatgaaaaataattctacaataggatttttatgcttatactttcagcggtttaaaagtcagggatgaaaagtgaaaaacgatgggaaaaacatcaagagtaatataaaatcgactttgaaaattcaaattagactatgattctcatgtatccatatgcacatttgtggtacccgaattcgaatttcgctgctctaataatggaagattggttcaggatttgatgggtttataagtcatttctattaaaaaaaaacaaggtcgcaagatacggtcttaatatgttggaccttagcaatttaaattcgtactattcgtgaaggtttctttaaataatgtccaaatttggtagaaatttattcaaaaattaatcttgtgaaattttcccttaaatacccaatcgagtctccctctccaaacgacttaaacttgcttcacacactttttcccaattttatatatcatcttaaccttgctgccatattctttactggttaacggataaatggatgaataggcatgttctccgaactaattaa

SEQ ID NO: 8908 - DNA, 3437 bp, Oryza sativa
accctaaataagaatagtcaactaaataagaattgtggcagcaaatagacaaacccatatattttctaaacaatggattaaaatttcggcctacatcgacaaggacgaaaacagccaaagacaaaccctctttcgaacaaaagaaagaaatcaaactggacaagatcaaattaatcgatgcatggttgcgcaaagcggcatcatatcaaccgatgttgacaatggccgccttgttcatcacccagccctcgagctcccgtgccagctcgtcctggatccacaagggccccatggcgagctcgcacccgagctcaccgatcgccgccgcgctccggagcaggtacatggccagcgtcctctgcgccgcgccgccctggtagtgcaccaggttgatctccctcacccgcctcctcaggcaggccggcgccatggcgccgccgccgctcgtcggcgcggctaggacgctgtgccggttgtagctgaggaggtgcttgtcgtagagctcctcctctttgtagtacgtgatatgcagcatggcgtcgtcgccgccgtcgagaggctccgggtggaagacgagcgacagcgtctccaggttcggggcgcgctcgaggatcatggtcagcgcggcgtagatggcgtcgtcgtcgtcgttggggaggtatcctcttagctcgaggtgggagagggctgaaaggtcgggagcgtcgcgaacgcggcggcgtcgtcgaggccggagccgaggcgggcggactcgaggtggaggtgcttcgcgccggcgaacaggcggaggaacgcgctgagcttggcgagctccgacgacgacgtgacctcctcgccgcagatgtctatcttgcagtaggcgacggtcgtcagcgaagcgccgccgtggatggtgaggaaggtgtcgtccggcacggagcccctgtactcgaacgcttggaggcgcggcggccccggcgaggcgtcgacggcgacggtgcgcagggcgtggcagcagcggagggccagcctgcggaggccggcgacggtggtgagcgcggtcaccgtggcgcaggcctcgagcgtcaggtcggcgaggcgcgggcagccggagatgaggcgctgcacgtcgctcccggcgtcggagacgcgggcgaggagcagcgtctcgagggacggcagggcgatggccgccggcggcgcgagcaggcagtggccgagcgacagcgagcgcagcgccgcgcaggagaagagcccgctcgggacggcgtgcaccgccggggtgtagtcgtatcccctcgtggacttctcgtcggaggagatgacgtcttcgtcgtcgtcgtcgtcgtcatcctcatcacagccctgcggactacagctccgacgcggcggcggcggcgacagcaacggcgagcgcgggatatacatatacggtggactcagacccagattggcatcttcgatggacgcatatcgcacgggggacctcgacctcgaccgccaccgccgccgccgtttgcggctcgcatcttcgtcgtcgtcgtcatcgtcggtgtcctggtctgcgtgatccgcgctcgcgccgcggcggcggcggagagagtaggccttgtcgcagagcggctcgcggtggaggcggaggtcgaggtcgaggccaacggcggggtcggcctggttgacggcgtacgcgatccactgatccaccagggaggcgtcacttctgcagtacccgacggtggagacgtggagggcgcgcaggggcgggacggcggcgcggcggtggcgggcgaggagggcggcgctgacgacgttggtgaagggcggcggctggttggggtcgggcggcgggccccacccggggctgtacctggcgagctcgtagtggtcgacgacgggggggtcgggctccacgagggagacggtgtggacggcggcgaacgtgtggcgccaccgcgacgagagcaccgccgcgcgcgccgcctccttcgccgggaggaacgacaggatgtggccgatcacgccgtcgctcagcgcgctcagccggtcgccgccgccgccggaggtgggcatcgtctggggttggtccagatccatcttgacgcggacggtttcgtttgatggcgagatatttcaggatttttcgggggatgaaccgagacggtttgttgttaggtcaaagaaaaaaaagaaaaagagggacatatactcggattcggagtgtgctccacgatttaaaaaagaaagaccaacaccaggtgaaatcgcagtaacagaatccgagacacgaacacgatgaacgccaccgttgcatcaccgtcggagccagccgccaccgtcaccgtcgcatcgctggacgagctccgcgaggtggccgagcatgatccccgcgcgtcggaggaggacgggggcctgcgcgtggcggtcaccggcgtccccgtcagccaggcggaggagctgcacgcgctcgtccgcgaccatgtcgaggcgaagctctggagcgtcgtcggcgaggtcgccgccatggcggcgctcaggtccgcggccgacggcgccgcccgcctcgtggggctgagccgcgcgctggacgccgtcgcggccggacacggaggacggagccccggcgccggccacggtgccccgcgtcacgctgctgagggagcaattgttgccattgacctcctcccatcggcgtcaatccactatcgcgcgaagccacgtcatcagcctccctcactcattctcctctatcgccaacgtgcacatgcagatctcaattgaacgtcttccttaccagcagccgtaattggaaaaaaaaatagaactgacacgtgggtcctacgtttataggtattttggtctatatgatgacgaaaaatataacgatgataatatgatttgtagatattcggatgacaagtgtacaaatagatgaattgtagtaacatttatctgaatcagcatatttgcaataacatggatccaattaaacaaaaattgggttacacattacgttacgatgaattggagtaatatctggcttcccaacttgagacctcgaggatgtggataacaatgggaggatcctcgaacgggatagtcatccccaacagggcagcgatccgtgccctcgtcttctccgccgtccgccggaagtaggccatcgagtactccagcgactccggcgacgtccatctgtcgccggagtaccgatagtagctcagcgcctccgcctgcctccctatgtccaccgcctcgacgacagcaacgacgtacttgcgcgggaggaacggcggcggccgttgggtggacacgtcgcgggccagctccgtcagcagcgtgatgcggggccccgtggccggcaccgggacgccgtcctccgtgtccctcacgacggcgtccagcgcgcggctcagcttccacgaagcggtcggcgccgtcagcagcggacctgagcgccg

SEQ ID NO: 8909 - DNA, 7559 bp, Oryza sativa
acataactaacagctgagattttcattagttgaactgttatcctgaaggacctagacccattgactgcccatggagtctttagtccttagaaatgcgtagtgagtacattttattgtctaatagcatcaaaactatgaaattgagactatcgatctatttctgctggacgagctattgtatggctagaaaaatcctggttgtttggggtgatcctgagagctgaatttctatatccaaggtagaagtggttgtggtgatagtataaggtagcatcataatttgccacagaaaaccttgcaatctcttagctttcaagtccgtatgtttataacttatgatatactttttttttacttttgttggccattgcctatctctcatgactcatctctgggcactaacctcttcatcccatacttgtgatattcaattacaggttggaagtgctctgtcagatccttatctttcttttgcagctgcactgaatggtttagctggaccattgcacggcctggctaatcaggtatatgctcagtttgttgcactggatcttgtttgccgcatcctgctaaaaaggactcattgcgctattcaacatatgctgcagatcatttttaaatcgatttttagtttgtgtgaactgaccatagtcaacatgtaatgcaggaagtgctgttgtggatcaaatctgtaataggtgagacaggtagtgatgttacaactgatcaactcaagagtatgtgtggaagacactaaaaagtggaaaggtagcttatctcactgttatatctatttgatgaggaagtgcatatatgatcgtgttttaactgcaaatttattttctcgggaagtttgaaatgaaaactcagctttctaagagttaattgctaagcattttgtgttatattggatctctaatgatctgcatacagttttaccttattttttgttgaacatgaattgagaatttagaattactaaggtcacagcgcattcatttgtaggttgttcctggcttcggtcatggagttctacgtaagaccgatccacgatatacatgtcagagggagtttgctttgaagtacttgcctgaggatccacttttccaactggttagtctaaaatgtctgtccaactgcatggctctcttgcagtccaactatctcattgggattcttatcgatctatatcctgtcaggtctccaagttgtatgaagttgtgcctccaatcctcactgagcttggcaaggtaatgccactagattgatcatgattgctaccgttttatgtccatcttattggctaaaaagtgacaacattgtccatatttccaggtcaaaaacccatggcctaatgttgatgctcacagtggagttctgctgaaccactttggattatctgaagctcggtatgtttacctgtcctggttaaataatttagtaaccaaatttaatcttgaacccatgatggaatagtaaatgtacttcagaacgagtacttaataaaagcggccatctaattacgcaggtattacaccgtccttttcggagtttcgaggagcataggcataggatcccaggtatatttcttcccttcaactgtctacctctttcttcagatcttgtatcaaccaattctgacttgtgatacattatgtatgacagctcatttgggaccgtgctcttggtctgccgctcgaaagaccgaagagtgtcaccatggagtggctggaaaaccactgcaagaaggctgctgcttgaagctacacacgcctacaccgctgctgttaattcttctaacaattatcatcttggatgttaataactgaggataaactcgaaacgttcagccacattttaatatttttttccaggccaataactagaggaagatgctctcgatcggctggtacatttttgtagccatcgctgttaggatgctcatatagttaatctgccattgggcaacaatgtgattagtttaagttgcttagagctttatcctttgatgaataactttttcgagccttctaagttagctcgagttaacataccagttgtggattatggcacatttcttcatttcctttctgttgttaaatttacaagtacgattcattttctttcgcctgcgccctacccactggttcatgtccagctatcagcattgtgatgtcctagtggtgcctagttggcttatgatttgctttgtgtcaaactaagtttactaagtgcaataatttacccatctttggctgagtgagtttgaatcagcttctatattttccgtagttttctcaatctactaggcgtaatatttcgcacaaaaaatttatatgtagaagtttttttagaaaagaaaataaatatatttttcaagtttgcaatggttaataatttattaatcactcaccaatgacctttaaatttatgaaacatagtgaaggcacattgaaacatgttgctatcacgtatgatacattgagtattaacgggctaaaatatatatttcttttcatcagaacataatcatgcgatattttgttgtgaagatttaattataacgaatacaacgtacgattagataaatagtttaggagaaaaattattttaaaggttattaaatccatgcatgagagaagagagagtaggagcaagtacgatcggatcgtaaatcggataagtagtttaggagaaaaaattatctgatcggatcgtaaatcggataagtagtttaggagaaaaattatttaaattgatactccccccgtcccaaaataagtacagttttacactattcacgtccaacgtttgaccgctcgtcttatttgaaatttttctatgattaacatttttgttgttagtagatgataaaacataaatagtactttatgtgtgactaactttttttaatatttttataaatttttcaaataagatggatagtcaaacctttaacacggattcctacgagaggattctcgtattgttgtggccctgcagacgaaccgggctttcggcccatcacagcctagtttgtttcgccatcaacaccgactttgactcgcaccacctgcaatgcatatccctcgcgttgcgccacggataaatttccaccgccttcgccttcgcgagatcggatcacggcggcgtcgaccgcatatcggcgctccccgacgacctcatccagcgcatcctccgcttcgcgccggccaacgaggccgcgtccaccgccctgctctcagcgcggtggcgctcgctctggcgctccaccggcgccgtcaacctcgccgtgcgcctccccgagcccgacgacgggcgccgccacggccaccgcgtcagccacgacgccgtctcctcctgccatgacgccttcgtccgctccgcgcaggcggcgctctccgccgccgccgccgcagccggaggccgaggccgccacgtcacgaggctcaccttggaccttcgggcggcgaccatggatgtgatcgacaggttcgtgcacacggagaggccgcttggtgcggacgcggcgcccgacacggacgtgtggctgcggctcagcgacgacgtcgagcgagaggcggacagatgggtgaagaggggagacgtggtccgcgacgtggtctcccacccggcggcgcgccgcgtggaggagctccgcatcagcgccagcgcgccggccgtcgacgacgacgacgacgacggcgaggtcgggcgtctcgtcggggtgttccacctggacctccgctacgtcccgtcggagaccctccgcgtgctggacctctcccggtgcagcggcctgcgcatgccgcccgccgtggaaaccccgcggctgacgacgctgcggctgcaggcctgcgccgtgaacgtgaacgacctgcagcgcgtcatcgacgccgcgccggcgctcgccaccgtgcacctcgactccgtctccttcgacgggatggagcacggctgctaccgcctccgcctcccggcggccaccaccgcgctcgtgctggcgaggtgcaggacggacgcggagccctaccgctaccggagaagcggccgcccactggggaccagctccgtcgagatcgacgcgccggggctccgatcgttcaggtacgcgggctacgcgcggcgcttctccctcgcctcgccgccggacatggcgcgtgccgacctccacttcttccacgacatgtacgcctccgcctccacgagccgcgacctcttctggcgcttcgtccgcagcttccgcggcatcaggtccctcaagctcaaggtgagcgacctcaagcacgtcgccgtcgccggcagggcgacgcgcgccgagctcctcgtcgcgttccccaacgtcgagcacctcgagctggaagggcaccacgaatccgcgagcgagacggccgccgcggtggccatcggcaacctgctccggtgctgccccgccgcgcgccacctcgcgctccacctcgccacggcgccgccgcgcgagcgcgactccgccatgaacggcaggtacggccgcgatctcctgcgagcgagacagcaagccgacctcgccgagtctctcgatcgcttcgctcgccgccgccgacgcaaacccaatcctccgccgccgccgccgccgccgacgccggtgaactccatggacgaacacctgagcatcgtaggattgagtggccgatccttcgcctgcttgaagaactcgctgagaagattcgtaatccagtttcggatggatcgacccaactgcattggcgtcaagctgatcaagttcttcgccgagaacgcgattcacctcgaagagatgcgcatcgacggtggaaatcagaggatgcacgatcacatcaaccacatggttgagggatggatctccgattcatcgtcagcgaaaaagagggcgaatcacgagagttcgcagggtatcgacgcgagtacgccacgctttagattattaccccttgagagacggtgaaattggattgtggtgttagcaagatgtggattgcaattcgataaactattgttaatttggattgtcgaatgttcttgaaattgtagatttggattgcaattcaataaaccattatttctttctaatttatctaagaaaaattataaattacccctgagctattggggtcgatcaaattacccctgagctattgtggtcgatcaaattaccccctaacccgaaaaccaaacattgttcaccttgaacttataatgcatgacaaattaccctggtttatcctaagtggcatacgcgtgaaatccagtcagcactttttttaaaaaaaaacaatgatgagacccacctatcatacctcatcttcccctcttcctctctctttctctctatctcttagggtgtgtttggttgctcgtatgtccctagcctggctcgtatccctcatccaaggtgccctcagcctggataggataatgcaattggctatgtttggttgtccgcatgggtttatcctggatgatatgagatgctgtttggttggttgtatgacaggatgttgtacaatagagatggtgtttggtttgttgattggaccttaggtctgggtgacctcttcttacatatggtaaagttacccccacgaagcacactaacaaaaattttctaagtctgactcttgtgggtgaccatggtgttactatttaagccaagttttcgaaaatctcgttaatttcatatatttgacaattttaaacaactagctgtcagtaatcatgtaattttttaacaagaaggaatcaatgtgaaaatcatgcatattttttaacaagaaggaatcaatgtgaaaatcatgcatgccggtaacctcagctacatatatacaagtattaaaacaaattgatccatctgtgttctctacctctgtacagccgtcgtcgatatcattagcatgtatatctgcgaatattctgaaaaaagtggtaaccatctagctatggaacataaaccataaatttagtcatccagattaaaaaacaaaatcaaagtgaccatctttcccaatctctaacatcaagggaaaaaaaagaacaagtgcagaccaaaaaatcatgcccaggcatgttaacaagttacatggatctgttaacattgatcacaaagagcagtcaagtgccaaacaaaaatctgttaacatggatcacaaagcgcacttaatatcagaattcacaatccatttgtacgcatcacaaatcatcacatttgttctaaatcagttgcacccttcacagcaagaaaaatggcaagtgcaaatagctagaccaagtttgtatctgtaagtcccagtggaggaacaaggataaaacaagtgcagaaggatgaaatttatcatgaagcatagatcatgcaacaataatatggtgatggatcctcctggtttcagtgaggatcaattggaccttgttctaactcatctgactaatgacaaggcagcaagccttgtgtacattcagaagaatgaggctcgccgtgctcgttgggttaagaagttcctagaacagcaccaccctgacagcatctaactatttagctaactattcaggagaggtgacaatggacaccatattttgtatgtaatgatgattaaggtggtagtggacaccatttgttcttttggtaggatagtactcactgcttaaggtggtagtgtgacaccaaattatttacattcggctatgtgatggttaaggtggtagtgggacatcaaattatgtatatttggctatgtggtggttaaggtggtagtggaggtccatcactgagttctccaaatcaggctgcacctccgtatgtgttgtagcgagtattgttgaagccacattgttcacagaatcagtcatgttggtgatgagagcaacttcaccttcagccaaagccggggttctcttcctcttcttatctggattagatcctccagtcggctcatcactagtaggcccaactccactagctcgagcagcagtcccaccaccttcaacaccaacaccacttggtccagcagcaatcacatccccaataatcccatcaagaggtccaagagcactgtcagccatgtctggagggttgccaagggcttcatttgagcccatggcaaatcttcctgtggcttgcccattgccaaagataatttgcatctgtgtatagttctctaaagggacattcagatactcagcatccttagcatggtcctatattatcagaatcattacagttaaagagagaattgaattgtactaatgccacgaattgaacaagtgctagttagacacaaaccttgatataaagcatgtagtgctcctcatctaggacaatcattgacagtgtatcatcccaaagagccccactgatgtctttgagcctagtaatacgcacccaccttgtgcgccatttgcgaagatggttgtacacttgggtcccactaatctcaaacccatagcggtcagagacagttctagcaacttggttaaggtggacttccttgaaacccttgtcagtcttaacaccttgcgctataagctcaaccatacgcctaagcataaag

SEQ ID NO: 8910 - DNA, 19673 bp, Oryza sativa
aatcgccctcccagagggcggtaggcgactacttccgtcaattttcaaaatggaaaattatttttgtaaaacttttaataaaaaaaattaaaaataaaaaaaattcgccgatagaggtggccatgcgtggcccaggcggacggacgggcgcgcagcccatgtgtggctcgtgggcttttccggcccagcccatctaggccaggccaggccagttcgcttgctaacgcacaaacacggcggcgctggcaaagcggcgggtggtcgtcgcgcgtgagtccgtgacgttgacacgacgcgacgctacagtatggtttgcgaaagcatgcaattagcgcatgattatgttttgtaatggagtggttttaataatgcgaatagtaacaatatactccctccgtctcctaaatgtttgacgccgttgacttttttaaacatgtttgaccgttcgtcttattcaaaaaatttaagaaattattaattcttttcctatcatttaattcattgttaaatataattttatgtatatatatagttttacgtattttacaagagtttttgaataagacgaacgatcagccatgtttaaaaaaagttaacggcgtcaaatatttagggacgggggaagtatttaaaaccatagtactaccttcatcctactagaataaaagaaattttcgagttaaacgttattattaagaaagtagatagaattaaatgagcaaatattgtgattggtagataaataaatatatgtgagaaaattgaatggtgaaaggttgtgcttgattaggaaaagaatgttggtgaataaattactccctccgtcccataatataagggattttgactttttgcttgcactgtttgaccactcgtcttattaaaaaaaatttgtacaaatttaaaaaacgaaaagttgtgtttaaagttctttggataataaagtaagtcacaaataaaataaataataattctaaatttttttaaataagatgaacggttaaacagtacaagaaaaaagtcaaaatcccttatattatgagacggagggagtattatttttcaaaacaaattctgtgtgtaatagtggccgtgtttagttccaaaataattcttcaaacttccaacttttccatcacatcaaaactttcctacacacataaacttccaacttttccatcacatcgtttcaattttaaccaaacttccaattttgatgtgaactaaacacagccatttcggaaggggggagtagttataatagcatggatcaattaatcttaggctgtgttttgtaacatcctgaaaatgtgtcattttctaatattgcatcatactgattcttatgttcttaataactttctaaacctaggaaaatataattagcgggacctcctaaaactaacttgcataaaaacctctatgctatttaacatcttttgtgcttttcatttaaaaacatatttggtatttcttgttggaactctattttcgaatattaaactttctttcgactaaaactcttttattcaaatttagtttgaaaaccatttttactattatgaattatggtccaagaaatcctccaattttgcccttgaacctaaaccaaagtaattccaatctcattggaattaattgttagcccgtcctttgattttaaacccatcctttgattctcgatccaaatatccaaattcctccttttgatctagtcaccaatttaatctctgtggcttaatttcctcttcggcacaagaattgtattattttttttgactgaacacaagaattgtattattgcaaatattgtgaataattgctcttgtgctaagaaaattccaacttatactcttcattcaattttcccttttagctacaaatatacataataccaattttagaataggtatcctatttattgtcttcaactaattcccttctatatattcccaaaaatattttgaggaatattattaatttcccttcctatttaagtgcttccaaataaattccctcaaactccacctctaaatattgcacccaaataaattaggaaatctcttttgtgaattctttccgaattcaaattctttgcaaaacctagttatccaaatcaagtattcaaattagacttctttctttttgtcatcgggccaaaatttcctttccttcttcccttggcccatctctcccctcagcccaaataagccgaaccgccttcctcctgcaggtgcgcgcgcacgccgccgcaaactcccttccgtcgccgctaagaaaacgaagccggcgctgtctccttctcctccactccaccggcgtcgtgaccctccttgccgtcctcctccaaaccgacttccaccgcctataaatagccggccatccctccccttctcaacatataaaccaagcaatggcggaggacggaaaaaaaaacaaggtgtggctcatatggaataacgcgagagtgaaaacccaacaagaataaggaaataaacaatctcaattgcacgatatcggaaaaaaaacaaggtgtggctcatatggactagcgcgagagtgaaaacccaacaagaataaggaaacaaacaatatgaattacacgatatagtacgacaaaatattacgtcaataagcgtatgttaagcatggcagcaaccattgatcgtaatccattgtccatttgcaaacaagcataaataaaagagtatgcattgaagaatacttaaagtaatgaagtatttttattttgggaatacaagtaaacgctgaagtgcagcaagtgctaaacgctgctctctccctgcttggttgcttgccgcgcggtgccggtgccgttcccagccgcagcccgcaccagtgccgcccgcgcgcctcctgttgctgccgaccgtccaacagcatcggcaacgccacgcttaatgcatacgagtactgagtggcccagccgtccaatagcaacggcaacaccgtgctgcgcctgcgcccttacgctcgtggaggggtaccggcggccggagcgaggtatggcgagcgccagacctcgccataccgagcgctccgccactgaaaccaagctctctctctctctctctcttctcatgaccggccattgccgccactggccgatctcctcttccacagctctgcaagccaagtccttgcgccatcatgtttgcctcgacgaggtgaacccatttttcccttttcccctctcttttagccaccacaacaagccaccaccgccactccttttgttgccacggtcgagctcttgtcgtcgccgttccggccttctccttcactctctccgccagccaccgccctcccaggatgcgtggtgctcgggaacaccaccctccgccggcttcgccatcttccagccgccggaaaaccggcgcccctcctctccttctcctctgctgctcgtgctggaaagaggagaaaagaaggaagagacgagaggaagaagaaggagaaaaagaaaaagaaaagatactgacaggtgggcccctgcacagtactatttcgcattttctctatttaactcaaaatccaatctttagaagcccatctctcctaaaccgtagatccgattctagtgaaatttggacctaaattcatctaagttcaaactcttcattttcataccaaatttgctattttaagattttatttgaatttccttaatttattcaaataccatttgaataaatatttgatttaatcttataattgaatttacaacttaaacttatatttgcttttcaaatattttcttttatctccaaaataccctttagccactaaaaagccgccggttggaactttacgccttccatggggacgttcgcgcggtctacggacctcaacgtcggaccgttggttgtaaagcccggcaaaaaccaaacccaaggccgaagtgctgctcctggcaccccacgccttgatgcgtatagcggtcggagcttcactatcctctcgacctccattgcacgccgcacagttagctctcgagctctgtgtgatcctagccgctccgccgccactcacggttgtcggagtaacacttccaccccactaaacctgcatcacctcctattcttctagccgatatgttgtctatcgacaccggctagaaatgataccaaatctagtcgttatgctgtccaactctagcaacgactagcaaacacctaaaaccctagccgatatttatcctacctcgatatcggcctaaacaactaaaccctagccactattctacaaaagcccaaccttgacccatattatccacatacctatttaaccatatcaactatccagtatatttcctatcatccaaatcacgagagccttcacataaaatataagcaacattagttgcttgattccctttttaccttagcctccaaccctctagaacctccacttaaaatattagcccagtaatccctatgccctacaaaagagataggttataccttaaaccctagccctcttaagctgtttatcgttttcttattattttatggcttttattgaatttggttcttcctctttctcagtagagtttattgtcttttggatggcaaactttggtatttcgagaatcggataatcaggttgcctatcttggatttatttgcgttggagcaaggcaagttattattcctcccctttgagcataatgatcatatattcttatatatctattctatgcattagtcatacatgatttcaaatgcataacctgaacatagcaaattagatatgatagcttttgcttagcccttcctagttagactgcataaaatataatgaacttagattgggacagtacggtagaaatggttgatttccgggtggctagtactgttccaaccgacataagactgccaagtacatgtgaagaacatacgagtacgaccgcaattctcgtatgggcatagacctagctgattaagttatctagcaaaggtggtacctctgtgtagtggttcttatttaagtcctcgcgcaggaggcaaatttattccgcgaagggcaatattgtgatatttaccgtggcgcaggtaaatatttgtttgagataaattatgatgtcatatgacttgtttgtgaaccctgattgcgatgacatggtgtcatacaatcagatctctctaaagaccccggaaatgccagaactcctctcgctgctgataatgttacgttcagagcgtatggggattatagttcatggaacaggtaccactgatgttagtaaccgaaaagctttgtaatgacaaggctaatgtgtttggcacgtcatgtattgcgggtaaagcgtatatctactgcagtatgaatatcctcaaaactattcgagtagccgtgctcgcggttatcgggcattgggactcactatggcatcttggatagaaacctaattcgaaattttattaaatactgatgcatttaaaacattacaggttttctacttctacattctctgctttctgcaagtaaatctagctctatacagatattacccctcatgcattcattgttgaataatataatagcttgctgagtacgttgtactcacccttgcttcaacccctctttttcagagtctatttggagtttttgtcgaagctgggagttcaattacataagttagttccctttaaaactagtcttcaagtctagtataattagacggtttaattctatagtaaaacggcagaattgggtcatagtatagcttctgttgtaataggtagccacaaatttgtaaatgccctattattttatataaatatatctcctttggagtcttgaccaaatttatgcgataaagatccaaattgttgaacctgtatcaatctactgattcagggcttgatacagttaaatatgtcggtttctgaatcgttagttttgggacccgacatgtttagttcacactaaaattggaagtctggctgaaattggaacgatgtgatagaaaagttgaaagtttgtgtgtgtaggaaagttttgatgtgatggaaaagtttaaagtttgaagaaaaactttggaaggtcgtgtttagttcaccccaaactttcaactttctatcacatcacataacatccaaaactttattacacacataaactctttttttttctaaacttctaacttttcctaaacttttaatttttttcaggagctaaacacagccttagggcattaaagtcggaggatgagtccgacgacgctgacatgagctagcaaacgcatgagtgtttctgcctgtagcctgtaggctgtacggctgtgttcgtttgggatggttgggaaccaaactcctccgcacggaaaacggagcaatccattagcatatgattaattaagtattagctcatttttttaaaaaatggaacaatataatttttttaaacaacttttgtatagaaactttttacaaaaaatgcactaaaatagtagtttgaaaagcgtgcacgtaaaaaatgagaagggagagttgggaacaaggggaaacgaactgagccgtacccagctttggcgttggcgcaaacccattcgaccgcgttgctctcggttctgccaaagatgcggttaataatttactactctctctgtcttaaaaaaaagacaaaccctaagttaacgtgtccaacgtccatcttatataaaattcttttataattaatattttcattgttgttagatgataaaacatgattaatattttatgcgtgactcgtttttttaatattttttataattttttaaataagactaacgatcaaacgttagatacgaaaatttagggtttgtttttttaacggagggaggacattactccttggtgcagcctttgcagacgtgcagtatatcgattgacatctcttcatctacgctctccttgtttttcttcactgcagcagtacatggggccagtttagttccaaaaattttccccttcacccatcatatcgaatttttggacacatgtatggagcattaaatgtggacaaaaagaaaaaccaattgcacagtttagctataaatcgagagacgaatcttttgagcctaattaggccatgattagccataagtgctacagtaacctacatgtgctaatgacggcttaagtaggctcaaaagattcgtctcgcggtttccaggcgagttctgaaattagtttttttattcgtgtccgaaaaacccttccaacatccggtcaaacgtctgatgtgacacccaaaaatatttttttccccaactaaacacacccatgatgcagagctgcaggcgtgtcgcgtgttactgcccagcctagctcgatctgtagcacgtggccggcgttgcatgccgccgtactggttgcatcggtacatcctgactcctgagtcccttttttttttttttgagaaccacatcctgagtcctggaccttcacatgcatgctcacacgaaccgatcttttctcgttcaattcctccacgaaaaacttctcaaaagaagaaaataaagaaaaaaacaaacaaaatctgcatgatgttgaagcaccgcgggtgtactctacgtgttgcattgatatccgggtttatcgaatcgttttaaatggggttaccattatcctaggtttcggtggttaccatggtagccgtacggttatcgtgagatatactgtagttctataaactaagaagattattacacccgcggttttgtaaacctgccatggtcctcatcggtaaccctacagctttagttgatcagtcaaagttggcctttttagtttagcataatcagtcctaaaaagttgtccagaaagatcggatccactaccaatagctggtgcttatttagcccaataagctaaccgatgggtttagtgttgaatatcagtctcagcaacagcaaaccgatgaggtcccatgacttctcacactgctcctcttctgacattcacaagctctcattcaatttgtgcataatgggggtgcaagatatgtaaaaagaactgtactcctgctgctattttgtctgcataagtcataggctgttgccacctcgcagtgcgccgtttcatgatcatgaacatactgccgatgcgtgcacccggccccatgttccaacaatatcttgccctcggattttcacggaaaatttccaacgaaacggttgattaatttcgttcttttatatgaatcaactgcaaaaaggtgttcccaattaccataactaggggggccacacatttgcattatcatggacttaattatctctgtaatgtaactccgttttacttttgaatttttcctaattaaactaaaaataagtttaatcaagattataaaaaaagaaaaattggcaaaatctaaaacatcaaattagtctcattacaatttaacatgaacgcattccagtaaaatatttgttttgtatttaatttgtctcattacaatttaacataaacatattccaataaaatatttgttttgtgtttaaaatactactgtgttattttataatcttaatcatatagtaatttaaaatggagggagtaataatatataataataaagcactgatgagcatttgcttcgcacaacgcaacataccaaaacccaaattaattcattaattaactctgaccgatcgaaatcgatcacagcgcgcgtatatatatagtacaagcgaaaccaccaaaataatttggcaatacatatatcacgcgcccaattcagcacacctggcacgacgacgatacatacatgcatacatacaatcaattcaagcccaaattacccccaaaacgttacccattaattaattaactgcacgcactcaaatcatgattaatcgtagccgtacacgtactcatccccatccatccatccatccatcggacggccagcaagcatcgatcacagatctcgatgagatctcaggcgtcgcggtcgcggtggcactcgggcgacatggcggggtagcgttcgcggtcgtcgcagtagttgtagatggtgtgcgtcttgcggacccaggcgaggcggcggtactggtcggcgtcgaggtcgcggaactccggctggtcccaccaccgggcgccctgggtggcgcagtaccgggcctccgccgacgcctcgcagccatcgacgtggaagccccggtaggaggcgacgaacggcgcccgcgaccagtcggtcttctcccgcccgccgcgggtggcccagtcgtcggcgttccacaggctggagtagagcttcatcggctggttgaacgggtaccgcacgcccaggtccttgctgttcttgaacaccctgatcggcgtgtcgtccacgaagaacctgcatatattgatagatcgatacattcagatttcagaacgtacgtatgaagtttacaggattttcatgtgctccctccgtttcagattacaagttgctttgatttttattaaaatcaaactgctctcgtttcatcgtcgttttgacttcgatggaagttaaaatgttctaagtttaatcaagtttgtagaaaaaaaatagtaacattttcaacccaacacaaatatattatgaagatgtatttaaattgtagacttaataaaattaatttgctactgtaaatattactatatttgtttacaaacttgatcaaatttaaagtagtttgacttttaaacaacttataatatgaaacggatgaggtagattttagatctgtttgagatagctgtacattttttcataacattttgtgtgtataaattgatgggaaataattaacctgcacatgtatatatatacatttagaacgtatgaattttactggatttttatgtagattctagacccgactgagacagctaaaattggttcataaatgggtaatctataattttctataacaaaacttatgtgtataaataaatgagttaactactataaaaaaaattaaggaaatgttgcagaaatgtattacaagaaaaaaaaattatatagaaataaaaacttgcactggaaaatctgaaatttagaaatataatagggctatcataggattttactggaacacaggaaatacatagtattttcatcaagtagtagtaggagtagtaatttcagttaatactactactactagcttttaatttattgcggtttgctttcaataaactgttagcgcacagcggctatccgcttcttgttcgcactgtgcaacgctgtagcatcggcgcgtgtcagcgtgtgggccccaccgccgaccgacccatccctgcttttcatgttctttctgaactctgctggtcagggacgacatgtacacgcgcgccaaaatcaattgcacatgcgcgccaatctctcgtctcaccgtgcaggtaccttttgctttgctcatctttacggtggattcaaagcatcttagtactactgacaccgcactaattactcttactactttcatcccagtctaaggcaggattagacccatcctacctggctacattttgaggaaaaaaaaagagaaaatcattctgctaatgtaatactctcccgggctataatatactcatatactagtttcaaagttttttttcaaacttccaactttccatcacatcgaacctttcatacaacacacaaccttttagtcacatcgtctccaatttcaatcaaattttaaactttgggccaatctaaacacagcataattctacaactctatttgtcttaaaatatactgtctgtattttaatatataatacattttttataacgtttgactattcattttattcaaattttttatgcaaatatgaaaatatttatgtcatacttaaaatcacaataaaataaatgataattacataatttttttataagacgaatgatcaaacgttagataaaaaattaacgacattataaagatattataaaatattttaatactacgaatctcaaagtttaccagagttgatagttgtagattgtgcttccttatttttattttcttcggaaaatgagggagtacaatgcaagtaaataagtgggggtgttaatgaggggtaattagcgtacgcgatcatgtagaggttccagaggacggagtaggagtggtagtccttggtggggtcgaaccagaggtagatcctctgctcccggtcccccttcccgccggagaagacgttcgtctgcaggatgtacggctcccccgtcctgttccccaggaactcgaagtcgatctcgtcgtgctccgagttctgcgacgacagctgcaaattccccaatgcaaaaaaaccacacatcatcgatctccgatcaagaagcagaaggggaagaggatcagggagcaatggcggcggcgtacgtagaaggcggtgacggtgccggcggagtcgccggcgacgagcttgatgtgcatgctgaagtggccgaagaggtaggagccccgggtctggaagccggtgccggtggacttgtcgaggtagagctgcacctcgcgcccgccgtccacgtagtggatgtggtcctccgcccacgtcggcacgtagttcttctcgaacgccacgtccaccggcttccgcggcgccgccgcctcgccgccacccagcagcagcaccgacattgccaccaccatcgccgccgccgtcgtcgtcgccatgttggtggtgagtggtggttgtgtgtgctccgagcagaggagctcgcgagtatttataggggctctgctcttctcggcttccgttttctgattatcttttgctaattaataatccacctgttcctcttctagacgctacagtgaactgtgaagctaactagagcaagtttaatagtactgccaattgtaggctacaaatcaactatagtcaatttaatagttaatttatataatagttatcaataaacatgttatgcataattaatgtctgttcccacgtatgatacacacatgcatcttgtggtccgtgctgtagctggctataaatctatagcccgctgctcttatctcttttcttttatatgcttaaaatatgtttatagtcagcttatagtctactattgtacatgctcttagacgaagagtgtgtgatttgggataaaatttcttttaactttcttatttctcatcaacacgtttttcggtgtgttttaaaaaagtatataaatagaagttgtttagaaattcaaataaatcaatgttttcagtttgaaaaatatcctccaacggacacttgaggactgaaagaaatcttaaccattgatttatagttactacataagagagcttttttctcatattaatagttgctggtaatatacatagattagtaactactacagtaaagaccatggtgaaacatccgttaaataaaagttgttaattaagtactcgtgattagctagctgatgaccaagttgtaaccatgtaataacgggtgagtgagtgagtgacagagtgatcgagcaagttcatagcagctgctgcgccagctgcggccagaccaccacatgggtgcactgacgagcctgtgaggcgaaggttttgtcttgtgcgtcgtgtcaggttggcctagtggtgagatgcatgatgcatgggagcagtatcaagctgacgccatgggattatattgaatttaatctgaatcatgcattgcatacttttatattagatatatcagcacacaagttgggggcattcttgcagaggatgtttatgtaggcgtctcgaacatgaagttattaacaaaaagtgcttatatatatgtttcttgatagtgtgtgtatatatatactactactactaactacaccgtagtgtacgtgttgtgtgcgctgtcacaactcacaagaagcttctaagcacgcacgaacgcatcagcatcaatgctccatgaaatttgtggtacaagtgattagcgcagtagtatatattactgcatgagtgtgtttgtttggttggttaatctttcagtaattgaaaagtgatttgctcgcggggagtactagtatatatattggtggcagcttaattaagttgcaaaacttttttggtcagtcgctggccaaaatgttcctgtctggtagtatatcggcgatgaatggagctagctagctagctacaaccacacgctgtagtggtgtacagtaggtcagtagcagtgctacagtggaagcgcgtgtagtgaggccagttcagtgcagtgcagtgtgcaggcaggtcggtgaccggaccggacaggaatgaatgctgtggccgggggttcacatgggcggtgaactcgcatcgctatcaggagccgtccctacgtacgtgtaccgcccggggatacatcgagctaggccgtgtttacttcctccaaatttccaaatttccatcgcatcgaaaacttttctacacatataaactatcaactttttcttcaaactactaactttctcccaacttcctaacttttctaccatctaaacacagccatagtatatccaagtcctaatgcctcaacgctcgctacgtaccgacatgaacaacgtcgccgactgtccggtgattttgaggttctctaaaccttaaatttaaagtcgattttgaggttttcttttagaagtttattttttagcgtttgctttaaatggttaagaacaagtatgtaaaattttattcacaaattatttttcgtttacaaataggcttatttcatgaatatgccaaatgatggggctgctcagcttttccatcaagtctatttttcaatcttttcttccaaactatgataaacgatttacttataattttttttaccttggtttattttttttcagcttattagcggtagtttaactgatcaaaagttatataattctatatgacttaaaaggagataacaagtttaaggctaagctgataacgagcacgtaaaacaaggtgtgttattagcaaagtaattaattaagtattagcggttgctgcccgcggcggcgtcggccgcgccgatgctgcccgtggcggcgtcggctgcgccgttgcaatccgcgacgtcgtcgatggtgcagatgtgtcatgcaatggcgtggatgtgactcggatgatctcctcttcttcaaccttctccatcgagttaccaagacagcatgttcttcaccaccatcttcggattaagtctttggttggctggatttggggaaattcttcctctttgtctcttggcagcaataaccatgcagggtttatcgttcgggttgagcccagattggatttgcaatcttggtttacaggtttacagtccgagctcctcagattcaacgatgaactccgtggaaatattttgcggagtccggtgatgctcacaccaaaatctacggcttcgcaacaaacctctcgtatgtgtcgtttccgtggaggcagccgaaggggtttaccggttcgtcaagcagagtacacatcaatagaggcccttggatgcaatcgtcgcggcattgccgcagtaccctgtcgatttgctccttctttgctgcttagtttcattaggaagtttgcttcctattttcagttgatctctcttattaaagatggtacaactcttatgtttatcatggacgatgtatttgggaattcaattcccctaaatgctgtcgtttaataaagcgtgttatgttttaaaaaaaaagtattagctgttgcaaactcaaaaataattaatatgcatgatattaattcaaagaaacttttagatagacttttttagaaaaaaatacgccatttaatacttcaggaagcgtgctcatgagatacgaggggagatttttgccgactctgctgtgccgaacagagcatagggctcaaattcaaagactatagtgtctccggccggcaccaatgctaattattttgggcatcaatacgatcctcaagatatactatctccttcccatcgtcgctttgactttttctggaacatttgaccattcatttttttttaaaaatagtgtaaatataaaaaataataaatcaaatttaaagtacttttgataataaaacaaatcacaaacaaaataaataatagtttcaagtatttttttaataagacaaataatcaaacattacaaacaaaaacttaaagcgtcaagtaatatgggatggaagtagtagttttctacaactaactgtaactgtatgtacaaatttaacaaaaaatatagtgcatatgttaatttatattgtattccctcagtcccataatataagggattggatgtgacacattctagtatgtcacatctactcaaaatatcttatactcccttcatctacttttgatagtcatatttccaaatctgaaaattttatttttgataggcatatttcaatctaacaacttattatcttaatgactttcttggatttaatgcatgactcttcattcttccacacaagattggttgcatgagcatcgagaaatgtaaatattaatgaatcgcttgtttacgaggaatgactagtagcatatttaaatggatgataagtagaatcacttatccttggtctgtgtgtcaagatgaaatatgactatcaaaagtagatggagggagtattatgggacggagggagtatatatcttccttttcccttatgttagtttattttctgaaaccgaaagtaatattgtctctacgtgcgccgtagctagtaaacgtggcctcctactaaccgttgcaagcagaattaactaccagtgctaactgccaccaagaagagtataagccatgcgcccatgtgcaatagtttttggggccagagatgaacaaaaaaaaaagaagaaaaatgccggtttggtacaacatgccgaggcgcacgtatataacgttatggcatgaatggcgcggctgacgagcgaggatgtcggggagcatatttatttatttattaacccttagcatcgatattaagttaaacaaaagaagctaattaagcaaccctccattcacaaatactaagctagcactttaggatattgacattaaggacaccaacaatgtatatagatgaagtggtcaggtggtattagttgttgcaaaccccacacaatgtatatggatatggtaggaagtaggaaataaggtgggtcctacgagtaaaaggcaggagagaggagacagtagtaggatggagaatacatatgtttttttttatttcttatgggtggtctttatacctaagggtagcccatcataatgtcacctagaactactcctactgtgtataatacccaccctaaaggcttaagacccaccttatagcatacattgtggatgtcctaatatgccacattgaccagtaaccaataatactatatataaagacaagttattttaaatggaaattttgtaataatttatttcacaatatatatctagcattatcatttttatacacttttttgttactggttggagttaaataaaattgaccgagataaacttatttgaaggtggaaccaacgggtcattaaccaaatccaaaatgtccattatctacacgtagtactaactaatgaggcgatgccacatgctgagagcctcattggttggcttaataattaagccaaatcaaaagttgaaattttaattttcaaacttaattttatagttgattttaagatattttcaatgtaaatcttttccttggtttttaaatcgctacgaataaatatataaaaaaatttattcataaatcagtttttattctctaataaactttgtgacttattagggaatatgggcaatgagtaattacagttatctgcgacggtaacacagatacatggtcccagttaggggcgattgatgtgctgttggatgatgacgatagagaggtgtcaagatacgaattgaccggcacatgttgtcggtccggcaggccccatgttacccattggacctatgttttctcctcctcaaattttaatttctttctctccaaatcaccaaaccagactccatccgtccactatttttcatgcccaacattaactgtccatcttatttaattttttaaaaaacttaaaagtatactccctccgtcctaaaaaaagacaaaccctggtttccgtgtccaacgtttgaccgttcgtcttatttgaaaaaattatgaaaaaaattaaaaagacaagtcacgtataaagtattaatcatgttttatcatctaacaacaatgaaaatactaattataaaaaaaattcatataagacggacagtcaaacgttggcacgggaacccgcggtttgtcttttttaggacggagggagtaagtcacatataaagtactattcatattttatcatcttataacaataaaaatgctaatttaaataaaatttaaataaaacgaacgatcgaagttgtatacgaaaacttatggttgcacttataatgaaacggagggagtatctatcaatgtaactaacattatgtataaatataattaagcacatgcttgcatgtgttctctttgtttgttcgcgccgatggcgctatcagttcctcgttagggtaaatccacgtgcgtctgcctgagccgttggatcgaaaaggagttaagagtatgccacaactaattacatactccccaatgaataagaaaggctgtccaaatttaaatcaattgattatctgttaaaatcctacatgaactatgggtgtgtttagataatgggaaatgagaggtgggattgagattgggaaatgaatgaagggttaggattaaatgaaagggggagaatgaatggttaggatttaaagatgtctattggtgggtgggaaatcattttcctatcccatttgccaaacatggcctatatgatatagaatgacaatatcaatttcattgtttcctcttcgacttatcaaccgtaacaaaaaaattaaatcttaaaacaaaatcttagagttgattttaacgtttttctcatgctaagttgtttttcaggtttggctttcaatacactaagaaacatacatataaattacttattccattgcttatatgacatgtccgtacgcaatcagctgtgtcgagacatgtcgtctagaattaaatttcattttccttttatttatcgaagagagacgcaagaacatctccacatttccattagaatgaaaaacaatagttcagagcagagaattaaagttaataaaaatgtcaaaaaaaaattacacccgcttattacagtacattgattaaagtctttaaaagggccccacgcagcagtcaaaaggagatccatcatcatccagcaaacaacgcgatctaacctgtcctgcaaacacctgaaaaaagcagggggaatcctgcatatgcatgcatgcatcgctatcttcttactgttcatgcagcatccatccacttgcttggaataatcacatcattacatacagctagctaccattttttttttgttttttagtctgcatatttgtccaggataatccattcataatagcataccccatgtaaagccacatttgcatccatgcatagaagcttgtttcgtgaagaaaaaatgcatttgtttgtaccacagggaaaattgaatcaaagaaaaattttcaagagatcaaacctagcatcttgcttttttttttcttaatatggaattgaccatagtaatgtaggggctagctgtatggttgagtacttcaatttacccaagcttgctataatttttttttgactaactagcctaaggtttggttaacaaaattagagcgacactttagctagcatgactatacgtacttgccacacttgtttttatctcaatggcatatggggtctacatagtgaagaagaaatttggtcataagtgtggctatgaaccaaataggcatctagctcggttaaacttatgtaacttgaggtgtggtaaccttatacaagttatgtgtcaaaccaacagcccctactcatataaattttttttccatatgaaccaatggggcctctgggaaaaatactaagcaaattgaatgctccaaaaaatatttgccattcttgcatttcaaaatgaaccattaaactaaactttaaatggaagttcatctagcatcctagaaagaattataggaacaactgaacgaacaagcattgcatgaatattttgaaatgtggaaattttatagaattatcacaagattcagttcagttcctttaaaaatcttcaaaactcctccgtttcaaaccaaggccatagatccacatcttaaaaggaacattcacatcttaaaaggaactttgaatgggtagatcttctacgcatgatgctcgggagctgtcttatcccttgtatgtcaagttttaaaaccggccttagctatatatatttttaaagataatgaaaatactcccaccgtttcataatatagcaacttacttaattaggactggatgaaatattttatagtcttattcagattcattgtactattaaatatttcatttggttcggttattatattataaaacgaatgaaaataatttacttcctctgtttcatattataagattttctagtattgtttacattcatatatatgttgcctagatttattaacatatactctttccatccctaaatgtttgacgccattgacttttttaaacatgt

SEQ ID NO: 8911 - DNA, 2940 bp, Oryza sativa
tagaaaacttcgaaaggtggccacgcccattgcagccatggaagcggtgatccacgggcgccagccttgggaagggcttctacacggacacggtggcagcatgcgggctcgagaacagcggatccaccgtcggcaggatcgggagcaccaaatccgtcctcgtgcgtggtagagaggaggcggaaggagccacggcgaccacgaccacgacagtggcgtgcatgttctagagcattggatccgccgccagcgtgctcgggaagggcggatctgccaccggcaggctcgggagcgacagatccaccctcacgcatgatggagaggaggcatatggctgtagtggcgacgcctgacgacggcgacctagggttttggatttcttttattattattattattatttcaaagtatcattgcagtcgggcatccttatttggttgcctgcaaaaatcgggtctttaaaagtggtctccttaggacgctcatctgcaaaaatggtttctcacatgcggttgtgatgaccacatgtgaaaatgctgatttttgcatgtgaccgccgccgggccaccgcccgtccctgcgtcaccgtgcacgccttgcaactaagggcgtgtttggttgcctggaccgcacttggcccgcatctggcgtgcaacctgcaggttgtttggttgcttggacgggggactcagccaggcccagcagatgcaaaaaggcccgtcgagccaggctgggggaaacgaccaattcgagcttcgctgggcggcctggctcgtggcgtgcagcgacaaggcacgaggctgcacccgcgcatgcagacagaaagagatggggtcaccgcgcgctgccttgactcctcaagagcttctccctcttcctcattttttcacagtgaaaaaaaagctagggttttgggctactcgtcgtgaacctcaccgcgcccatcctccgtcgccaggcggatgtgagcgccggctccctccgtcgccgggggtgagcgccggctccctccttcgccggctgctcctctccccccgtcgccggctgctcgtcttcccttcttctccttttagcccccttcttccttacgccctctcctcttcagctctctgcgtcgagatcttaggtaagtgcaaggatggtattcctcttccctttccaacctccttcaatttcgtctccactctttctttgatttctttgtttggatggatgcacatctgcacatgtccccttcataaaaaagtagatctactaaaatgtgatgtattttaggttgatttgggtgcaaggaaatgttgcataggcctggattttgttatatatgtttgcaatgttatgtactgttggtatattttctagatgtagctgagcatgactaaaaatgtttttctttgtcgatctactcatcaatcatatttgtacacatgaatatttgttaaatcgattgtctcttagctcagatctgcactggttgtttgtgatttgctcattcaagttagatctatgaccttgttagttgtgcatattactatgcctttttgttatgtccgagcaattttccttggtcgatgatgtgtttgtcactggaggtagcatcccttggatgtggcagccgtggcatgggtccataaaaattggatttgcaatacttaacagtgtcaacaccatcatataaatatgtattgacaatgtactacatatgttatttacatagatggaagaaatgtgacgtattcggcgggccctaattgctaaagcagctggtttagtttccgtgatgtgtgcttatgttcttttcattgtgcgaagagctagaagaaacacccctaggatctcctatggaccaatgtctgaaagagacatagctagacaatcgaaccttagattcatctatcacacagatgatactaattgcttgaatcagcttcgaatgaggagggcccccttttttcaactatgtaacttgttgcgagaaagagaacttttgcgggacatcatccatagctcagtggaagaacaagttgccatgttcctccttgttgtaggccacaaccatagatttagagctttgcaacccacctttaggaggtcaattgaaactattagtagatactttagagaggtattgtatgttgttggtgagctacgacacgagatgatcacaacaccttcatcccacactcatttgaaaattacatcaaatacaagattcaacccttattttaaggtaagaacctaatgtttttgtatttcaactactgaataaaatatatgtttttcataagcttgtgctaatatatctaattgatcattaggattgcattggtgcaatagatggaactcatgtcgatgcttgagttccatatgcaatatctgctgcatttaggggtaggaagggtgtcactacacagaatatgatggctgcggtggactttgatcttagatttacgtatgtacttgctgggtgggaaggatctgcgcacgacgccctcatacttgcagatgccctagaaagggatgatggtcttagtgtccccccaggtaatagaagtgtccaaatttagatgattaaggtttttttggaaaggttagataatgattacactcaaattatttttatctcataggcaaattctatcttgttgatgctggatatgctgctaggccagggttccttccaccataccgtgggtgttgataccacttgagggagtatggtagaagaaactaccctcgtgacaggagagagttgtttaacttaagacactcctctcttagagtcacaatcgagcgggcatttggtgctctcaagaaccgcttcaagatactgtacaacaagcctttccatccatacaagacccaagtcaagttagttctagcgtgttgcatacttcacaactggatacttcggtttgggcatgatggccatgttccact

SEQ ID NO: 8912 - DNA, 20718 bp, Oryza sativa
taactcttcagatattttccaagcaagagaagatctgactagtggagtagtaacaaacacagcagtgatgcttgccatcggaatatttttacatcatattaattactcccaaattcaggtcaaaacttgcaatgttttctcactgtcaagatcgtattaccgtaagcatgggcaacttaatcaataatatagtgagagtggattgcttaactgctattcattccattcacaaataatggttagttttggcatcaagtaaataaactttgattatttttagcgacatcgaactattacagcgagtatatttgaatgtaaaaagtattagttaactacttataattacaaatataatgattcaacttttatgctaaatagttagattatttaaaatatatatttgtagtcaaagtaggataacttaaaattaaactacacatttacccgtgaactgaaggagctgagggagtacttattatactacttatcccatatacacggaaaacaaaacggtggattactgcataaaaacttaaaattttttaaagcaacttttttgagaaaaagtttaaaaaaaatatcgtttaacagtttgagaagcgcaacagtcttactctgcttatgctgtcaccttctctgttttaactgaacagccctgcttgatcagcaaactcccctgaggtcaaacatctgacagggtctttgcctgtcagctaggacagtcatctcaggcatattacatgcatgcatgttggatcttgtcaaattgtttgacctaatctaatccaatctaatctgcatcaacatctgatcagcagcaagaaagttcatggaagctagctgtgtccctgctgctaaatactcttctcagtatcccactatatcagcatgaattcatgcatgcagtttcaggtttggtccattccaaaacttagttgctgcttccatgcaggcatgtttccacacgtgtttaatttaactgtggagtttggacttgatttgaagtttctcaatctgcacgagcttgaattcaacaactagtacgaaatatagaaggtccttgcaagtggcatgaagaataaaagagaagcttcttgagaaaatacttgtcaagaaacgttagtaatgcttgtattattagtgctttaaaaaattgcaatttggcaactaatccttgttttcttcttaagcttcagagggaagtactagtagaactataggtactcaaatagtggtgaaaggtaatccattaggaaaaatatataatctttttttttcaaggagcccattgaaacgtacgcctcccctggtttctgaccattgggaattctatggaaatgaagtgactcacctaccatgaatctggcaaaatttcttggtcataaatatagtttgatgctattttttggagatgggtttatagttatatactttgatgatgcactgatcgtacaagagctgatataatattaacactatttgtttttaaaaaatagacattagcaaaatcttaatcatggtgcttaagtactattgtttgactaggtatctatgctattcaaggaccaaaacatcacctccatttgattctttcttgatagatggaaaagttcagaaaggacttaggcccttcaaacttgcaaaaattctatcacatcaaatatttggacacatgcatggagcattaaatgtaaacgaaaaaaaaaccaattgcacagtttgcatgtaaattgcgagacaaatcttttgagcctaattacgccatgatttgataatgtgatgctatagtaaacatttgctaatgacaaattaattaggcttaataaattcgtctcgcagtttacaggcagaatctgtaatttgttttgttattagtctacgtttaatacttcaaatgtgtatccgtatagttgaaaaatttttggcacacgacctaaacacggccttatttcaagttggttgcatttagacatcagcaaccaactttaacaaataaaagcagcaggagaagggaaagaaaaataaaatgttaaagtcttaaagacatcagcaaacacttggtcataggacttgaactacagggacctggattctttggatattatagtagtagtacacacgtcatacattaatttaacatactaaagttccatttgaaatggaagaatcaattattccaccccaaaacaaaaggattcagtttattggagagcctgtcgatctgtcccattggttggattagcaaatataaaagcaacaaaaggaaatgttttctaaaactcagtagctacattatctagatgatatagtacacacgtcatgcaatatatattaattatgggccccatttgaaaaactagagaatttgttttttttgtgggggttcataatttggcatttcgctcttattggggcctaattttcaaatgagaattcctcataaacattactagtctaatttcgcgcttaattttcacaggaaaagatcagaaagaattaattggtcgtaatgtgtcaaagccagagacagtagcagcccggaaatggacaagttgatctatgggcatttggataaccacacatgtaatgcagcgtatgtgatgtatttaaactagaattgacaaaagcaattgggcttttcctatcgatggattgatcacttgatccctatcaagtaacagttccagttgacaaaataaattgcgtgcctgttttgaattaggccgtgtttagttccctcctattcccaactttccatcacatcatatcatatcaaaaacttttctatacacataaacttttaacttttttaaactcccaactttctttaaactttcaacttttttcaggaactaaacacacccttaatagtgaaactggtgagaaaaacaatttaattaattaaagctatctgtcctagctagctagctaggcatgcaattgccaagaggatatatatttgcatgtagttgtcgacatgtccacgttagagacggttagaattaacgatagatgtttatctgacatggacaataatctctgaatttagccaggccaatcttgatcgtaattaactgtcctactgtagcatatctggatatgtacaatatattgtgctgtgatgtgtgttctcgtgttatgtaattaattatgtgatggccatggcaaagctatttatatgccaaactatcactactacacaaacgattttcctgtaaaaggagctatttagattacagacggacgcggaacataactggttacgtctgcaaaaatcatcctcctatttatatgtgcagacccttaagaggactacacgaaaaaaatcgatttttgcaggcgggcctattaagggtccgcacacaaaaataaggctagttttgtaggtgaacccctcttaaggggtcgcatacgaaaattgattttcacatgcgggtctcttaagacgtccacacgtgaaaatactctccctcctcagacatcttttccctctcaaccacttcaaaaatttcatcttatcctctctctccatctctcttacctcctcatgcttattctcatttctccctgtcactcactctctcgtctctcgtctttcactcacgggtggcggcagcgcggcctcgtgcttccccggcggcgggcggcggcagcccggcctcaccctccccggctgcggcgcccctcgctcacctggatctggaggtggcgcccctctcccgcctagatcctgctgtgggtggcggcaacacgactgggagcgatggcgggctcgggagccggccgcggcgaaggcaggctcaagagcggcggcagcgggagcggcgatgatgaccacgaggagcacggcataagcacccgcacgaaaaaatcggatttttacataccctacggtgcagacatatgagagatccgcaagcgaaaaccccttttcgaccgcacggaaaaatcattttctagtactgtatattaacattatagctttgttcaatgaacagaatataatcaatccaatttactttcacctttaaattttaatataaaccaggatatgtttgttttgtattaaaaaatcaagctattttacctataattttgtgataagatcacttttagtttactgaggttttatattaatgtttctatatgttacttattatgcggttgccagttagtaataaattttaaatcaattaatattgttatatgttgtttttcgccattgatgtgatgcaaatgatgaagcacatattaagacaattttttcttgtgtttttttttctggtagtagaattataatcttctttttttctcatatctagtggaccttgtcaatttgtattactacctcactcaactatagataatagaattaaggaggttaattgttcttactggtaggagaaatcataaactagtggcatagatcatatttattggcgataacactggtagtaaaatactactactccgtttcatattataagtcgcttttatttttttctaatcaaacttctttagttttaaccaaatttatagaaaaattagcaacatctaccaaaccaattaaattagtatgattaaatataacattaaatatatattgaaagtatatttattttgtgttgaaaatattactatatttttctgtaaaattggtcaaactaaaaaatattactatattttatactaatataaaatagatgcagtaacagtaacgggcgccataaaggacacgttaaaaattatctggagtacagcttttcactctatattgttcatttgttttgacaaaacttgaatttgttaagtggacctattgttatatatgctggaggtgtacgtacgtacgtaccaaattaaaactagccgcatgcatgtacaattattgtactagctagccatccaattatttcaagagacaggtgatactttctcttgtcaactttcgaagaaaaaaaagtaatcgagctgtccaattattgtgtataacgagccagtacaacgacatctaaaacacgcattagtagctgcaacaatataattaacagcagcaacgatgacgacggcatacaagaattcatgaaatcttataggtagataatatatagttgcctacttaacaaaagaacatatatggcttatactaaatctcacaatttaaattagacgcatgcatgatattaatatattacaatataattgacattttggatatcaaattaacagcaaatattgtacgttcttccttgagccatcctcgatctcccttgcgtgtaagcatggtggtgcatattgccacaaagccgtcgacatcggaattgcgaggaaaatttgtatcgactttatccatgtcaaagagaaagttggtcaaaaacatgtagatttggagtgttgcgccagtcttcaaactggatgatttgtatatatatggatggcctcatgttaaatctagaaaaggttaatcacggttagttaattaattgccttgattaatatttaaagtatatattgaacgattgatggattcctggattggtatgctacgactcctgacttgttttctttcataaagaaaaaataaaactagcttgctactcaacggaaaccgaatatgttgacctccaacaggcaaagattagctatacctatatatatatatatatatatatagtcaagtagtaagaatcaagcacgtcgaataataattgttgtgtataaaaatggttatttatttttaatagacggatctatcgaatattaattagttgctgctaatggagctatgatatatcatacaattaattcatgcatgagtttactttcagtccacaaatcaatcggtgatggtcgtttcccaatttatatatgcatatatatatacacgaatcaaggaatcaaagttcagaattcgtttaatgtcgtcgtaccagaacgacgactcatattaattccaactcaactatgggaatcgaagcgtgaatttcggtgcgacagcaacgagcttcatgttgcgatgatctcattatcactagtacgataacgatttttccgtgcagccgaaagcgattttcaggtgtggatcttccacccgtctgaaacaaagtgtctgagaaaatccaatttttttcgtgcagttgacacacccgcacacgaaaatcacgtgcacgagaaaataaaaaatcaaaaaaaagaaaatcaaaagacgccctggaaggctggaaccctaatccaactaccgccgccgttgccagccagcacgaggcccgccgccgtcatccccgcagtcgcccacgacggatccaaacgcccgaggctgggagaccactgctgccaccgccgtcgtcatcgccgccctgcctgaggcccgcgccatcgtccccacggtcgccagcgacagatctgcccttcccgcggcgcggtgaccggtgacggatccgcccttcccgtagtggcaggcgacggacctgccctccccgcggtggccggtgacagatccgccctccccacggtggcagacgacggatccgctccgccgccaccaccctagccgatgccgccaccatcaatgccgccaccgctctcaccgatgctgccgccaccgccgccctagccgaggctgccaccatcgccgggagtgggtagagggggagagggaggagggagagggctggagagtgagagggagatgggaggagtaggaggagagatgggaggatgagagggagagggagagggagtgggagtggccgagtgggaggatgggaggagatctagtggcatcaggagctaaaaaggtgggtgggctatttttgcatgctgatcacttaacaggtccgcacgcgaaaataggctctgttaagaggctcgtctgcgaaaattgatttttctgtgtggtcattttaaagagtcgcatgcgaaaatagagcacgatttttacagatgtgaccacttatagttcgtctgcaatctaatgtgggtcccgtacaggaaaatcattttttactagtgtgtgatctaaacaaattaaatatcatcatgatcaatctatccttaatttacttaatgtagtcactaatacttggctttgagtttttagattgaatacacaaaagttcgtccagttattattatattacaacggaataaaaacaaacctacatgtgcttagtctcttgagggctccaaattttgcacatggtactctgagaagaaaaagatcttcattttttttttactgtggttttggttaaagttgtaacggtatataatggctcgaaatatatattagagctgttacatttgtatgagaaatgttcttatttatatctatgtaaatcgaacatttcaagaaactcgagttattcagaaaaataaacagtgcatatgtttggccttccatccaaatggaccaaatcatgacggtttagactaaaagaagagttacacaatttataatatactaattgtttttttaaaaaaaaattgcagctgaattataagaaatcataagagtagctaggttgatgggtacagcttaatattttttactatttaatttcagaattattacaactttcatttattaatgttgaatttaaaaaatatccatacctctattaattgaaaaagaaataatagataattaacaaatacaacaatccatctaccgggactccatgcatgcccttttatcatgtacttcattggattattgtaaccgattattttcccctcatctataaaaatagtatgttttctcataaaatatttcgggtcccttgttctaaactatttgtttagtttatttattcatgtatttaatttattcttataatcgtgtagataatctattacaataatgtagttaataatctgttttaaagtgtcctgaattgtagtggtttataacatctagaagaagcatgcacgtcatctgttattctctgtagctcatatttataatatgcaaagctatagataactacacaaattaaggtcaattgagatgacttattggtgtgtcgtcccctacaaggatatgatcttcatctctagctaaaccttgcgtgtgaaaaagcttgactagccatcgagcttaatttcattaatcaactagctagggctgactaatgagatgattgattatccatccatcctaaaatataagtgattttagatgatgtaatgtaacacatcctagtagtactatgaatctgtacaggagtctgtccagattcattaagtactaagacgtgttcctgtctaaatttataggactagtacatgttacatccacctaaaatatgtctagtacatgttacatccacctaaaatatatcacctaaaatatatctattatattttggtacagagggagtatacacctggaaatgagcccgtcacttcattatctcactatcgtacggctgcaggattgagattagctactaattccaaaagaagtccacaagcttgctagcctagcttgattttctctttgggagtatactagtaattaactactacaaatttcaccatttcacactgctatccggttaatttgacgcacgtttcgcacgtgtcgtcaacggtctctcagctgactagcgtttcgtacgtacggtcgttaattaggtaaagcgggtagagattagtttaaggggttaattacgcatcgggaacagtgccaatgatacttttgtcaataatagagcaagtttaatagtatagcctactactagctttaattcatctatagtcaatctaaaagccaattcatataataattgcttactatactattagtatatggtcccacatatcatacacacattacgtcttagagtttgtggtacagctggctacagatctgttgcccgctactcatctctctcatcttttatctcattaaaatatgcttatagctgactaatatagtctgctactgtacctgctctaagcagggtaagtggcacatgtattgatagcttacttaatcattgttgggtcagtggtcacttaattacttactccatccaaaaagaaagttacaccttcgtcccaaaataaatttatttttcacacattctatacatgtcaatataaaataaaaggattagaataccctcactttatcaaatccaaatacaattattctctcctttatatactcttaatgtatttatctcctacttttactgtgaaatcattgtcatgattaatatttgtgatgaacaattggctatgcaaatgatttaatcaaagaattggtttgagagtttgtgtgaatgttggtgtgagtgcgtgtgactaatgtgggtcaggttgtgatatctgtgcccagaaacggttgttttgtctaattgtgtgcaggtgacttgaggtcagccttggtcaatggtgaagaccgggactatgctcagggaggagcagaggtctattgcggtctggataccatgtgagaaggtgagtagagtctggattcttggaggtcaagttcggtcaacggtggggatcgggactaaactcaggaaggagttgaggtccagacggtaaagtataccgggtgacgaagttggatacaagatggcatacggtggatggacatcgtgtgggagagatctttgcaacgggcttcacgaggtgtgcgtgcaagtgccagtgtttgcgaagggaattgtaaagttggagtagtatatggtgctacagtacacgaggtactgtagcgtgcaggtatgcatacatgtacgttgctgtacatgtatgtgtgatcgatacatgcatggtgaagcatgtatgtgtgcatgattggttggccgagcagcaggagagcgcctcggtgggcttcggtggctgttggcggcatgccaagtcggcccaggagaagcaagggcccagctggcagcgagtcggagacggtcacgcgtggacgtcagcttgggagcgaatccgttttggatttctggtgcggccggttgtttgctgcacgtttggaaattgtaaaacgtatggaaactgaaggatggagtcctattgtgtataagagttctacacctattttgagtaggggtttttgtggtataaatagagagggagcgtgaggcttcctgtatcgctttagagagcaatagagttgagttttggtttagggtttcgagtttagtcgaaatttttgtaaggagtgctgttgttgcactttgtaaacacagagagaagtaataaagtcgtcatccactttaagagttcttcgatttgtgtttcaccgggtttcggcggtctaaccggcaactcaccggtggtcagaccggcggcattgcggcggtcagaccggcgggagcgaggcggtcagaccggctgcagcggcaggtgcggcaggcgacttcggcaatcagaccggagattcaacaccggtcagaccggcggcatccactcggtcagaccggcagatcaatctcggtcagaccgacttccgtcgatttcgagggtaacttttatttccgctaaaagttttcggtttttgggtataggtttttgggtataccaaccattcacccccctctggttggcttagttcttgtaattcgatcctacatttaccaactacaatacaatgattactcaaaattgaacttgttttaggacgaataagagaagctaaaaatgaacttattccacattctgtagaagtatatattgtctagcaaatattaaggtttggaaaaaattaataataccctaactaaatttgaattactactaactataaggtagatagagataccttctttccttaaaaaaaactttaatcactttcgtcaaaaaaaaatcacctttctatgatacacttaattaatcacatgatcaatccatttagaaaaataaaactgatagctgctcaccagttaattagtgcttgctggtagccagtcgttattcttgttttaaggggaaactaaatgggatgcccaaacgatctcggacgtcgattctcccctaatctcaatcttggttgcgtccatttcaccatttcaaccaattagtcggtttccttacccgagagaaaacactaaattagattataattaattaagtattaaccttaataaacttaaaaataaacttatttaaacttttgaaggaacttttatatatatagctttttttcataaaaatcatcccgattagtggcttgggaaacgtccccgtggcgtcaattttgatgccttatataagatacttggttcaatcttttgagagatttatagaggtcactgagaatggaagctacgtacctttcttcttctctatctttttgttaggaacaagtaactgcgatttaattatgttcagaatattaattaaatttggtcctacgtcgttttgaggctaattctatcgagctgatcgttgcagtaactcattatttctttgcagctggagctgggtcggatcagtgagatgttgagctcttttgttttatatacatgtcttttaactcatctacttgctccttgttaattaactgatcaaatagaggattatgtcaatgtcattagtcatcacctgcctgattaggacattatacagtagttatatattgataacatacagatgttacaaagctagatatgcaccttttgatcgcctgcccattattctgtcaacttgttcatcatggtgtgttctatgtgtagtgacagtataactgccaaattacagtaatctaacgaatcaaacaaggtatccagtaggtagaaataaacacatcaaaggcacctgtgtgtcgccttcctagattttgctttcgtcaaacatgtatgttagttttgtcactgacaaaatatatcataatatgcttaataaaactacaaatccattttggcaccggttgcaactgtatgatatgaatttacaagctctgattaaaataaatcaatacaccaaacttctttttttataataaggctggggcattggagattgaactttggaagtagtacggaagtttcagagatattgcatcataggacgacaaagagaagtggaaccttttgctttgcagaagttatttcacatatataagtcataacgaactttggctaaaaaaggaggaagaaacatgacgagatgtcaaaggtgtgatcatgtagttgtcaaattaaatgtgtatgtcaacattttgtttctttttgaagtggaaatgtatggatccacttgatgagaccacgaataattcgtggaaaatatataaagatccaggacggcaaaatttccgtgctaaaattattttggaaatgtgggtatggaaatggatggttctaattgtattcattagttccaagaggaatttcattttcattagttccaagaggaatttcattttcatgtcggtagattggacggttcagatcagaaacctcactttctaaaatattattcccacctttgggccttttcatggtcaaattcgttagaaagagatatttctctgttcaatttttgtcaatttgactatgataaacgtcaggacacgccagtatttcttccggtgttatatatgtccacaaagttattcattttcagaaatgttgaaaccagcaaattttttttaattggagagtaacaaacaaattattcatttgagtgtcattctattccattatctaaaaaaatttgagtgtcggttcttcacaaaaagaaattcaatgaaaatgatacaaacagaagtctgcatcaaattagatatgaacaaaaatatcaaaatcatcggatacatcatagcctacttttgtttattacagaaaatcccgaaaattgttgtaaaaactgctgccatattaggtctatgccaagcagagctttttcatgcctgcccactaagccactatatgtttcaaaagtttgagacaagaagattaaagaggagaagcttgacaagtgctatgttgcatcattcataggacgacaaactgaagtaagtctcctttcctctctgatttcttaagtaaaatttggggtaaattaagcagatatgggcaaacagatataatgcttcagctccaaatagatgcccgcattttcggcacagccttttatctttttcctgacttcacactttagtggaatttacaaacttaaattagaaaatacttctgcatacccaatcatggacttctcaatttgagttgcgaaaaaaaaaataaattccgtgtctttactagccagattacaactgggatgtgtgttggtaattcttctaatattttgtaccactgtttttttccccttcttattccatgtaccacggcacgttaacaaattaacaaaaatgtgaagttagaagatatatatcgtctttaaaaaactcagtgaaaatgatatcaacagttgatggtctacgtcatgcaagagcttagtttaatagacaggttgcatatgaaacaaattaaaagctttggaacagcagtaatggcagataatgatccaaggaacaaattggacatttgatatatatattttttaatttcgcacacctgtattgttttccaaatacaactaggctcttgatcaggcttgccagaatatataaaggataatgacaaagatcaccaaccgtctctgtcctgcactgtactatcctacaccctatatctagctagccaaacagaaataagttcattgtgttagctgagaaacacaaaaactaggtttaaaactaacatgctatcttaagtttttcaaattaacctagttatttgaacactaaacaaccaaaagaacggggtgtattaccggcactagagaagtaccaaaagataatttgtggtatctgctgtgccatttttaaaggcataaaaaggctaaaattaatattctctcaatcccaaaataaatacatttatagtttttccctaattaaaaccatcctaaatttaactaaaaagagaagattattaatatttatagtgcctaataagtagactataaaaataatttcataacagatttaatgatgctcatctgatatcaattatttttatttttccattggattggtcaaacttaagatggttgacttagcatagaaccagaaataaacttatttcaggatggacaaagccaacaagtagttgatgaaaccataattttttgtgtaacatctgaaccgtagtctataaatcacctgcacccaaattccaaatccaaaccacaaactctcttttgttgtgaaatactccctccattccaaattgatctacatatttcataggtacaccaagacaaaaaaaaactaataactctctcatactatatttattatagcaacaaactcgatacatgcaccattcccactatttcttagccaatagcaaatcaagatattgcatatgggttataaatacttgtgtgcatgcatcaatgtccatttactccaatgcacaaataacgaatagacttaatgaataaacacaaatatgtagatcatttaagaataaaaaaaaatatgtagatcaatttgaaatgaagggagtagtttttatgtgtccattcttcaaaccccccccccccccgggtcattctgcttaggacatctcccacaaatacagtaacagcatgtgtttgagatttcagttcaaaatttccgaaattttggacccaccggcacgaaactattgttcccgaaaatttcatgcttttgtggaatttagaaaagaaattattaaattcagtcaaaatttattcaattttcaaataatttcgttccgggaattcggtcgcctgataccaaagttgtaaaccctggtaacaacatcacaaaaggtcgctgacgtaacgctcgagtcaagaacacaacagcaatcacttgtacaaaaaccgcaagaggcaattgaattcacacgaaagagataagcatgctgtcactgacgacgatgctaacgtactgtaatctactgctgattttgctcgacagtaaaacagcttgatcgatcacagtttcagagaatacccacttgtcgcaaaccatgggcgcatacgatcgatcgtttgacgcctgtcgccaacacggctgacgaagcaaatttgttgatgtcgctgtcggattcagaggtcatgttttcagttatgcatcatcttcagtttgttcttcagcttattcgatcgatatctcatatctgtaaagtgtggtcggtgacctttattttttttctccccatatccgttccttctgaaatcagaagctttctccgtctgaattgcaacattcttctggattaatttgtgctgtaagaacatgttttggtgtctgaactctgaactctgaaacctgaagctttcaaagaggattcggcttagccgtcatctagtcgtaaacgcgtcccagcatgcttgtgaaaagacttgctggttgaaatgttttgtcccttgttgacatgataaggaaagatcaaaggtttgtcctgtatgttctgttcaaagtgtgctcccaacatgtttccaaagaagccaagccaactctaacagattgtctacaggactgtttccaattctttttctgtttttttccaaaaagaaaattttgtttcaagataacaccataggaaatggaagaagtcctagtttcctgtcttgagaattttcaagatgtataattcatgcagcaggagtgttataactatttacagtgccatagctcattgtcgttgtggaggataaaaatataaattctgcataattagttcccaattattttaccattcactgattcacaggtcatcttgtttccacatgacaccaagaagagagagagagagagagagagagagagagagagaaaagttggaagaatgttaggtgaaaaaccaggcagtgttaaaagttgtccatatttgtgaagaagccttcaattcttgggtccaagtagctacatagaggcatgtggcactaccacccctgaaatggcagatctctgtccaaatctgaagagttttgactcaattttgatttggtttcatctttgcatgcatgcatacatccatcatccattccatgcagccatattggtggttggtgaggaaaaaggagagaaatttctcacaccctcctactgctttgattggattcctttcttgtaaactgcctgagtcattgagtcagtatcagatcaattgggtttcttcttttagtctgaatttggggcatgtcaatattaattataagatttcttgaccttaggatctgagctgctaggcctagtatgatagcaatgttgaccatcactctggtttccctctcaagataatgacttgtatattttgtttttgttctttttgacctatgatattcagggttaagtagggtgcagttagctggtagtaaaattttccaactaggggttatgtttggtatggagcatatactgaagagatagaatagtaggtgaatgattgatttgcaatgccccaatcaatttaccaaaccaattttgagttgatcaaactgatttggtagtagtacatgtgcacttatgcatggacaaatccacttcaaatttcaactggaggagagtttgaccaagaactgttgtttaacaagctagctactacaagtgtgatttctcaacaaagttctcaaggtacctaatacctgaaggtactaagttttatactaaaaaatatgatacctcctaataccttctcatgaatgttaaaattacctttttttccctagggttttgcttttgatagagatagtatataagaaaaagaaaagaaatgatgtttgaactcttgaaaagaatggtaattgaagttcagaaaatggaagaccaaatatgcagttggtccatgtgctattattgtaaccatccaaagtgcttctaaacgtataaaattaatgcaataatgaacactcgatgaaattgtttgtttgaattttgtaagttttcatcaatcacgtggtaaaattcaatcttggtaagatgcggcgatctgtacctaggcctaggagagcattagttattcacacacatgcctgacttgaacaatcttctaaaaacacacgcactatcactacgagtgttggttccagctggttcgtgacagcagcggagcagaagaagagagctttctccgtgttgcaggtcagaaattcagagatgttgcggctgtagaagggcaaagatttcaatcttggcagctttgattttctcctcttttcgctgcatatctttgcgtcctggcacaacgggttttcacctgtaagttctgacagctgatgcagagtttggtgaagttccactgatatttagtcttgtgacaagtggaaggcaaatcatgttcatgagatcacctgaaaatgccctgcagagctgcttctgctcaatttggaagttcttcagagaatgagaattcaaccaaatcttgcaactgaatgtttggtccaaaaagaaaagttttgcatgcataggataccagatgaagctactgatgaaatcatgaaacctgatctgaataatcatttccttgtattgttcaggtgaagtctcattgtcatagaaaccaaaaggcagatggctgtaagccctgcaagaatctttggttggctatcagatgcagcagcctaagtagttatcacacaaactaaacctaatataatcggatttatttcggttcttgtgaagaaaatgctcacgcatgcacctaccgaaaagggcgtgtgccacagtacttagacacaaaactaaactgaaagtctgaaaaccagtttagtttggtcatggccaacgacgactctgactctgacaaccgcttgcatacgcactctgaaaccgtgtgttttgtttatgcggcaaattgctgacctgaccaaatcctcttgtcgcatttgggagttctcactgatttggttatgcactagtggttaattagttcgctcaaatatgtatttccttttttttactgcttaaatgagtagcatgggatgttcagtgaagttaatttattagagaggttattcctgacaggttaattagattaaattgtgaaaattccatggaagacgttggccttgtggttgatgagaatcaaaatccaatctttgcccatctaacacctactacctgcttctttcattttctcgcctttgttaattagtgttcaccgaagataaacaactaggtatttggtgttgatagggcatatacacactactttttgcaagaatacattgtttaggagtttgaaaaacgtaaaaataaaaattcaaaatgaggaattagaaaagaacaaaaccttaataaaaaataaagaaatttgagttaggacacaactaaaacttgtaaactacttacaacaatgtggaacggagataatatattatgagtatggttacaattttacttatgacaaactcgatttgagaaaaagaactcggccattttacactctactagaagcaacgtcgtctacctaagaattgctcttgtgagttgggccattgtttggtaggtcaggcttaacactagctattctgtaacgggataacgagtataggcccagttgtttttgccagactatctaaccaggatttgggctttccagacatgcatgtacaacccaacttttgttagatggggcatgtacacacttaggccggcggaaggctaccgatcaaagtagccttccgccggggtaagtgtgcacgtgccacagctggtgtcgctgggccgggcgccgttccaccacggcgtcgaggcggtgggacacacgcacggggccgccgcgcgacgagttcgccccttccgtgacggatcagctcgccgaggcgcgggcgtccagttcgatcgacctcaccgcgacggccaggccagcctccaggccgaggcacgccggcgccgggaacgatcgaggtcgcggcgtccggttggcggccgacgtgggcctactctctcggcggcggatttaggaaagattgcttagttcgtgaccgacatagattcggtgtatgcgtgctccacgatttaaaagaaagaccaacacccggtgaaatcgcaccaacagaatccgagacacgaacacgatgaacgccaccgttgcatcaccgtcggagcccgccgccgccgtcaccgtcgcatcgctagacgagctccgcgaggtggccgaggatgatccccgcgcgtcggaggacggggggctgcgcgtggcggtcaccggcgtccccgtcagccaggcggaggagctgcacgcgctcgtccgcgaccacgtcgaggcgaagctctggagcgtcggcgtcggcgacgaggccgacgccgccatggcggcgctcaggtccgcggccgacggcgccgcccgcctcgtggggctgagccgcgcgctggacgccgtcgcggccggacacggaggacggagccccggcgccggccacggtgccccgcgtcacgctgctgagggagcaattgttgccattgacctcctcccatcggcgtcaatccactatcgcgcgaagccacgtcatcagcctccctcactcattctcctctatcgccaacgtgcacatgcagatctcaattgaacgtcttccttaccagcagccgtaattggaaaaaaaaatagaactgacacgtgggtcctacgtttataggtattttggtctatatgatgacgaaaaatataacgatgataatatgatttgtagatattcggatgacaagtgtacaaatagatgaattgtagtaacatttatctgaatcagcatatttgcaataacatggatccaattaaacaaaaattgggttacacattacgttacgatgaattggagtaatatctggcttcccaacttgagacctcgaggatgtggataacaatgggaggatcctcgaacgggatagtcatccccaacagggcagcgatccgtgccctcgtcttctccgccgtccgccggaagtaggccatcgagtactccagcgactccggcgacgtccatctgtcgccggagtaccgatagtagctcagcgcctccgcctgcctccctatgtccaccgcctcgacgacagcaacgacgtacttgcgcgggaggaacggcggcggccgttgggtggacacgtcgcgggccagctccgtcagcagcgtgatgcggggccccgtggccggcaccgggacgccgtcctccgtgtccctcacgacggcgtccagcgcgcggctcagctccacgaggcgggcggcgccgtcggcagcggacctgagcgccgccatggcgtcgacctcgccgacgacgctccagagcttcgcctcgacatggtcgcggacgagcgcgtgcagctcctccgcctggctgacggggacgccggtgaccgccacgcgcaggcccccgtcctcctccgacgcgcggggatcatgctcggccacctcgcggagctcgtccagcgatgcgacggtgacggtggcggctggctccgacggtgatgcaacggtggcgttcatcgtgttcgtgtctcggattctgttactgcgatttcacctggtgttggtctttcttttttaaatcgtggagcacactccgaatccgagtatatgtccctctttttcttttttttctttgacctaacaacaaaccgtctcggttcatccccgaaaaatcctgaaatatctcgccatcaaacgaaaccgtccgcgtcaagatggatctggaccaaccccagacgatgcccacctccgg

SEQ ID NO: 8913 - DNA, 4354 bp, Oryza sativa
aatattagttttgaagatcatttcaagtttgaccatatcttatattatgtttcaattttaatttttaaaatatttatcattattattttattatattgggattagatgttacgtgactgaatcttatcttatatagtgaaagcagcaagccttcttatacgaggatgtgctatatcatcaaaaatatgttagccgtctgataaagagcttggataaataatggtctttggatcgaagagagcatgtattaaaaaaaatcataaatgggctaaatatatggaattttttttggaggtttctggcatctcctactaaacatatgatacatacaaaaagaaaggaaataaagagaagaaagatgatgcttctagtgattcctcttataaacatatactccatcagttttacaatgtaagactttctagcattgctcacatttatttagatgttaatgaatctaaacatatatatgtgcctagattcattaacctctatatgaatgtgggcaatgctagaaagtcttataacctgaaacggaggtattagtagctatatttatagttggctagaacaatagatacttcataaacaaattaactttttatcaaaaccttattaagagctaaggtaaactaatagaccatatacaataaacaggatcaaaagtcgcgcaaaacgcgattatgtggttagtttttagtgaattttgtcaccccttgagtgggaattcaatggttctctttactccttcctattgattattaataaaagagtaaattttagataaccccaaatatacaaaactaatgggttttggcacgtgatacataacccctagctattataactataaagtttcacaaaccacattattaattattttatctaatttataagttatttattcatcatataaatattatatctaatcgtgtatataaagctttttaaaatttcaaaacaagagtatatcaatttagttaacggtgtgaattagtaaaacttcaaccacaatggttgtgattatgtttctcgtgccaaatctgttcgctcatatcataatagatatgaaatttactcattttattataaggttttcgtggttttgaactcctgatgtactaatgggttccaccgtatataagatccaatggcgttgatattcgtgatcaagatctgacggtgatggatgcattgtaagtttgtaactacacaaaatttatttccaggtggcgtctcctcattggccagcttatggcgcgcaacggggaagaaaccgacttcctttcccgcgcttttagccgttgccccccaatcccaccgctactttaacggagggggaattaatcaatagcgctcaaatttacatctcaccccctaaaaaaacatataataacaccgaaagcatcaaacgatctgcacagcgcaacggacaacggcagttttccctaaaaccccctccagacaaataaattcgcactcctgcccttcttccttctctctcttcctccacctcctcctcgatccccaaatcccccaaaccctagctcgccggagcagtggagggcctcgccgccgtgctgcctcttggcccctccgtgtgatgccactgagtgcgcgtgggtgggtgtgcgtgttgtagctctttcatggcgtcgcagcctcccgccgccgtggaggctcgtctcgcggatctctgcaaggtgaggtggtggttagatctttggttggccgctggtgggaatcgtcgagcgtttgaggtctcatggttcgatgggttttggtgcaggagctgggagtggacgagggcgtcgccggcgaggccgcggcggtgctggaggaggggaagggcgcgctcctcgcgtcgccgtcgttcgggagcaaatcggtgagggctgctctgtcttttgcggcgaatttgaggctatcttttgtcccccccccctaaagtttggattcttgcagcccgaggatgctgagaagctgtgcttcgcgttcgtgctgtactgcgtctccaagctgaaggagaccaaggcgggttcctccggcgttaggctctgggagatcttgaagggttgcaagctcaagtgggtcatgctatgttataatggtttttgaactgtagtctagcaagttttagggccttgttgacactggattgttttttttttttttttacctttgtttggtgtgcaggtatgatgatttcttcaaggaatcacagcggcttgcttcaaggatcgaccaggttttgggaagccgttatgggtcagattgggaagctcggctagaggtgggttcacgccaagcccccgcattgaacagattcacatttttctttttcagatgtgcataacctgtttgttttcttcattgttgtttcaattgtgattccagctgaagcaattggagaatttagtaaatctattggcagatgcaagccggtaagcaacatatgtgccttgtacctgattgcagttttataacagaaccgttcttttgcatggggatttgaagctcacgagtttattagaattttgccacaaattacaactgatacataggttcatattgttgagatttgtttgtttgctttatatggtagtgcaaaatttacccacaatttcacaatatcctaggttctattgcaaagcatttaatgagctattcttgagcccaagtactgatcaggagcctggatcaactacaaatattcctgattatatccgttttgggtggctgctcttcttaattcttcgctcaaaatcacccgaactgtttaaggacctggtatcctgcatccatggactagttgccatattggtgagtttgcttttctctttattccgtttcattatttttatcctttagctatgcaatcttgtacttgtggttaactggctacttcaaccaccactagcccttgtgctttctggagctaacttgtcaaaaaaatgattcattacaggccatacttttaattcacgtacctgctaaatttaggagcttcacaattgaaggttcttctcacttaagtaatatttctcaactttattccaaattatttctttaactgtcttactttatttggcatctgcacagattataattacagtccttttgtttaatttcagtcaaacaaactgagaaaggcgtggatcttcttccatcgttatgtcacaactatcatacctctgaagaccgcttgaaagaaatgatgggaaaatcttacaaagtgatagaggtcttttttagcaggaaagcaataaatgcttcagagttcaaaacagtgaatttggataaaatagatacaggcatgacctcaaacacccgtgttctctctcatgtgttcctgcatgcatgctctgtcttacattcaattatctaagtcttgtttcattgttatggtggtagatggcctgatgtatttcaaagatcttgtcgatgatgagatttttcagtcaaatttggaaaaactggagaagctaagtagtaccaccggctgccaaggggagcttgatttggaaatgtttttgaccagcaatgactatgtactcaatgctgaaaactcttctggtagttccgctaattttggctgctcaaaggtatctgtgatgattcataatctttttagttaactacacattgttttctttttttacattacagattcccttttctctttttgcagcgtgtgtttgaaacactagcctctcctacaaagacaataaagaatatgttggctgcccctagttccccttcatcacctgccaatgggggctcaatcaagattgtgcagatgacaccagttacttctgccatgacaactgctaagtggctacgtgatgtgatatcttcattgcccgataaaccttcctctaagcttgaagagttcctttcgtcctgcgatacggatttgacaagtgatgtagtaaaaagggtcagcataattttggaagctatttttccaaccaagtctatagatcggggtacttccataggcctcaattgtgcaaacgcatttgatattccatgggcagaagcaagaaaaatggaggcttccaagttgtattatagggtgctggaggcaatctgcagagcagagtcacagaacaataatgtaaataatttaaccccattgttgtcaaatgaacgttttcatcgatgcttgattgcatgttcagctgagctagtattggcaacacataagacagtcatcatgatgtttcctgctgtcctggagagtactggtttaactgcatttgatttgagcaaaataattgagaactttgtgagacatgaagaaacccttccaagagaattgaaaaggcatttaaattcattagaagaacag

SEQ ID NO: 8914 - DNA, 9685 bp, Oryza sativa
ccaggtactatcgctatctacaattgcacatacgtgtattatccggattttttttcttctccaaaaccaacacaatgcccttagatattagttctccagatccaacaaatttgtgctgctcttgtatagctggatttgggacttcatttgatttggggttgatatgcggttatgttttttaaatttgagtgggaatttttgttttggtttaatcagaggatggaggataatatgatgtacccaatcaaggaccaagaaaccatgctgtgagttggccaatctctgttctcctgcaattacattttcctttttgcagtagatcttgcttccaattgattttgcagggcagtaccaatggacatgaacaggcagcagcaggatacagtttgctccaaggaaattttgcagcaccaaatcagtattatactggctagcatctcttgtttatttgcattctgatgtttttttttatcctgtgggacagattgatctgggctacgatcgaatgccacaatatatgtcaggcatgtaacacaggggagtgcagaaatcctgttattttcactcaatctggtaatctgctctaattcttttgctattctttgccttggccatgtactggattgaaattgaagatatttatttgagcatatatattatttttgttcagggttacaggattgaaattcaagtatacaagattgcatataactgaaggattggagtggtcaatgtctagcattcaagcgtgcaagacctactgagctgtgtcaccattgcattgcatctgatctaagttggcgctcttggtttaaattgttgagtggtgtcaatgctaaacttttatgccgaataagagttaagaatcttttaccaactttttacgctggggcacttcttggatgccctaatcttatattcgtttagtgccttgaatgaaaactagagcaatgctaggcttagtttgttgcgtgatgtagtagatggagatgtgtttatagcacggaaataataaaatcattttccatatgttctctattaaggaaatattaattctactatttatatattttgcctatatttatattcctgaatatataatttataatttaagggcaatggtaagttatatatgatatatgtatctctataccacccatcagtcatcatgtatacttagatacacatatttgatccgcattactaaccattaccgtagcgttagcacgggcaaattacttgttaaataagacaagtctatgttgatccaactagtggaaatcaaacatgcaaacctttgcactcctctcatcctggaacactaaccgtacttattttcctgatgcaactaattgcaattataagttatatataacccacgaattacattgctaccggcacgatggctgaatattgttgcaagtttgcaaccacagagcaaagatccccaagcaaacaaatccaaatccgacgaactactcgagcacgatatgaaagccttttggctgtccaagcggggttacggaggacggcgagcggcgctgggcggaggaaaagggagagagatagttgcagtggcgtcgccggcggtgggtcgggaggaagagaaaggcgaggccggtgttgggggggcgggggggggtgacgaaacgggtttggcaccggcactgtgcgggttgattttgttttgaatattaatgactttaggatccatacttattataaattatctagttctaaaataaatgtttgaaattcatttttaatagttaatttatagttaattcattcgtttgcatcttcgaatagttttttcgcgaacgcatcttccaatagttattacaaattcacttagcaaataaataaataaataaataaacagactacacagatgaataatataagtagttagcagacgatatatgcccttccctctacttctctcttccacattgaatcttacatggtgttcacaagaggtcagtacagttcgcaattttaccatgcaaatttgtacagtttaacaaaaacaagacttcatcttcattcttataaatgcatatccagtttatctgcattatggtacaggaatcccactttgttgcactaaactaaactatcatcatcatctggttggacaaaaaaacatgtcgaacaaaatatgtcaattcactggctaacactttctttatcaaacaccatgatttatggtaattaaatgggtcagtgcatgacatcacatatatacatgcagtcgaaaaaaatatatggagactttgggggttctgttaaaaatcctgtaagatatttgaaggcaacttattatgtcaggaagaattttaaccgagtttttcaaggcttccagtttgtttgaactgtcatgctgagtccaagttgatggatttactatcaatcagccattgctatctaacataattttcactagctcttcattccaccaactatcttcctgcaaaagccgggatgagatttcagatatgaaaagagtcattaaaaaggtaaaaacaagattatcatgaagtactgaagtactcaaatgttaccagttcgtgtataggttagtccatcaatgccaacaccttgctgttcgtataacaagaacagccataacaatcaagaactatccgttgctgactatcaagatagccgagactgccttctcacaaattgtatcatgttctcacgtataagctgcgggcaaaaccttcatttttcacaaacaagttctagtacttcacaagtgctggtattacagcatagcagtctgctaagcaatgaaaaagccaattcaggagtagagtgtccggcagattgacaagtagttcaccctacaaaaatgtaaatttttgaaaataaaattaatattcacagtatgtccgaagttgaacttttaatgacagaaagctgaaaccccaattcgctttccaatattcatgcttgtatatcctaaaaataacatgtccaatgtgatctttgtgatgcatttcaacaatgaaaaacagtactacatgtagtaataaggatgttagttattatcggtggataaaaaaggacgtgatggtagacaaatctatagttagcttcaagatcactaattaagcagcaaattgctttgccatctaatcaggcttttggaaaatatttgcaaaatatcttttaacaattttgttttcaccaggaaactatggggatactctgatatttaccttaatttcctttccagtgaatgataaggaatttcgatgagtctccaaagacattgcttctctcatgagccgaaataccttcttgttcatgtttgttttcatgatgatcattttgccagatgaatatatcctactgataccaagatctgctgccatccgtcttacatagagctttttcaatagcaactgcaaggaggagaaaggaagacataacgaagtaatcaaacttcaccatcaccaactatggtcacattggcatgatgaaaatctcagaaacagcaaacctccatatcacgaggctcctttccatattgtcgacgaagatcttctgtgaattgtattaaggtccataggtctttctctgcagcttttgcagcttcgttaagcaattccaccggattttcaaggtaacttatgtattcagaggagagacgtgaagaaatgtttatatccagctgtccaaagacacaaagtttgtgaatgaaatcaaaagggcaggttacccagatgaaattattcgtcattgcatgaaaaagctacagcagcaaagacaataaattttgtgcccacctgaacatctttgtaagggacgggaataagacaaaactgatcaacctaaaaagatagaaaatagtcttgtcagaatgatcacagtaaataattaataacgccatgcaacaattcagaaggttatttggctcattaaaggatgtacaaaattaaaaacagaagaactgtatgattgtaccaaatagttggaatattgaaatagtagtatgtggaccaaatgggtaaggactacctgaaattgcctataaaatatcttcgcatgaaacaaagatgataacaatatgcatgccatgaatgagaagcattctcaaataaaacaaatgaggcagtaaaaaaactgggtctagaaggggattacataacaataatcactacttcaagtggcaaacaagaaaaaattgttcaaaacagagttcttttctttaccaagaactagccatcttaaaggcagcaacaaagtagtgaatagatgaatactccctccgtcccataatatagcaacctaggaccggatgtgacacttcatagtacaacgaatttagacaggaagcatgtccggattcgttgtactatgaagtgtcttgtccggtactaggttgctatattataggatggagggagtaaaagatatgtatgatacaaaataaaggatataagaataacaggtgcagaaccaaaaaaaggaagtgaatagttgaataaaagaaaaataatatcatgagcagatatgcgtgattgatgtgtatacctttgacaagctatcaaaaagcatatcaaagaatagatcaatgccaacatttgcaacatctccagattgttgctcaccaaacaagcttccgaaccccctgatacccatatccttctctgcaacatggaaaccttgaccaagatctgaatgctcctcaatagctccaagtctatcctgcagatggagatattgaactacagatgaagaatgacacaacacaatacagattctgaactcatttaacaaaagatatttcaagggataattgccttattgtcatacaaaagaccccttattttttctgtaagatgccctatagaaatgtatcagaaaatcaaacatcaggtgctgtggaagtagtaaaagctacaatttagttcacttcattttgccatggcataaggctagtcatacaagtggtggtcaggactgagggctcaggaagcatcaatacactgaaacctagtaagcataacatacattccaaagtgccaataatagaaatactgcttattaggtgccaccaagactggttaactgatcttatgtacaacaaactatcattaaaggaaatttaggttatatttctgactgggcttccatatttagtattattgcaaatatgctttcagtaacagtcatcagatgatttggatgctgtgacaagaaaatgaatataaataataaaattaggggcactatggtagagctaaccgttgcaatctttgagagcaaagacttatcagtgtagaagaggtatgcgaaaccttctgtgccggatcttcctactctacctcgcaactgtgaaggaaaaacaaaggggtgaacttgtaaaattaggaagatgcattagaaacaacacggataactagggcacatattacttttaagtacgataacagtctcacagaaggctaaacagaggcacaggacagctcatactttttcagttcttcgtagcttattttgtatttataaatgagaaaactccagtaagatgctcaaaaactatttgccaatgggcatagttcaacaatcaatcaaatttatgtgctcacatattatcaaatataaatgctaaataactatgccataatgaggtgcttctagtttgtttgctggacaggtgttttgctgtaccccttcttggattgttgttgttgttttatcactctcttatcaatgaaataagagccttttgcctttgtttaaaacaaaatgccataaaggaaaaggaaagcatatcagaaaaacaaagccacctgatatagctgtgcaagcccaaatagttcagcatactgaactaccatcgtgttggcatttggaatatctattccactttcaatgatgtgtgtgcagaccagaattttgacttctccacaagcaaatttttccatagcaagttgtatgttctttgaaactttctgcgggaaaaagaattggcaagaaatttgattatgacaaaagcaccattcgactatgcaaatagaacataaatcttgattgttaacctaacattattccatatataataactagcaacttaagatatagacttgactgaaattgaaggttgtaagctttacagaaaataaatagtcattgacaatcaaaatcaaaacgaactatcgaagaacaaggtcatcgacaaggcccatatagagtttcctgttaaattagtttgaacactaatcagccatgcaaggaaatcctaacaatgataagagagtttcattggtagaaatccacatgttggactttggctttaacacaatcaagggtatacaaataaaaatagcctacaataaataatagtgaaatagcatactaaacacatctgaaagtttagtcaataaacctttccatgagcaacagccattggaacatctggaagagaatccttgagaaattgcagcacatcatctattgctgtcgcatgatgaaataaattattaaacataaatgcagatttgcaatctaaattattgaatgactttgcatgatattgcagcttctatatggacagtatagattgttagtgaacgcatccagcaataggctaattgttagaacaatctgcaatcgcaagtccaacttgctgagtactaaactgagattgggaatattgagaaaaaaattgttttcaggttcatgcatcacaagtatatgctgtgaacaataagtcatctgaagataacaaagtttccaccttttattcgaggaacaacatagaaaacttgaccaccacgtgccaactcaaacttaatagctgatagagccctttctttgctaaatcctgacacgtaggtccttacagcaactctttctggaggcggcgtagacattaaactgaaatcataatacatatgcttgtgtcatggaaaaaaatgaaaacaattccgagattaaatgcatccaaggtattggagttatgaagaatgaattaaatatagagtcagcagaatagcgctatgatcacattaaatgcacgaattatctcaagaaaacagtagtaactattgcaaatgtaataaaatggctcaagtgaatcccctaaaaaaactctagtgattactcgtaaccattgtccacaaattatctcaagaaaacagtggtaataaattagcaatatctcgtaataaattgtggacaatggttacgagtaataaattagcaatatctcgtccaatatctcgtccaacagaaaacagaagaaaaaaatagtattgttgccatcttacctggcatcacggaaacctgtcaacgcgagatacaaagtacgtggaatgggtgttgcagacagtgtgagaacatcaatagaagccttgtatgatgcaatcttctccttttgttggacaccaaacttctgttgaaacatagagtttgtgaatatatataaaataaaataaaatgcatggctgattttggttgcgagatatttagtcaaaatttatggaacactagagttaagttttcagataaccattcctgacctttagaaaaataacaaaaagtaaacataaaacaatctagtattttttttgtcgaatataatctacaacaaaaaggctttcccttgctatatatatttcttgtagaaaaccttaatatgattaacttgttcttttcatttctggaaaatactacccatattaccatcattgatgttatcaataacagaaaactatacccaaaaaaatcaaacagagtaaacatttatatttacaaattacaaagagaacctgttcttcatccaccactaggagaccaagattgttatatgccatacgttctgtaagaacagcatgagttccaacaataatatgcaaatcaccattccttatctttgttattagctcatctttttcttctttggtctgtaaagcagaaatgtaccccaagtcatgcagaagataagagacgcaaattccatcactttaacagacaaaatttaaagaaatactaatgccttcctatctgagaacctacatgcccacatatgagcactatcactacaaaaattgctgaccagtaagtacaagaatcccttattgaatgtcagaagaaaaggttcgggaaagacaaaagggacttccttaaaaatatatatttgaacagtacttaataacattcagtgaaacatcaaaaggtagaaaacagggtattattaccgattgttgtacaatcggtaatatatataccttttttttctaacaacaacaaaaggcacatcaactttttttcctaatatgggataagatcataagagcagcacactttctagggtcaggactaatacagtaataccttgtagttaagcaattaatgaatataaaatgatttcacagtaacacaaaaatattactactaacacaataatgcttggttgttaatcaattgaggcatacaaaaaatattgcttggaaatgaaaaacacaatgaattgcctggtggggtaactttgagttgtgccatgctatacctgagcaccactaaacatggcaaccttaatatcaggataattggagaaacgctcagacattacatcataatgttgcttggctagtattacagttggagcaagaaccatagcttgaaatccagcagatataacaatgaatatagcacgcattgcaacttcagttttaccaaacccaacatctccacaaatcaatctgtccattggggtttccctttcagtcagatctttgtcaacatctataaaagcctgtcattaacacgaactgcattaaatccattgatgttgattcaatcctatgtattagtaaagtagtgcatggattacttaatcaactagactcatcagtttgccaataagtcttgcacaaggaaagaatagcagcagcttctctttctaaaaaacgacatcagaatttccaggtgaacaaaagaaagaacaacagtatttgattaagagccgacctggttttggtctggagtgggctcatagggaaattcagcagtaaactgatccattcccacaggcttcgggtaaggaggccttttctgcctcatcctttgtaaatacaactccatcaaattgactaccattttctgaacagcaagcttccctttcagtcttctcttctcccacgtggaaggatcgttcagtttgctcaaattccgtggtctctgcttctcgtgaggtctgcaggaaacatcaatctggataaatggtcaacgtgaatttttactttccaccagaattgaagggacaggcccacaataaaacatttataccaaacatcaagtccggaaatagcaatttttacaatgtttatataagtagtaatgaatttttcttgttccttaaatggaggctggaacgtgcagaaaacatgaaagttcttgcagccattcagagcaggaatcaattttggcaaaatgcaattattatgtcaaaattcgcatagctagctactcaggcatacaggttgtatctgtagagcatgcgggcggcctggtcgacggcgagcttggccatggcgtcggcgtactgtatgaagacgtagtcgagaccgccctcggcgctgatgcagacgaacttgccgacgccgacctttttgtgcacgacgtactccccggccttcagcttccgcgggtacacccggtgacccaa

SEQ ID NO: 8915 - DNA, 20748 bp, Oryza sativa
gccagtgtaacggggctggaggacggcagcgggccggtgtagacggcgggggcaaagcggaaagagtggtagttgaaggcggccggtggtggcgccctgccgccggcgacagggaagacgacggacagcttgccgccgtcggcttgaggcaaaggagaggagggggaggggggcctcatcggcgccgttgacacctttcggccagccggcgaggccgggcggcggcgcgctggggcagcggtggcggcggaggcgggggaagcgctaaggagcggcggcgtgaggaatcgggagaggagagaggatttttagggtttggttgtctacacgaatcttaaagcaatcgaatggtctaaaatttctaagatctgtgagggggttttctgtcaaatgatctatagacaggccctataaagtttggtctcaatactggatttgttttatgaggcttagagatgcaaatcactatttctttgattatggatttgacttattataaccttttgattctgtacgttaataaatttcccgaaaattaatatgccgtacagccatagtggtctcctctactgtttttgggtcaaacaagtgttatatgataaacttcttcatttgatttgctgcgggcaacacgtccataatgctataataataataatacaatatgttaacgccgattatgaagtctaattactgcaaaaggtaaaaagtatcgaatagaaaaaaggggcaagtaatgttaaatggtgtgaccttttctgattttatctagaaaaaatgtccgtgctttaagatgaaattttaaacggggcaagtaatgttaaacaggtgaaaactattttaatcttattattattatgtcgagttaagatgaaattcactgtgttaaattcgcttggatatatattttgttagaaaatcgtaagctgcaattaggtgtccgatcgtctcaagttagtatgtgagtttttaaagagatttcttatacaatttcttctgtatttctaaaagcgaacgaacttagaaactggctcaaatacagatttgtattttcaaaagcgaatggacttaaaaccgactcatacgcagatgccgtactaaaataccagcaaaaacatctttattttttataatagtagagaaagagatagagatagagagatatgtgtgcagtagcttgattgaatatttctctgattaggtttttgtatttctcttggcaaccgtgatcgatcggctactgttgctgatcgtcttgttgcacgtgtggattttcgatatgtgggtagtaatagatctcggctttgatatcctgatcttttttttaatctttctggaacacgtatacccggcagaccgtattggattgagtttctgatgaacacggtaggaattcttctcgatacagtgtatgcgtgtagagaaaaatcgacaatggtatgtcgtgctgctggccggcctcggcacacggcaacacaactgactgctgctggttggtgttgatataggtgcgtgacaacaggtcccaaaccgtgttgctgaacagatcgtatcggcaagatgacaacttcgcggtggcagttggttcgtgacaatgcacagcacgaaatacaatcggctgaagtcactgatccgaacaagcaaattttcttagggaaaatccaacgtttaaagctcatacatgtgggacacataaatagttaaattgacagtgataatgtgcgagacggatttggacacgacgacttaccaagccaccggcaaaaacatcttcaatttttataatagtagagatagagatagagatttgtattgctttgtaaacttcagcatacccttctctttctcctccgaaaccacgtcaccacctactttatctttctcctctgaaaccacctctagactctagatgtcactatctccttacacacaacacaacattaacacatcgacaaatggatttaatagacaagatttcaatgtggtaacactttgagtgggttgaagcacctaatggatttaagcggtttggatatagatggagaaagatttggtttggtttggttttggctgcaaaatttcactctcaaattggattccgctcatggatggtttggatatatatggaaaaaggtttgctttgtgtttaggtcttgttacaaaattttagctactgagttgtccccaaacacttcatcttacttgttgaggaatcgtctgatgaggaatcatcgccagtaactttccattttcccctcgtgggggttgccaactgtcttggatttacattgccgatgtcctcaacttcctccaccgtctccttagccacctagacattgattctgcaattcttgcaggtatctaccttgtcggtcatcgcatccctttccactccttcccgactcctccaagtagacgtcactaggaccctccctaccctgagcatctacgtacgttgtgtcaattctgcctcctctacctaggccactaccaaagggacacatcggcctgacttctcctcttggatctatgttatacttccaccaccaccactctcaacaataaatagtatccttttgatgtagcccaacaatagtatccttttatgtagcatgagtgtctatcaagggctagataataataaatgattgcctttgaattgtatttcctgtagcatgggtgtctatctagtccaataaatgattgcctttgaattacatttcctcttacaactctcgtacggtgacttggaaaaaaactgcaaattaatgtacttttcttttacgaccaaattaaagaacttgaactagctacgtcgtcttaaaacccctggaaatcaaatttgtttggaataaggtcacctgacgtccctcaactttacgtcgagtttgtctgaggtccttaatccacaataccgaaaatctctacccctcaactatcataaaccgtgcacaaaaggtcccgaggcagtattgacctaatttttcccggtttcgctgatgtggcatacagtaggccctacatgtcattgtcctcccttctcttctcttctctctcttttcttcttctctttcctttcgtctccctgatctcttctctacttcagcgagactgcaggcgggcggggcggcgggcgaagcaggcaaggggcagcgcgcgcggagcagcggcggcggcgggcaagcacgcagtggataagtagagtagaatagtagaagatgaatgcatgccagctccctcacgctaattaagccaatcccaatcctaatcctaattcctacgtgccctgcactatttgtccataccttcatcattttgcttactaattggcccaaccaaatctttgctttgtttcccctacctaagctaataataatctagctaacgctccctcactctcaaagttagcctcatcaattagcagcgtgaggaggatacagatcaatacatggcggcgggagcagccgtgcacgtcgtcaggcggccgccgctacagatcagccggtggtgtacacggtgtggaagaggtccagcataggcttccagggcaccgatggcttctccgtctacgactccgccggcaagctcgcgttccgtgtcgacaaaactactaccaccgccgcaaagctttcgccggcgacctactgcttaaggatggccacggcccacggcacgcctcttctctccctcaagccacaggtcaatcatctttccattcacttcattaattcttttctagctactcgtatatcgctttagcagcagcctgtttactgatcgatcagatcatgagtttagtttactagtttggaatcatgtatcttaagatcagctcagcgtggaggagttcatcgcgcggtacatccagctagctgcacgcgccacacgtcagggacgccgtcgctgcactcgtgctcgacatgttcaccgcgcccatagtcgacgtggcgtgcgacctcggcgtgctgtcctacgtgttcatgtcgtccaccagcggccagcaccatgctcgcgctcatgctgcacctccccgtgctccacgagcgcgtcaccgtggagttcgacgaggtggacggggatgtggacgtgcctggcctgccgcgcctctgccgccagcgtccatgccgtgccgtgcccgatggtggacaagaagagccccaactacacgtggttcgtgcgcctcggcgaccgcttcatggacgccacgggcatcatcgcgaacaccgccgaggcgccgacgagctcgaaccggccgggtcccctcgccaccatcgcggacagtcggtgcgtgcaggggcgaaccgcatctccgatctccccgacgacctcatccagcgcatcctccacttcgcgccggcgagggaggccgcgtccaccggcctcctctcctcccgctggcgctcgctctggcgctccaccggcgccgtcaacctcgccgtcctcgtccgccgccgcgacgacttcttctccctccgcgacgcgttcgtccgctccgcccacgccgcgctcgccgccgccgccggcggccacgtcaggaggctcaccatgcacgtggagacggagcgcctccccgtgcagctgacggccgacgcgttcctgcaccgcgacgcggaggactgggggaggaggcacgacgtggtcgccggcgtcgtgtcccacccggcggcgcgccgcgtcgaggagctccgcgtcgccgccgtcaggtccgccgacgggccgtcgtccgacagggaggtcacggagatggaagaaggggagttccacctctccctcggcggcagcggcggcacccagccgtcgacggagacgctccgcgtgctcgacctcaccgggtgcggcggcgtctccctccccgccggcgcggcgctcccgcggctgacgacgctgcggctgcggctgtgcgtcgtgcaggtcgaggacctgcagggcgtcgtcgactccgcgccggcgctcgccaccgtgcacctcgagtccgtcttcctcgccgggacgaaagaagacggctgctgcgcccgcctccgcttccccgcggccaccgcgctcgtgctggccaagtgcaggggccacgggagccaccacaacggcgacgacgacgccagcgactgcgagggcgccatggagatcgacgcgccgaggctccgatcgttcaagtacacggggctgccccggcggttctcgctcatctcgccggcggcggacatggaacgcgcggacctgcacttcctccacgacgacgggcctcaccactaccgcgacaccaccgccgtgctccgcgcgcgcttctggcgcttcctccacaacttccgcggcgtcaagtccctcaagctgaaggtgacctacctcaaggcgatcgccgtcaccggcaacggcaaaggcatcctcctcccgccgctccatggcgtcgagcgcctcgacgtcgccgcgctgcacgacccggcgagcgagacgtccacggtggccatcgccaacctgctccgctgctgccccaacctccgcgacctcgtgctccgcctcagcacggtgccgccggattccaccaagaacggcggctactgccgcgacgtcctgcggaggcgctggcaggcggacctcgacgagtcggtccaccgcctcgcccgccggcgaggctggccgaagccgccgccgccgccgccgccgacaaagatctcctgcatgaaccaaagcctggacgatgccggcggtgacatccatggattgagcggccgatccttcgcctgcttgcgaagctcgttgacaagggttgggatccagttccggaacgacgagcgcagctggcttggcgtctcgctgatcaagttcttcgcggagaacgccatttgcctcgaggagatgcgcgtcgatggagggaacgagaggatgcgcgatcacatcaatcgtagggttgagagatggatcgttgagagtggcatgcgatgctttagagtgttaccgcttgagcggcgatgaaattaggagagatggattattgcaaacttgcaagtgactgaaattaatcaaggtcttgataagttgtgtgttgcaaataaaatgcgggttttttttttctagcttgttatcttcagtgataaaagaatgtcgttttaaattggtgtagtacaaaatatagattttggatataccaaataatcaaaatgacatatatagccaaatttgttatgaagagagctttcataacattacgcttgtgtgtaattaactacattttagttcatgttaaagaattggtgagcattgttatttactgcctctatctcaaaatatagctactaaagtgtgttttgaaactaatgattagccgcacgtaaaactagaaacatgattaacatatgattattgagtactaattactaaaagctagcaaaataaatttatttgattttttaaaacaacttatgcatctacttactcatcccaacgagtcacaaacatcactcgattaatttgtttagatagtttctcatctcaaccaatcatacttatttctcacctcaaccttatttttttttaaaaaaaggtatatatatagggaccacatatacatttatagtataacttctacgtaactttgaaaaatccctctataacatagtagtttccgtgaaatggaggttgtgggaacaaatcctctcacatgtgtgtatgccttgactttttttccttctttacacgaatcttaaaacaaatctaaaggttcaaagttatatgaaagttacatagtacaagttacaatgtaattaaattacgattgcattataattacatatgttcaaattttgggagaaaaataatcgaaaaatatagaaaaaatgtaaatatatatttatattttatgatgaatgtattattgagtttgaagcacatggcacgtcctttcaaagtaactcagagacatatgcacgattcaaaacctagtgccatggtaactccttccgttaccttggtaatttctatattttaatttgtttagaatgtgatttgttaggttctaggggaacctaaaactacatattgctaagcctgaaactgcagtgctatgcaatttgcaattcagttcattgttgttactgcaattttgttgttatatatatatctgattttattgtctttttatataagtttgaatatttttctagagatttttatatatttttatgactcaaaagtctatttcatgtaattttgttggtttttgtaagtgagaatagtttattgtgcaatcattcaagagtgataagtaatatagtatgaattatctagtgatgagaaccgtatcagaaaaactactcaacatcagtattccgtagacacgggataagtactaccagtaaatatctctcactccccacactttctattcaaccttatcctctcatctcttccccttccctcctctctctctctctctctctctctctaccaccctcatggagcacggaggcgacgaggtcttgtgggatggcgcatcgggcgtggaggaagctgacatcaccgccaccgccattgctgctggtggaggtgtgggcggagtagaggaggagatcgtgaagctgttagtgaggtaggtgcccaattagcacatgatggaggcggagctgcccatcacatttcaggaggtggccattgtcgacgaggtcactgtcatcaaggacaagagacctcttgtggtgtggatccgtacacccagatctaggctcgcgacctccaagctcctacgttatctagttctacatttgattttgggttctgcatgttctataggtgtttctacagctatgttggcttttttcctggaatatatttcctttattagtttttattcaactctctcttgataaacacatgatttttagttctttattacggtgacattttagtggtatcatcatactttggtacttgtaggtatcatggctgatacccaggtatcagacatggtaccagtaggtaccatgcttagtacctgtggtatcatggctggtacccataagtatcagacctggtaccgggcacctgtaaggtatcaggtagcatggctggctgcaaggtatcaagtatcaagcaccacacgtcttctctcctcttctcccttccctagccttgatccttgtctcctattgctatcacaaccaaagtcctctcctgctctggatgggggaagtcctgctcggagtagttgcaggcgtcgccggcgaggtatcgcgtgcggagtaaggttctggccagccggaggaaggagcactcctgctcgaagtagttgcggcggcgcggcgccgctggcgaagcgcaataccaagccgggttctgcttggggtggaatcgcgtggacagcgtgggcctcagtcagaaaaagatacatattaaatctgtcgggggatttagttatcccgtgactaccactttgcaatgaaatcctatacagtagctgccctcgaaccatatacattggattgtcatcggagggttgaaaaaacttactaaattttttgaaactttaggcgcctaaaatctacacactcactagaaatatacatgtttgtccatatgaaaattataccattagggttttatgtgaaaaaaccttttgtatttgaatatcaagatactcgtagaggccgtaacaattaaggaaatatataaggatacagaaggtagatgttaaatttgtaccctaagctagagaccgtgagaaataaacataattttcgtaggttgtccaatttgttttagaaattcgagtacaaactacaaagaggtgtacttcaattttcgtaaaacaagggcactcgtatattggtgagaaaggtcaccgtaaatcctagaagttcccaactcgtatcgagaaattaattaaggtaacgaagatctcgcgaccaaccccagatggccatcacctccgccgccggctgcggctgcggctgcggcggcgacggcgaccggctaagctcgctgagcgacggcgtgatcggccacatcctgtcgttcctcccggcgaaggaggcggcgcgcgcggcggtgctctcgtcgcggtggcgccacacgttcgccgccgtccacaccgtctccctcgtggagcccgacgcccccgtcgtcgaccacgacgagttcgccgggtacagccccgggtggggcccgccgccgaaccccaacccgccgccgccgccgttcgccagcgccgtcagcgccgccctcctcgcccgccaccgccgcgccgccgccgtccccctccgcgcgctccgcgtctccatggccggctacgcccacagggtctcccccgcggtggaccagtggatcgcctacgccgtcaaccagcccgcccccgacggcgtcgagctcgacctccgcctcggccgcccctcgctctgccaccgcgactactccctccgccgccgctccgccgccgcgatcgacgaagatgcgaggccgagacggtggaggacgatgccgcccgaggacattctcttcgagagccctagcagcggagaggaggatcacgccgacgacgaggacgacgacgacgtcctctccgacgacggcaagaaggatcccatggccgtgtacaggcggcggttcgagccgcaggagtacagcgtgccgagggggctcttcgcctgcgcggcgctgcgttcgctgtcgctcggctccgtccggctcgctctgccggcggcggccatcgcgctgccgtccctcgagacgctgctcctggccgacgtcaccgagtccgaccacgagaggagcatgcagcgcctcatctccggctgcccgcgcctcgccgacctgacgctcgaggcctgctacgcaaaggcccacgcgctctccgtggcggggctccggcgcctacgcaggctggctctccggtgctgccacggcctggacaccgtcgtcctcggcgacgacgacgcgtcgccaccgtcggagctccaggccttcgagtaccgtggcgaagtgccggacgacttcttcctcgtcaccaccacgaagcacgggcacggcgtctctctggagacggtcacggtcgcctactgcaagatcgacatctgcggcgacgaggtgacgtcgaggtcggagctcgccatgctcggcgcgttcctccgccgcttcgccggcgtcgagcacctccacctcgcgtccgctcgcctcggctccggcctccacgacgccgccgcgttcgcgactctcccggacctgtcgaccctccgccgcctcgagttaggaggatgcctccccgacgacgacgacgacgacggcaccatcttcgccgcactgatcaggctcctcgacctcgcgccaaacctggaggcgttgtcgctcgtcttccacccagagcctctcgacgacggcgacgacgacgacggctaccgcgcatactgttaccacaaggaggaggagctccatgacaagcacctcctcagatacaaccggcacagcgtcctcgccgcgccgacgagcggcgccgccatggtggcgccggcctgcctgaggaggcgggtgagggagatcaacctggtgcactaccagggcggcacggtgcagagggcgctggccatgtacctgctccggagcgcggcggtgatccgtgagctgaggtgcgagctcgccatggggcccttgtggatccaggacgagctggtgcgagagatcaagggctgggtgatgaacaaggcggcagttatcaacttcggatgatatgcttgcatgcgcaatcgtgcatgaaaataatcttaagtaatcatttttttagtggagtaccagtaccagtattagattgtgcgaaaaattagagcaagaataatattgagctctaagaaggctgaatactgaggtggatgagagagaagaggagagagatgagaagcaagccgtaagtttacagccggcttaggcacaatcaccaagaaaatttacgagatagataggtggaccatatgtttatagtgaagagctaactagtatataagtgagctgagagataggtataaagatctatacaaccagcagctggctatattattacccttgctcttatcaaacatatctagattgtattttgactgatctaaatggctgagttcttttttgaagtttccaactcaacctctctttttccgtgtactgctttccaaactaccctccatctcataatataagggattttgagtttttgtttgcactgtttgactactcgtcttattcaaaaaattttggaattattatttatttttttgacttactttattatccaaagtattttaagcacaacttttcttttttttatatttgcacaaattttttcaataagacgagaggtcaaacaatataagcaaaaaactcgaaatcccttatattataggacggagggagtactaaacattcatttttaaataaatatatatatatatatgagagttattttaaagaatcatattaatctattttctttgaaaaataactattacttgattaatcatgcgctaacaagtcgttcttttgcgcgatggagtagttcccaacacctaaaattcattaataggctgtgttctttttagatgttggaaacacttcccctttacacgtaaaacagagtgctggattaacgtatgattagttaagtattagctataaaaaccttaaaaactaggttaatatattttttaaaagcaacattccgatagaaacttttttttttcaaaagacgcactatttagtagtttaaaaaacatacacgcgaaaaacgatggatatgagttgtgaagttagtctaaagaacacattctactaatgaatctgaagtaataattactgttattgctcttatgaatcaaacaatttgatgtaatcatgacaccttaaaaaaacaatttgaagtaaccatgacatctaaaattgaaaattaaatggaagtggatttttatcacttgaaggaacgtcctctcattttgtacgcggcatttaaaagtcatcaaaaattttaaagaaaatgtcaagatagaccaatatgtgatatgtcttttcataattacataattcaaaacgaaaataataaatttaaccacgaattacgtgttctatttaaagttaaatttgatcattataagttaaaattgactatgcatatagtagatctattttttaaaaagattttgttgataatttttatgcgacacttaaaaatgagagatatattttttaaagatcccaaatcaaatcatgcaccacgagcatttgattatgaagagtctgtttggcacagctccatctcagctaaacagtttcagctccaccaaactaggagtgcagttggatggagctctctcacaaaatgtactactccaaactcaactcctggagttatatttaggagttaaagctgtaccaaacaggcccgaagtttgaggcccagctaacccggcccgtagggcttcagcactcggtccagcccgttcgctccgtctcgccgcatcctatccgtactaagtcgcatcacaacatctgaaatatcgatcgccttcttggttcttgctgataggatcggtcgatgccatcgccgccgccgacgccgacgatggccgccggcgccgccgtcgaccgtatctccgacctccccgacgaccttctccagcgcgtcctgcacttcgtcccggcgaaggaggccgcgtccaccagcctcctctcgtcgcggtggcgctccaccggcgccgtcaacctcgccgtccacgttcgccgcgaccaggagcgggaattcttctccgcccgcgacgcgttcgtccgctccgcccacgccgcgctcgccgccgccgccggccacgtcaggcggctcaccatgcacgtggagacggagcgcatgcgcatctgcatgcagctgacggccgacgcgttcctgcaccgcgacccggaggactgggagaggaagcacgacgtggtcgccggcgtggtgtcccacccggcggcgcgccgcgtcgaggagctccgcgtcgccgccgccgtcgtcgaagcgtactggccgtcgttcgacggggaggtcacgagcagcagcgaaggggagtccgcttgtgcctcgacgcgcagccgtcggagacgctccgcgtgcttgatctcgccgggtgcggcggcctctccgccgccgccgccgccgccggcgtcctggcgctcccgcggctcacgacgctgcggctgcggctatgcaatttgcagatcagtgacctacaggggatcatcgacgccgcgccggagctcgccaccgtgcacctcgagtcggtcttcctcgcggggacggcagaagaaggctgcgtccgcctccgcttccgcggccaccaccgcgctcgcgatgatcaactgcggcgcggactgctacgcgtgcggcggctgctacggcgccaccgagatcgacgcgccgaggcttcgatcgttcaagtacacgggcttcgcgcggcggttctccctcgtctcgccggcggcggcgccgccgccggatgacacggtggtggcgcgcgcggagctccacttcctcgaccacttccaccacaaggacgccgacgccgccgacacggtccgcgccaacttctggcttttcctccacaacttccgcggcgccaagtccctgaagctgaaggtgagccacctcaagcacatcgccgtcgcggggcgcgcggcggcgcgccgcgcgctcctcctcccgctccacggcgtcgagcgcctcgacctgaccgcgcgccacgccgacgcggcggcgagcggcggccggacgacgacgacgtccaccacggtggccatcgccaacctgctccgctgctgccccaacctccgcgacctcgcgatccgcctcacccgcatggtgccgcacggctccaccaagaacggcgtctacgcccacgacctcctgcgggagcggcggcgggcggacctcgacgagtccgcgcgccgcttcgctcgccgccgccggcgaggcagctcgacgaagaaggacttggacgatgtcagtggtgacatccatggattgagcggccgaatcttccattgcttgcggagctcgctgagaagagttggaatccagtttcatctggacgaacacaacgactgcatcggagtccggctgatcaagttcttcgcggagaacgccatttgcctcgaggagatgtgcatcgacggtggaaatcagaggatgcacgatcacatcaaccacatggttcagagatggatcgctggtcgtcgctgttcatcagcaaagagcgagaatggcacgggaagttcttcacaacctgatgttttggaaagcagcatgccgcgttttagagtgtcaccgcttcagaggcgatgaaattaaaggagatggtttacggttttggttgaaacttaattaaggtgttgagaagattagtaagatgtgaatttatttttagcttagactcgactatagttggccataaggcccgaggcccgaaggcccggcccacggcacgcctttttggcccggcccaagcacggcacggcccgacttgggtcgggcccatgccggcccggcccgaccgtcgggccgtgcctgggcctccccaccagcacgctgggctggcccggcacggtcgggccggcccggcacgatgggctggcaggccagacccggtacacaaagtatagggactaaaaatagacatataaatgtcaatgtctaaagaatagggaccttaaatagacttattttagctattaatataccacagcacaaagaagagggaggtaaaatagactttttttagctatacaatgtcacagcccaataggagggagaaaatttagacttattctgaggaaaagcacgatggcccatcgtgccttcgggccggcccggcacggcccgaggcgtgttgggccgtgcctgggctatgagtgcggcacgtgggctggcacggcacggcccggtgcgtcggtcgggccgtgccggcccgacaagcctcggcccaggcacggccgggcctgggccgtgccgtgccgggcggcccacatggccatctatagacttgacggattaaaaggacgaaaaataatataaaaagatatggataacgtagggaaccagattctccttttccaatccattgtaaaaatagggcacacttaggtcatgtttgcttcttaacctcactctgttgtttatcacgcggacgcttcccaaactactaaacggtatatttttataaaaaaaattctataaaaaagttgctgtaaaaatcatattaatcttattaagttttttaaactaatacttaattaaccatacgttaatctattgtcccattttgtatgcgaaggggaggggctttccaacccctccaaaaaaaaatacagccttacacctgttacagtggccaaagagttactgctacacaatgataggaccgacactactactaataaggccatccacaatgggtgccgtcgactcgtgccctcgcaaacggccgtttccctcccgtccccttttcagcgtgagtcgtctccccagctaggaacgcggcgccaagcagggggacacggctctttgcaaggagcaactgcttttcgcagagacacgaccctcgcccctgggaggagacccactgcaggctcccgtctcctcgccgctccccccaaatccccctcctaccctcgcctctctcccacagcgccgcctgctcgtcgatccgctccaccagacgccatcgcgacggcgaggagaagctcggcagccttgaagaggagggcgagccagttgtcggcgaggcgacccgtgaggcggcgctgggcgggggtgccgggggtgtcggagttgagggtggagttgtcagcgaggcgacccgtgaggcagcacggggtggcggagtccggggtcggcgacggcgacggcgacggctggagggagagaggggagcgggaggagggcgaccgggcgctgacctcgccggcaagccgccgccgtcgctgctcgaggccagatccggcaagccccactccgccgccactccgacggcgacgaccctcgacggcgacggcgacgaccccgcggcggagggaaggggatctggcaattgatgtcatcggccagcccgcgcgctcgtcgtcgtcggccaccgcgcacgtcgtcgccgtcggccacgccgcgcgcccgtcgccatcgtccacctcacgcggcgcttgccgttcgccaccgcgcctcattcgactgagagagagggggagagatcggaagagaaggagacagtgggcggaggagaagagaaaatgcgagaaagagaaaaggaagaggttgctgggctagtggtctgatgaggggtatgggtggaatttttgtactgggctaccttgagccaggacacccattgtgagatgtagtacccttatcgggttgtttcagattttgagaagcccatccagggataccctccattgcgagacaagttccccctacgagtgtcctcagttagtgaggacactctaggagtggctcacattgtggatgccctaagctgagcaatatgcattatgatcgccacttactaccatttgccgactaggcgactacactctctgtttctcttctcaatttccttctcttttcttccccatataacgcatgcaagtatttttttctgaaagaaaaaaaaatcaatctttctttttaaacttcgcgggcggtagaacgtccaccgatccacgacgccctgcaaagcgtgtgctccgctgcctcgtgatacggatagcccatgctactaaacaacattcgtcctctccttaagagtgttgcaatacatacgacttacacgactagagatatgcaaccatagattaaaaaaaaacatgttaatatgcaaaatactccctccgtttcataaaaaacgaatctaataccggatgtgacatattatggtactacgaatatgtccagattcatagtattatgatgtgtcacatccggtaggttggttttttatgggacggagggagtagccatttacaaccgttattcagaccctgtttagatgggactaaaacttttaagtccctatcacatcggatgtttggaaattaattataaatattaaacgtagactattaataaaacccatccataatcttggactaattcgcgagacgaatctattgagcctaattaatccatgattagcctgtgtgatgttacagtaaacattctctaattatggattaattaggcttaaaaaaattgtctcgcgaattaactttcatttatgtaattagttttgtaagtagttatatttaatactctaaattagtatctaaatacagggactaaagttaagtccctggatccaaacaccacgtgagtcgacagttgggtcgtatgtatagccatttcctctccttaatgggctgggcttcctgcttaatgggccggccttgttagtcgatgggtcttctccctcccccgtgactcgacgacggcgaagggaaacccaaccccatccatccctctccttgccgccgccgtcgacccgatctccatcgctggcgacggcgagcatcgcatcgcatcgcatcgcggcggtgcccaagcgaggcaatctccccgtccgtcttccctcccggcctcggatcccggaggaggtctctcctcctcgctaggagcggcggcgggtgccgtcgtcctgctgcttcccttccgcctccggtgagcgcgccctcgaactcgccttaaccttgtcttatcctccactcgatctggaatggaagctaggttcaatctggggagtataatatctgggggttggttcaattcaactgttaggtccacccctgcaggcggcgatggcgttcttccggggcctgaccgcggtttcgaggattcgatcccgcatggtgagtagtggtgatccatcatcgatcgtccatgtcaatttttttgtgcatttgtggtgtggcgctgaaattccgtttgctcgtgttgctgccaggcacaggaggccaccacgcttggtggtgtgagatggctgcagatgcagagtccatctgatcttgtaagacaataatagtttgtttgtttctttgtttgtttgttcgtgctataaatatttgcatggttgaaattgatagttaccctctctaccttctgtggctggctacgattgaaattaagttggaaatgtgctctgaaaaagatgtttgatttgtgttcctaaatattatgctttcaggatcttaagtcccagctgcaggaattgattcccgagcaacaggtatgttttgttactcgctagcacatctaataattcgacaaagttgaaatgtttctggcatccaattccttatctttactttttttgctttagcctataatgttgccatcttcttgcttcatgcaagttgctgttactgtgtgagggcatgcttacatccaacatccaaatgttgcggattacctctcttcttcttcttcttcttctctctctctctctctctctctctcttgtgtaaaagctgtgctggggcatagaagcaaatgttagatgaacactgtattgaacgcattgtttcagcaccttaagaaatcccccatcactagcttggttctctgggctattgaaaatgcactacaagattgacctatcaggttattgttttcttcacaagtttagttttgcatcaagcactaataacaacattcagaatctgtatcagagaaggacctacttgcagctagctcaccagttcacttttacctaaactctatatatgagctgatttcctgtcaaagatcaggatagaaaagcacaactcactttaccattctggtacaggatcgcttaaagaaacttaaatcagaacatgggaaggtccagcttggaaacataactgttgatatggtatgattctgctatcgattatttatggataaatctattgctattgctttttaagggtgtccttaattgattgggctaaagtcttgaattgtgtttctccaggtccttggcgggatgagaggaatgattggaatgctttgggaaacatcattgcttgacccggaggaggtatacttgtaactatgtatggttctatgataccataatataaaagcagaagtgcttattttgtctatatatatcttgtaatgtgcaatagatgaaaaattaaacaaatgaatcaccatattttcatgatctccaaacaagtttctgtactaacagttgagcatgatctgttcaattcacagtaacaacgatgtaattattattcatatttgtcaatgtgaatcaagttccacaatcaactttagcacattgatttaaaggaggtacacggacaaaatagtctagatttctcatttctgaagtcactatatagtaatgtgcttcattgaaagagtgtgatgcttttatgatttatcgtttagaggtggcggttttgcttcatattttgagttagagttgtaacttagttggaatttgtgaaatttaaacgtgtatcactccatgttttgctgttggatgtaaatctctctcttttctatccagggtattcgtttcaggggtctctcgattccagagtgccagaaagtgctgccaacagcaattaaaggtggagaacctttgccggagggtctcctttggcttcttttgactggaaaggtttggcttttgcctttcttatagaatccttgttgaaatagtttgatgatctgccaataaagttccttccagaaacagggcttgttgattcagtaggagcttctttgtttacctgttatacttgtaatctcgattttcctattcttatttttgtcagcatttagctattagtgtggactgatgcgtatttgtttgtttcaggtgccaaccaaagagcaagtcgatgctctatcaaaggaattggttacccgttcgagtgttccaggtctgctattgtctctgttggtttattacattattgcttagatgagtttcacatcattatcatattttctgtttcttaaaagttcaaatatagacagataaatacagagattatggaggttttgttcctatgaagttttattctgaaagtacacataaacacaccaagtttcttataaattagtttgaaaacaattgaagctacttcattctgaatttcttatagtaatctgttagctttaaggttaaccttttcaatttccttaagattattgttgttaacttaagaacttcttacgtgtagttaaaattttaaaggcaactgtagaaagtatttttgggccagttccatttattttctctattttgactcttcatgccctctgctgatagatagagtaacttgaatttttttaacctttcctttgatattgtcataatgatatagcttatttatgtattcatctttgataagttgatttgagttcattgtgcattcaatccttagtggtagggagtactgcatataaatttggacatctataaacaccattcctttgatattgtcataatgatatagcttatttatgtattcatttttcataagttgattttgagtttattgtgcatttaatctttagtggtagggagtactgcatataaatttggacttctataaactgatagtatgttcaccacttggctactgggctcccatttgattgacatatgatatggatgcaggccatgtgtataaggcaattgatgctctccctgtaactgctcatccaatgacacagtttaccacaggggtgatggcacttcaagtaaa

SEQ ID NO: 8916 - DNA, 15103 bp, Oryza sativa
gtagctcacgtgcctcggcgccgccgccgcgccgtcgccgccggcgacggcgaggtctgccagcggcacggacaccttgccgacgagcttgctcccgagcagcggcacctgcgccttcacctcgaactgcagcataccatccgcggcggcggggaggtcgaaggcgaagacggcggcgtcccagtccgggttctccccgccgtcggggtcgccgctcgtcttctcccggcggccggcgagcgacacggcggcgtagagcggcggcttctggaaggggacgaacgccttgacgcccctgcaggagatggacctgatggtgacccgccggccgccgccgccgccgccggcggtcgacatggcctccgagaaaaatctttcttggaaagaattgggattttgagcttggagatggatcgatttgtggctgatgggatcttggtggctaaagatttgaccttgtgctcttttgtttatttggatgatattggatctaggtgcaatcaatcaattggggagcagatagtatatgctgttactgtgttctttggctgcctgatttttaactgttcctaatatttttttttactttcatttctggatgcaataaacaggaggcaagtgtgtttgtgtgtgtgatatatatttgcatttgtaattatataaaaaagcactcaaaatgctgcagtctctctcaaagaaatcaagttcgttcagtactattttagaccccacaaagcaagaaaaattgtctgataatgcagttggttgtctaattttcttcttgctttagtcattgcaccacctgtctctttcttcttttccccaattccacactcatttgatatttggtagccgtactatgttgtgactgtgagaggccaccatacatacactatattaaagcaacatttgccaataagagtagaagctgttttaccaggaaattggataagctgaaacccatctaaccatttgtgatagcacaaagccataaactgatgtgtacaggcccatagatcacaaaacccaatgtagcacaaacccaatccaacacaagaaaaaaaaaacaacgaaaaatttcgtaccaatgcttaacgctttggagcacatggacaaaatattcataatcaagagatgaacacgtccaaccatgctgttgcatcctatgaattagtacaatggcaaactaagtgaaagacattacactacttgattatgagagcactgaagggatatcttcaaggacaaggttatttcatctatcttaccaaactttatatatatatatatatatatatatatatatatatatatatatatatatatatatatatatatatgaaaatggttctatacacctggaagtatacacctggaagtatgtacacctgctcttatccaccgtcgatctgtgattagcttcgatggatcctgatatcggattaacgagcggacccgtttaactttttaactagaaaaaaaattacgtaccccttaatcacagaaaccggaatgacatgagctcgcataattcctcggtcccaccagtgcatcggatacgaaaatcaggtcactgggagagaccgcgatataccagaactcggagaaggcggcggcgattcatcgtcgattccgcgacagcagcgagattcatcgtcgatccatggctgcgttgcaggtgacggcgtgatccatcggcgtggcgacctgcacgcgcggcgcggcggcggtgtcgaccgatcggcaacatcgtgcggcggaattgcaggtcatcgtcctccaaggcaacggcgcgacgggacgggactagtcgacggtgcgatgcagcaatagttgaactaacccaggcggcatcaatcactcgtcgatctcccgcaaagccttttcgaaagcgacaatgcatgtggttagtactacttaattatttcttatgtcgtgtatatcatatcaatcttatcttctttgcccaggcagtcgtatggtgcatatgcacacctcggagaggctagtgacgctagtcgtcgctagagtccgcaatatggtgtgcttgcacttgctccgatcgaacaatcgggatcccagacgatggctgtgccgatctcctgaaatccatgacgattggttcttgctttttagtacatatatatgtttttgatgcgaacggccgactgaggaaatgatgctgaaatcctgacagtaatgaaaccatcttcgttttctttcgtttttgaaacattcagttcatcctctttattggcagaatagatcgatcgaggatatttgcagtatatgcaatgcaatgaccatatcgtgcatgtatgtagctccataataattaattatgcacccacgcatttcaggtttagatatatactactggtctatttcagtatatagcttatgaaaaaaaaagaatcggtattcggaagatcagtgcctactaattatagttcaatgtgatatgtgtgtttttctgccatgacaagtacatactgctagtaaataaaaaaaagacactcactagaacggataccctcatctcaatcgggcacagcgtccgtcacaggctagaagtcactgatgtgaagagttatctcaatcgggcaaacagccgtcacgaatgaatatatctcaatcgggccctaagtaaagcccgtcaccgatagctttgacccagacgaccagtcaaactatagcccgttacagatgacctatctctatcaggccacaactagcgcccgtcacagatgactactaacctttatcgggcctaaactagagcccatcacagatgatactcatctcaatcgagcctaaactatagcccgtcatagatgactgatgacctcaatcgggcctaaattagagcccgtcacagatgactgctgacctcaatcgggcctaaactagagcccgtcacagatgactagtgacctcaatcgggcctaaactagagcccgtcacagatgatctcatctcaatcgggcatttagttatggcccgtcacagatgactataatccacaaaaaaaataaattttgttttttggctagcctcaggcctttgctagccatgcccgctgcaaagatgacagaaacaaacgcagatatccaatatccccaactccccagcatcacccattcatacatatgcattcacatacacagacatcaacatatttcacacaaccacacattcacagccatctcatatttcacatccattcacatatttcacatccattcaaatatttatcatatttcacctgcaaaaccgagttaattggatcaaatatttatttagcaagtcttaacataaacatatgaaatatatacataaatataagcatcacagttacatcaccacagttgcataataagtgttcatcattgcctaaacatagaagttcaacattattcatcattttagtttaagcctaaacattcctttgggattaattatttcgcggaggatgaagctggctatctcctcgcgaacctcctcaaagctggtagtcagagacttggttattgtgccctacattgtcataattccagattagttgatcgatcatatataagtactaaaatgtagttagtctatcacaattgagaccaccgacctcaaactcagccaaagtcttcaccttttctctatacagaagtcgcatattgtggcacacatggaatccgcactggtcacctatttgttgcttcaccgagaagtcttttttgtggatgagggtgtcatgtcctgtcttcctgaggcctcctctttgcacgtattgggcccacgcttcatctatcgctagttgaattggggtccaatcatatgcgttcttatcaattctggagttcaggtaatgacatgtactccatttaggtgttatgaccagaatgatccaatgggcactgcggcattaatatagtgaaagttaattaagtactcaaggaatgtgtcatgctgttgtgtatatttagttaacacacttactattgattataggcacacataatgtacttcttgtctcggcgggaccacaaggtgtcgtagatgtagttgaccattccttgacggttattctggagatttgtgatagtgaccacttgtggatcaaggaaggcaacttccggtgcatgcttctgacaccattgccaacttaacctacacacaggatcaacgatcttgtaagcaagttaaaccgattgttattaccagaatgagttgggcgacaatacttacaaggagtagcacttaaggaggcttgtgtccaccactcagagcctgtagaggtcgaaaagatccttgaagtcgaccacgatataatttgttggaccaaggaaaggctttccatcgtgctgtccaaggatattggtagctttacttggcttcctggcgttagatttctccatgtagtataagtgaaggtccttgcaagcggtgcccattgcggcaagcacgtcatctccaaccaatggcatgcctagttggaactcctgtggagtgacgtatttcttcttgacctctttgcccttagtctcttcctggcccttgcccagatctagctttcttggagctagaagcgaggcctgcacctttcctccccttcctctcccctttgcttcgggtttatcgagagtaattctctgaggggaagagtgtgccttcctgctcttcttcatcggtgggggttcatgaatcgccttgctgtcggcctccgttcggtcctccccgaaatccgtgtcgtactgcaactgcacatcgtaagattgtgcatgacgatcttgagcaggaggggctgaaggagcagaggcgggtctctttggtggacgaccgcctggtgcagtggttggcctcgctgtaaccctgatctcaatgaggtccttaggccattggatgaaggtaccacgggcatttcctagtgagaggacctcgtcgttcggtggatacttcagagggaacagctcgtattcaggcttcaccgagtcgacttgaacttttgcacagtcggccctgagttgcgctccatgcactcttgtctctggggtcggcttgtacgcaagtccctcggctgctggaacagtgaagatcggcatcaccctaactgtgagggtgcagctcgttggttcctgcgatagattaatcaatttttttagaatattatatatcatatggattcgttacgtctttcatgtattgagtaagttcacggttaccgttatgtggtcgatggcgctgtcgaccgatgttggattttccgccaactcagttgatgcgcaactgctgcgtttttcggtgggacttcctaactctttgtgcgcagcagtagcggcagcctgggggatctgttgctcttctcggatctcttacctaatcttggccctcatcgactcgagcttttcgtcgaattcagatgtcagctcagctcgtatcgactcccggatcttggcttcaaggcgtgcatctttcttcgccttgttggaagtccgcttcttgtactgccacgcgtagtctggaaatccatacttccagggaacagaagacccaacgccccgtgtccgtccacggtgttccttgttgcccaacgctttcgtgaggaggtcgtcctcgcgtctttgagagcaggcctcttgcgaggcttgttgctcggcaaccaactccttctgcattacaatttagtggggtcaaataaactgcacgatgggaaacaatgcgaacatctagtttgattagacacttactatagcttcgtatactcgttgatcttctacatttggcatgaagattgtgccatcatcatgtttctggtacctagccctggcccagttcctagcccgagggtgtgggatatcgccaaacacgagcggtgtaccacgattccttcgcttcttcatcctcacgctgccattcctcttccttaccggcatatccggcggtaccaagccggtgcggatgctggttcctagtctggagcaagcgatatgcctcgcttctagctctggactcgggggtcgacttcttcgcatggaattccgaccagacctgttccgtgatccaaggaaatttctctcttggatctggatttgccgggttgtagacgaactcgccgactagcttagtcttgaagttcttccaagcagtgcccataaccttgaaagcagcccgcctgagacggtcctcatgctccgcaggataatcaaagctctccttgaacgttagccaagcaatgtccttctctacggccggcacgagcttgaagtcgtcttgcagaataatgaatttctgcctccctatgaccccgcagatagacctaaatcggctcaatattttccttggagatgtcggcaaccctacggcgtctaccgctgttatgcggaaccgttccttaggaattttgttccctgtcctaggagtacgtgcccttgaggacccactagttgtcgtcgacattggttcgccttgctgagacattgtctacttttttccaaaaaaacaaaaaaaaacacaattgagtgctacaatctattacaatgaattgaatgtcacttataaaaataaatgaaatatataaataaactaaattgcgcatatcacaacgatagaatgaattgaatggcacatataaataaattaaacatatcatcaaatcctaaaatcataaattcacctcataccatctattcatccacatatcatgcatctatcactaaattgattaatgcaccacattccatctattcatcatcatgtcatcaatcaaaaaatcatccgtttaccatatatcatcaatccctaaaatcatctatcactaaaatcatctatcactaaattcattaatgaaccacattccatctattcatcatcatgtcatcaatcactaaaatcattcgttcaccacatatcatcaatccctaaaatcatctatcactaaaatcatctatcactaaattcattaatgcaccacattccatctattcatcatcaagtcatcaatcactaaaatcatctatcactaaattcatcccaacatccacatttcatcccaacatccacattttcattatcaaacacatgcaggtagcagagggaggcgcgatggaggactcacatgaggtcggccggggggggggggctcggtggtggcggcggcgggctcggtggagggcgtcgccggtcggtggaggtggcggcgggctcggtgcaggcggcgggctcggtgaaggaggagttcacggcggcggcgccggtcggtgtagacgccgatcggggaggtcggcgtcgggcgggcggcgtcgggcgtcggtgaggagtaggtgacgacgatgaggaaggacgtcgccggcctcggtgggggctgctgttcgtgtcggtgaagaggcaagcggcgacgacgaggaaggccgacgtcggtcggtgtagaggctcggtggcggtggcggcgggctcggtggaggcagcgggctcggtggcggtggtggcgggctcggtggaggcggcgggctcggtggcggtggcggcgggctcggcggcggtggcggcgggctcggtggcggtggcggcggtctcggtggtggtggcggcgagggaggacgacggcggtgaaggaggagttggcggcggcgctagggttctaaggaggcgggaaactgtagcgggacttagaaaaattttcgatccgatctgagaaaccctagttatattagagtgatgagtcatctcaatcgggctttagtatggagcccgtcaccgatgactcattttccatctttcatttgttgtgagtgtaaaatatatagcaactgtgtaataattcattttattagtcataatacattttcggatagtaaaagatttcaaatggaaatatggtcaacaacaaagttgtagagcctttcaagatctaataattttattttggtcattattctatataatttttttcccaacagcttgaaattgatttcgacaatatgacaaatctaattaatagcatttgtaaatactaaatgatttcaaattgaaatatggttaacaacaaagttgatcctctcatcacgatctacaacttttattttggtcatttgtaataaaacaaaattagccatattaatgactacacatatcaagtctttgcaataaaacaaaatacttcattcattacaatagataagtacaaatgcatcagtcacaaggttatgccttcggtatgatctgaacgagcatatgccacaggctcttggggatcatcgtcaaggtcaatgtgaggtcttacatgaagattatggttgtattcttcttcatcgacggcgttgtcaactcctacaattcggcgctttccatccctcacgatgtgcatcttcttgtttgaagggtcttttatgtagaatatctgctcgacctgtttcgcaagtacaaatggttcatcggcgtatcccaccttagatagatctactaaagtgaaaccttccttgtcggctttgacaccagtgcgtagattcacctaacggcagcggaacaaaggaaccgtgaacttgacgtagtttagctcccagatctcctcaatgcggccgtagtatgtgtttgacccaacttgatcctggaatgcatctatacggacgccgctgttttgcactgtgcttttgtcatcttgtttgacggtataaaatgtgtatccatttatatcgtatccttgccatgtgtctatggtccaagacggtcccatccccaacaactgtactatctcatttgggacatccgtggacattgtcacacgattcttgaatcattcgttgaaccgagaattatgttctctgttaatccatgcatcagatcgccccaagttctcatctcggattttcgctaagtgctcctcaaagtatgggccaacttctgccatatgttggagcacagcgtaatgagcctgcgcgtacgacgcttgatcgggcctaattcttttccttccgattgtgccaacacctgacaaccttccctcgtgacgagacgctggaactccgataggatcggcatcgaacatgtaattgacacagaactcaatagcctccttggtcgtgtaaccttcaatgatgctcccctcgggtttagctctgttacgaacgtacgactttagaactcccatgtacctttcaaacggccacatttcccttagaaaagccgggccacatagttttgtttgcttcaccagatgaacagggagatgaaccattatatcaaagaaagacagtgggaaaaacatctccaggtgacagagggtattcacaatatcggtctgcagcccatctagatcttctggatctataaccttctgtccaattgcattgaagaaggcgcacagacattggatcgtgtgacgcactttcggtggtagagtgcctctgatagcaactggcaagatttgtgtgattagcatgtggcaatcgtgagacttcattccaacaagttttagatcgttcaatttaacatacttacttatcctcgctgaatagcccgatggaactttaatatccttcaagcatgataacattgcgatcttctcatccttcgacagtgtgtggcaggctggagggaggtacactttacctgtctctgcatctcgtatgggctggagttcgctacgaatattcatgtcctgtagatcaaggcgcgcgttcaacccgtcctttgtcttcccgggaatattcaacatcaggccaaccaaactctcacacacattcttttctacatgcatgagatcaatgcaatgacggacatcaagatctttccagtaaggtagccgccaaaatatggattttttcttccacatacccttctcctttgtcttgctacgttttcttttcttcccaaactcattgcttatgtccttgaccatattgtggacctcatctccggacaaatctttgggagcaggctgaagttctctcttaccattaaaaattttcttctttcttctaaatgtgtgacgtagcgggagccacctccggtgactcatgtataccatctttcgtgatttcttcagccaccggcttcgtgtatgttccttgcaatcggagcatgccttctttccttttatagtttgtccggaaagattaccgagtgcagggtagtcattaatggtgcagaacaatagaactcttagcttgaagttctcctgaccatatgcatcccaagtttccacaccttctttccaaagaatctccagatcgtcgataacaggctccaggaatacatcgatatcattgccgggttgccttggaccttggattaacaagcacaacataatatatttccgtttaaagcataaccatcgtgggaggttatagttcgcaataagaactggccaagtgctgtgagtactactcatgtcattgaaaggattcatgccatccgtacaaagacatatcctcatgtttctagggtcggcagcaaagtctttgtgttttcgatctatattcctccattcaatcgaatccgctgggtgtctaagcataccatcattccttctttccgtggcgtgccaacgtactaacttcgcttcgttcgggttggcaaagattctcttgaaatgatcaataataggtagataccacacaacctttgcaggaccacccctctttgacttatttccttcgtcagcacttttctttcgcttgtaacgagaagccttgcagacaggacaagcatccaagtccgcatattgcttgtggtacaatatgcagtcgttgggacaagcgtgaattctacgaacctctaaccccagtggacacagaacctgctttgcttcgtatgtcgtctcgggcaatgtgttctcaacaggaagcatagccttcaaaattcctaaaagatctgtgaaactcttgtctgtccatccactacttgccttcagcttcattaggtccaaggtaactgacaacttagtgtgttttgctttgcatccagcgtacaaaggcgtctcggaatcacttaccaacctgctgaatttcattccatctctctcattttgggctaggtcctcaacgtcacgtaacatgtcttgtagtagatcgtgatccacatcaaccatttcaccgcccaatggagaaggtataaacatgtcatgctcattttcatcttcctaattatgcgcaccacttctgtctgctgctgctccacttcctgattcttgctctccatgcttcacccaacatgtatagccctccatgaatcctcgttgtatcagatgaccgtgtacgtcctctccgctatcaaacatattctcgttcttgcaatctgcacatggacaacacatgtaatcactgtttcttcttatccgatcctcctccgcggcgttcataaaatttattacgccctttcggtactccgtagaatgacgtttcaaatttttggcatacatccaacttcgatcaattgctacaaaaaaaaacaaattagaggcacatattataagatcagtattgcaaaagtaagacgtgatgaaattgctcaattaatgatttatattactcacttgattgatccattttgatcacttttgggaatttaatttctgttttccttggaaaaaggacaaaaaatcgccccctacagcctcccaccaaaatagtgaacagtgggatacagttacactaggtggtggggggtatttatactgtgcaacaaatatctgtaacggccctaaaacaatcaaccgtgacgggcatacaagttatctctatcgggccttaataaaagaccgtcaaaaaagagtgtcatctgtgacgggcaataaacttatctcaatcgggcctctagttggagcccgtcacagatgaccctcatctgtgacgggcttcttttagggcccgattgagatatggaaccctcatctcaatcgggcctcaactatagcccgtcacagataagtgtcatccgtgacgggctttagttttgtgccgatataccatggctgtgcgaccatatctcaatcgggcgaaactttggcccgattgagattacttccttgtgacggcccgcaaattccagtcttgttatgggccgtcacagatggaaggatctgtattagtgactcctatatactactgctactatactaaacagtatatacctattgactaaataaaaaacggtatatactccctagccgatcaatttattatatattggatacttggaaaaacagttcataatccttaaccgatcgatttaatacaataatagatacttgaaaaatatagtatatactggataaaaaaatcagtatatacagataaaaacagtacatactgctagtaaattaaaaaacagttcatacctagtaaataaaaagaggtatatactactgttactatactaaacagtatatacctactgactaaataaaaaacggtacatacttcctaacctatcaatatattatatattagatacttgaaaaaacagtacataatccttaactaattgatttaatataatattggatacttgaaaattttagtatatactggattaaaaaatcagtatatactggaaaaacaatcagtacatgcatactccttataccagtatatataccattcttaagaaaaagtagtacatacttctacaagaaagtatatacttctaaaaaaagaaaaataataaaagtagtataaacttctacaagaaaaagtatatcattccctagctaaagatattatacatatagtggttacaaagcagtatttatacgtactactactatgtaaacacaactactggagtacgtagtatacaatgctactgctattaaaaaattagtacgtatacactagtactaatccacgtgtttggatcagttctgtgcatttaaaatttgtaatgcatgcactcgatcagttagttgtgcattaaaactaaagaaaagaaaatgcattgttttaaaacagatcagattcaccatggccctattagatgctattggatcatccattaacaaaggggagtatatacacttgggtgtacagaagagtcgtcctatatatatatatatatatatatatatatatatatatatatatatatatatataaaacacaactcttctctttccatctgtgtttccaactcttatcttcacaaacctccaccacttattatcaattatgccagaagtaccccccccaaaaaatgccagaagtacactattaccacttatcacccatacgttttgaaacaaccacaacgttaatcaaatagggatatgttaatgagacatctctgggggaacagggaatttaagatcaacatgggagcgtggagtaggttgggtccaaaagggggaactccaacatattcagcatggctttcaagggggacatgattagaaatccaaatacccaatagttgcaagtctgaaattgattgatactttattcaatggttcttatttctagtgtttgcacacgatagtatgcaacaccttattactagagtacatgtaaccaacgtttgatcaacaacaaccacaagaagagagttggaagttgacaggggccatgttgcacatgtatggcatctgcatcgccatgttcatcatcatctgctgctgcccgagtccagcacaaataacttgttgcatgctctgcatcatctggtaactggtgtcacagttgcactgaggcatcatgccttgcagctgcatgcaacattgctgctgcaggggagccattggctgtgatatgaacatggctgtggagctacccatgcccaacgtttgcatcatgtactgcctatacggatccgtggtgcccatggctaatgttgctgggaaatactgcatagtggtgattgcagtagtggcacttgcagaaagagcaattaaggcaaacagggcaaatatcttggtggtgtatgctgccattgctgattctacagtactagtgttaaacaagatcctagatggtgtagacaatattgttgagggtgatggaatgatggttgcctttgcctaggggcctatttatacatgctagtagctatagctgtgtaagcttggaaaaaaattggcctttgcaaaaccacctagtggaggccacataagctagaaatcatgaaacatgagaattatttggacatttatccaaccaatactttggaatatctaaacaaagatagttttgccaatgctttggtgcatggaaagaaaatatgttgataaggctgtgccagattgctttggcattttgcaaagttaagttagcagttttgtaaattatgagctaggtaaagaatcttttagaactgaatttgtatgggacttgtagaatgtgttacacaagtcacaacttacacagataacaattaagagtatgagtcattgccatatgtgaatgattgagaaggtaaacttggatatttgtaaatgtactttaatagcatacatacatatgcagtttggcatgtatttggagttttgttaacaagaattggaagtaacgaacattgctataaagggaaagaagtaaaggagaaacaaattttgggtccatcccaaaaaataaagcaatgattagagtttggccatactctttgctatcctactttccatgtatctagtcctttatcttacaaataaagagaaatgaggaagtaaacatatttcatgtattcatattatgacgagacacatttcttaggcagacactactgacactatgcaagtattaagttgcattattttcaaatttaactatgtcataattatccagttcagaatcttcatgcttttagttgcattataaattgggatggagaactatacaatgtccatgttcataatcttcatgcttttagtgctatagtaatagagttgttccaaatatgatgtatagatcccgaaatttccatcctggattgaagaaacactactaaaaaacgaatttcctgtacgagcccctcgttagattccagacggtccataaatgaccgcgtctggaaaaatcatcctcccatttttgcgtgcggacccttaagaggaccgcacgtgaaaatcgattttcgcgtgcggtcctcttatcatcctcccatttttgcgtgcggacccttaagagga

SEQ ID NO: 8917 - DNA, 15529 bp, Oryza sativa
gcttccagccaccattatctgctccatcacccacatttttttaattttaattaattaattaattaagtgtaggttatagtgtactcctactaacgtcagaggagagtatcaacttgtgcaatatacaacagctagcacatcgtctaattagctgtactatccgcatagtcaatcagtagaaaggccatgctggagtattatatacagatctgtgatattatcttggtagccagtatgtaattatatgagatctctatgtatatatagactaaagagacactcatatgcatgatttcttacatgatgtgcaaacaaaaaaccaggtgaagcttatatgattaagctagctaggtagatctactttgcttggattttttatttaggagtattgcttgttgagttgtggagtataaaactacaccaattttgaaatttaatatataacttcaaaattactaacttggttttctttccttaatttataatcactcaggtttgctttggagtttggaccactaattaaaggtagaaatgtaaagaccttatcctgaaattatttttcgttgcattggttacgtatactccctccttttctttctataaggtgtattataaaatcgaaatatcattaaaaatataattctattggaacaatttttacataccaaatatatatattcatagtttgagtaattagttttgaatttgtaactttataatattccttatataaaaatagttggagtatataacttgtacttacagtaattaatgccagcggaatagtaagaaaaatatgctcctacagtgtatgctagtcatcatatcagaacaggataagataaaatgccagctgacaagattttgctggtatatccatccttcacaggagtattttactacacacgtactgtgatgttactctcaggttaaggtaattaatccagtgccagggtaattaaccaaggatgaaggggacaatgcaaggtgtggattgcttgccacgtgtaccgcattcatggtcaatggtgggaaagggtttaactggggacaaggtagcggtcagaacggggtttgtcccagagaggataggcgaccaatcagcgagcaacacgtatacgtttatctctctacctttcccttcttggtttcgggctaattaacggaagaggaatgcaggatttaacatgtgcacgttcagatagtcaaagtcaattactcccttcattctaaaggcacgactgctttttctttttaggttgttttataatacaagatgtatagatacatgtaattaactaacgcatctctctcctaaattcgttatttagagtcttgatccttaagatctataatcagggccgttggtaagtgtgtccaccgaatatagcccctacaaattaagaccttatttttattctttttaatatattgtaatgtgttccaaagagatatcccgtattatagtagtcattaattcattcattcgtaccacccttgagaaaattatgataaactatttggttcatttctgcacccttgagaaacttatgataaaccatttggttcatttctgcaccagagaaaccatcctgatttggtttagactcgtgacgacgatgtttaaaatgccccctgtgaggttgaaagttgaaactctggtctctgcctctctggagaagagacaaccagcggtaagccggaggagcgcactgctgatgctgcgagattagacaacagattgatggatatgcatccatccattcatccatcggtggagtttgtgcgcgtgcgcttacacgaatagactggatattagtacgacacgacacatggaccgtgccattgttttgcactccatggataggtacgatacttctcgattactgccccgtcataaaatagttgtttgaatttttttagtcaaaattcttttaagtttgatctaatttatagagaaaattatacgacaccgtcaaactagttttattaaatttaatattaaatatattttgatataatgtttgttttgtatttaaagtattactatagctataaacttgctcaaacttataaaaaatttaacaaagaaaaaaaaatcaaacaacttaggacataaaacaaaaaacaaagaaagtagcaataaaagatcatatatgatatattttagtcatggaaatctgaacaggaatcgctcgcgcgcgtgtgcgtacaatgctatgatagtgataggcgtgcgtgctctccttcagctcctgctccccacatggccatggtggtggatgatgctccttcagctccagcaaccactactcaccaccagtggcctagatgcagctacaaactgcgcccgtgctgtgccatcgtttgaccgagaccgaccaaattttttgtcaactagtaaaaagcataaccacgagctccagttaattaactggtctactcctcctgcacttcctaccgatcgagtaattgtcgattactagtgctgtcatcccttaactgatgactaactaagcaagatgattaaacaacgtgtacgtggtgacttcgttaatatcaagatatgtcggtctaatcttctggagatgtttataggggtaggatttacgtgtttgtgttcacaaggacgatgagtgtgaccgtgttattagcgtctacatttacactgtgtttttttttttaaaaaagtcaatgtgtctgttgctcacgccattgcaccgttttgggctgctccatggcctcggttggattctacattgaaggaggaggaggaggccttcaagtgttgagcccaaaggcagcaagggccagaaattttgggcctatattgggcctaatttaccagataaggtcgtcactcccttagttgataaagtccgcttgagatacctcgctgtgggtcaactttcattagcatcaatcgtaaaatatggtacaaagccacccactactctcaaaaccagtgttaatcatgtccctcgataatttggacagtgattttgttctttatcctacgtgacatactccatccgtctttaaaatatttgacgccgttaacttttttaaacatgttataccattcgttttattcaaaaacttttgtgaaatatgtaaaactgtatgtacagaaaaaagtcaacgagtattaactaggggtgtgtttggttcacggtcatgtatggataggatatggccatccatattttgttggatatagcgatccaattttttgtttggtttgtatggatatgacaatccaattttttgtttggtttgtatggatatgacgatccaatttcttatttgattggagggatatagcatggatgggaaaagccaaaagttaatgggacccatttgtcatatatatattttttaacaaaatataatcatccgagatcttattttaaagatttaattataaaaaatataatggtgtaatcaaatcataaattagataaacggtttaggagaaaaaattatttggagcttgcttaacaggaaatcaaaccaaccacagccaatcggaatagaacacatcacccaatccaaaactggatggcttcatccagccaaatcagccggatgcactcatccagcatattgagagaatattccctattccaggctaccccatctacccggccctccaaccaaacactacaaaaactcgagcggccatctcccatccacatccaggctcatctatccaaccaaacacaccctaggtctttgtggctacctggtgcttacagagctactgtcaaggaaaaaaaagggtgggacctatgtagggccttgaccaattcaacccagggcagcaaggccaggagttttgggcctctaatgggccacttggttccatcctctgccgaggttcacctagtcagacatagcggcctaatatagaggagtaattttcaggttcctctgctggttagggtgtgttcggagagaagattgtagaaataagttcaccggaggtcccttgacttaagggcgagatttttctaaaaggccttgtttggttacacccggatttaatccgggctagtaatgataagtgtagtaagaaatttatgatagatacaatgatagaccgggatttattccgagctgggaaccaatttactcatgatagggacaataagagaccaggaatcaacccactagtcaagagttgtggaactaattcggatgttttgttgtatctatcatgagtaaattggttcccggtctggaataaatcctagtctcttattgtatctatcataaatttcttactatacttgtcattcccggcccggattgaatctgggcgtaaccgaacaaagccgaaatatgtacccctaaactcatacaaactgtgtacttaaggtcctaaggcagtatatatgggtggtttcgctcacgtggcatcctagtcagaaaaaaaaaagtacgtgggggcccacatgtcagctgcacatcttttttcttcttctccttcttttctctcttctctcttctcttttctctcttctctcttctcttcttcagtgagggaggccagcggccgacgggcggagcagtgatgggcgggcggcgggagagcgcggcggcgggcctgcgaggaagcggagcggcggcgggcaagcgcggtgggggagtggggagagacaaagcgagaccggaggagggagagagagagagaggaggccgactggcaccggcgttatcgcccggttgcgcgacgacgatcctggccaggtcgaggtgcgggtagcggtggagcacggcgcactgtgcacctcatgtcctccctgtcacgctcgtacgcatctcgcgccttctccgccagcgcgcccgccgccaccgccttcgtctcggcgagctcgagcttggccttcacgttccacagctcctctagcaacgcgtccgcctctgcgccggcgtcgcgctcccacgctctcatgtagtaggttgaggcgatgacgtcgcctgttttggcaatgacgagctcgctctcctgcgatggtgtcacgatgccctgcacagctgcgtcaccaccttccactcgccttccgccgtggcggcactatctggcagcaaaccaccagttcgccgcctgcggccgtgctcgccttttgccagccgccccgctatcgcgctcgcccgtcgctgctctgccgctgtcgcctacctgcttcgccttccgctcgcttccgacgaagggaagaagcacgacaaggacgggggttgctctgaccgccgcctcgtagtggtagacagtgtgggtggcggagacgcaggagccggcgggaggcacgacggcgaactcatccgccgcgctccgctcgccgcccgccgccgctccgctgccacacaggcccgccgccgtgctcgcccgccagccgtcggcctccctcgctgaagaagagaagagagaaaagagaagaggagaagaaaaaaaaattacagctgacatatgggtcccacgtacttttttaatttttttgttgattaggatgccacgtcagcgaaaccactcatatatattgccacatgaccttgagtgcacggtttgtataagtttaggggtatacatttctcgctatcaagttgagagtcctccgttgaacttattccaagatcatgtagtaagcaacacaactggttagggaataaacacacgtgaaaaaagagagagtagaagttaggtcatctaattgtcttaaacagtttagcaacgaggacgcacagtctagtagtttgaatagaaattaagactataaccttaaaaactagatttatttggcttttttacagaaaattttatataataatcttgtttttgaaaaaaaaaaatcatctacccatacacagcattacaataagcccatatgcagcagctccgtcgaaaggatgatgacttttcctttacacaagaagagatttttacagcttaacatggagaagaagaaaaaaatccagaaacaaactaaacattcacaattgatcttgctcaaaacaacccgacatgctcacaaatccacaagatcaattcattgttcccgtcctggcgattaaagcattcacagttaatttacagatcgaatccaactctttccttttcttttgatgaaaagcagaattcaattcaacttgtgaatttgtgatatacgcaaagctcaaatcaatttagcagaattcatcatctacaagtagcgagtcccgggttgggggtacaagctgtacggcgctcccgccgcttcttgatccggcaaccacgccgccggcggggggtagcacggcgcgccgggcggcggcggacgcggcgacatgtacgacggcagcgcacggtccaccgagcgatcgcagcatggcgccgatcttggcagtggtggtggatactgcgatgaggctgactccggcggcggcggtggcgggtaggtgctcgtcggagaggggaaactgggcgccgggtagcctgccggcggtggcgggtagaagttgctcggtggtggcggcgggtagccggcgatgtactgcgacggaggaggcggcggcgggtagctgctgtttggtgcgaagctttgcgtcacgtgaggcggcggcggcggcggcggtggaggaggagggtagctgctcggcggcggcggtgggtacagtgaagctgacggtgtcgcggacagcgatggcagcggcgggtagcttgccatcgccggaggcggatacggcgcacccgacgtcgtcgtcgtcgtcgacgtcggcggtggcgcgcagcaagaggaggagattggagttggatgatccacctgcggctgctggtacgcgccgccgccggtgacggcgaaggtgaagctgagcttgccgttcgccttgccgtcgggggcgcacacctggtagctcacgtgcctcggcgccgccgccgcgccgtcgccgcggcgacggcgaggtctgccagcggcacggacaccttgccgacgagcttgctcccgagcagcggcacctgcgccttcacctcgaactgcagcataccatccgcggcggcggggaggtcgaaggcgaagacggcggcgtcccagtccgggttctccccgccgtcggggtcgccgctcgtcttctcccggcggccggcgagcgacacggcggcgtagagcggcggcttctggaaggggacgaacgccttgacgcccctgcaggagatggacctgatggtgacccgccggccgccgccgccgccgccggcggtcgacatggcctccgagaaaaatctttcttggaaagaattgggattttgagcttggagatggatcgatttgtggctgatgggatcttggtggctaaagatttgaccttgtgctcttttgtttatttggatgatattggatctaggtgcaatcaatcaattggggagcagatagtatatgctgttactgtgttctttggctgcctgatttttaactgttcctaatatttttttttactttcatttctggatgcaataaacaggaggcaagtgtgtttgtgtgtgtgatatatatttgcatttgtaattatataaaaaagcactcaaaatgctgcagtctctctcaaagaaatcaagttcgttcagtactattttagaccccacaaagcaagaaaaattgtctgataatgcagttggttgtctaattttcttcttgctttagtcattgcaccacctgtctctttcttcttttccccaattccacactcatttgatatttggtagccgtactatgttgtgactgtgagaggccaccatacatacactatattaaagcaacatttgccaataagagtagaagctgttttaccaggaaattggataagctgaaacccatctaaccatttgtgatagcacaaagccataaactgatgtgtacaggcccatagatcacaaaacccaatgtagcacaaacccaatccaacacaagaaaaaaaaaacaacgaaaaatttcgtaccaatgcttaacgctttggagcacatggacaaaatattcataatcaagagatgaacacgtccaaccatgctgttgcatcctatgaattagtacaatggcaaactaagtgaaagacattacactacttgattatgagagcactgaagggatatcttcaaggacaaggttatttcatctatcttaccaaactttatatatatatatatatatatatatatatatatatatatatatatatatatatatatatatatatgaaaatggttctatacacctggaagtatacacctggaagtatgtacacctgctcttatccaccgtcgatctgtgattagcttcgatggatcctgatatcggattaacgagcggacccgtttaactttttaactagaaaaaaaattacgtaccccttaatcacagaaaccggaatgacatgagctcgcataattcctcggtcccaccagtgcatcggatacgaaaatcaggtcactgggagagaccgcgatataccagaactcggagaaggcggcggcgattcatcgtcgattccgcgacagcagcgagattcatcgtcgatccatggctgcgttgcaggtgacggcgtgatccatcggcgtggcgacctgcacgcgcggcgcggcggcggtgtcgaccgatcggcaacatcgtgcggcggaattgcaggtcatcgtcctccaaggcaacggcgcgacgggacgggactagtcgacggtgcgatgcagcaatagttgaactaacccaggcggcatcaatcactcgtcgatctcccgcaaagccttttcgaaagcgacaatgcatgtggttagtactacttaattatttcttatgtcgtgtatatcatatcaatcttatcttctttgcccaggcagtcgtatggtgcatatgcacacctcggagaggctagtgacgctagtcgtcgctagagtccgcaatatggtgtgcttgcacttgctccgatcgaacaatcgggatcccagacgatggctgtgccgatctcctgaaatccatgacgattggttcttgctttttagtacatatatatgtttttgatgcgaacggccgactgaggaaatgatgctgaaatcctgacagtaatgaaaccatcttcgttttctttcgtttttgaaacattcagttcatcctctttattggcagaatagatcgatcgaggatatttgcagtatatgcaatgcaatgaccatatcgtgcatgtatgtagctccataataattaattatgcacccacgcatttcaggtttagatatatactactggtctatttcagtatatagcttatgaaaaaaaaagaatcggtattcggaagatcagtgcctactaattatagttcaatgtgatatgtgtgtttttctgccatgacaagtacatactgctagtaaataaaaaaaagacactcactagaacggataccctcatctcaatcgggcacagcgtccgtcacaggctagaagtcactgatgtgaagagttatctcaatcgggcaaacagccgtcacgaatgaatatatctcaatcgggccctaagtaaagcccgtcaccgatagctttgacccagacgaccagtcaaactatagcccgttacagatgacctatctctatcaggccacaactagcgcccgtcacagatgactactaacctttatcgggcctaaactagagcccatcacagatgatactcatctcaatcgagcctaaactatagcccgtcatagatgactgatgacctcaatcgggcctaaattagagcccgtcacagatgactgctgacctcaatcgggcctaaactagagcccgtcacagatgactagtgacctcaatcgggcctaaactagagcccgtcacagatgatctcatctcaatcgggcatttagttatggcccgtcacagatgactataatccacaaaaaaaataaattttgttttttggctagcctcaggcctttgctagccatgcccgctgcaaagatgacagaaacaaacgcagatatccaatatccccaactccccagcatcacccattcatacatatgcattcacatacacagacatcaacatatttcacacaaccacacattcacagccatctcatatttcacatccattcacatatttcacatccattcaaatatttatcatatttcacctgcaaaaccgagttaattggatcaaatatttatttagcaagtcttaacataaacatatgaaatatatacataaatataagcatcacagttacatcaccacagttgcataataagtgttcatcattgcctaaacatagaagttcaacattattcatcattttagtttaagcctaaacattcctttgggattaattatttcgcggaggatgaagctggctatctcctcgcgaacctcctcaaagctggtagtcagagacttggttattgtgccctacattgtcataattccagattagttgatcgatcatatataagtactaaaatgtagttagtctatcacaattgagaccaccgacctcaaactcagccaaagtcttcaccttttctctatacagaagtcgcatattgtggcacacatggaatccgcactggtcacctatttgttgcttcaccgagaagtcttttttgtggatgagggtgtcatgtcctgtcttcctgaggcctcctctttgcacgtattgggcccacgcttcatctatcgctagttgaattggggtccaatcatatgcgttcttatcaattctggagttcaggtaatgacatgtactccatttaggtgttatgaccagaatgatccaatgggcactgcggcattaatatagtgaaagttaattaagtactcaaggaatgtgtcatgctgttgtgtatatttagttaacacacttactattgattataggcacacataatgtacttcttgtctcggcgggaccacaaggtgtcgtagatgtagttgaccattccttgacggttattctggagatttgtgatagtgaccacttgtggatcaaggaaggcaacttccggtgcatgcttctgacaccattgccaacttaacctacacacaggatcaacgatcttgtaagcaagttaaaccgattgttattaccagaatgagttgggcgacaatacttacaaggagtagcacttaaggaggcttgtgtccaccactcagagcctgtagaggtcgaaaagatccttgaagtcgaccacgatataatttgttggaccaaggaaaggctttccatcgtgctgtccaaggatattggtagctttacttggcttcctggcgttagatttctccatgtagtataagtgaaggtccttgcaagcggtgcccattgcggcaagcacgtcatctccaaccaatggcatgcctagttggaactcctgtggagtgacgtatttcttcttgacctctttgcccttagtctcttcctggcccttgcccagatctagctttcttggagctagaagcgaggcctgcacctttcctccccttcctctcccctttgcttcgggtttatcgagagtaattctctgaggggaagagtgtgccttcctgctcttcttcatcggtgggggttcatgaatcgccttgctgtcggcctccgttcggtcctccccgaaatccgtgtcgtactgcaactgcacatcgtaagattgtgcatgacgatcttgagcaggaggggctgaaggagcagaggcgggtctctttggtggacgaccgcctggtgcagtggttggcctcgctgtaaccctgatctcaatgaggtccttaggccattggatgaaggtaccacgggcatttcctagtgagaggacctcgtcgttcggtggatacttcagagggaacagctcgtattcaggcttcaccgagtcgacttgaacttttgcacagtcggccctgagttgcgctccatgcactcttgtctctggggtcggcttgtacgcaagtccctcggctgctggaacagtgaagatcggcatcaccctaactgtgagggtgcagctcgttggttcctgcgatagattaatcaatttttttagaatattatatatcatatggattcgttacgtctttcatgtattgagtaagttcacggttaccgttatgtggtcgatggcgctgtcgaccgatgttggattttccgccaactcagttgatgcgcaactgctgcgtttttcggtgggacttcctaactctttgtgcgcagcagtagcggcagcctgggggatctgttgctcttctcggatctcttacctaatcttggccctcatcgactcgagcttttcgtcgaattcagatgtcagctcagctcgtatcgactcccggatcttggcttcaaggcgtgcatctttcttcgccttgttggaagtccgcttcttgtactgccacgcgtagtctggaaatccatacttccagggaacagaagacccaacgccccgtgtccgtccacggtgttccttgttgcccaacgctttcgtgaggaggtcgtcctcgcgtctttgagagcaggcctcttgcgaggcttgttgctcggcaaccaactccttctgcattacaatttagtggggtcaaataaactgcacgatgggaaacaatgcgaacatctagtttgattagacacttactatagcttcgtatactcgttgatcttctacatttggcatgaagattgtgccatcatcatgtttctggtacctagccctggcccagttcctagcccgagggtgtgggatatcgccaaacacgagcggtgtaccacgattccttcgcttcttcatcctcacgctgccattcctcttccttaccggcatatccggcggtaccaagccggtgcggatgctggttcctagtctggagcaagcgatatgcctcgcttctagctctggactcgggggtcgacttcttcgcatggaattccgaccagacctgttccgtgatccaaggaaatttctctcttggatctggatttgccgggttgtagacgaactcgccgactagcttagtcttgaagttcttccaagcagtgcccataaccttgaaagcagcccgcctgagacggtcctcatgctccgcaggataatcaaagctctccttgaacgttagccaagcaatgtccttctctacggccggcacgagcttgaagtcgtcttgcagaataatgaatttctgcctccctatgaccccgcagatagacctaaatcggctcaatattttccttggagatgtcggcaaccctacggcgtctaccgctgttatgcggaaccgttccttaggaattttgttccctgtcctaggagtacgtgcccttgaggacccactagttgtcgtcgacattggttcgccttgctgagacattgtctacttttttccaaaaaaacaaaaaaaaacacaattgagtgctacaatctattacaatgaattgaatgtcacttataaaaataaatgaaatatataaataaactaaattgcgcatatcacaacgatagaatgaattgaatggcacatataaataaattaaacatatcatcaaatcctaaaatcataaattcacctcataccatctattcatccacatatcatgcatctatcactaaattgattaatgcaccacattccatctattcatcatcatgtcatcaatcaaaaaatcatccgtttaccatatatcatcaatccctaaaatcatctatcactaaaatcatctatcactaaattcattaatgaaccacattccatctattcatcatcatgtcatcaatcactaaaatcattcgttcaccacatatcatcaatccctaaaatcatctatcactaaaatcatctatcactaaattcattaatgcaccacattccatctattcatcatcaagtcatcaatcactaaaatcatctatcactaaattcatcccaacatccacatttcatcccaacatccacattttcattatcaaacacatgcaggtagcagagggaggcgcgatggaggactcacatgaggtcggccggggggggggggctcggtggtggcggcggcgggctcggtggagggcgtcgccggtcggtggaggtggcggcgggctcggtgcaggcggcgggctcggtgaaggaggagttcacggcggcggcgccggtcggtgtagacgccgatcggggaggtcggcgtcgggcgggcggcgtcgggcgtcggtgaggagtaggtgacgacgatgaggaaggacgtcgccggcctcggtgggggctgctgttcgtgtcggtgaagaggcaagcggcgacgacgaggaaggccgacgtcggtcggtgtagaggctcggtggcggtggcggcgggctcggtggaggcagcgggctcggtggcggtggtggcgggctcggtggaggcggcgggctcggtggcggtggcggcgggctcggcggcggtggcggcgggctcggtggcggtggcggcggtctcggtggtggtggcggcgagggaggacgacggcggtgaaggaggagttggcggcggcgctagggttctaaggaggcgggaaactgtagcgggacttagaaaaattttcgatccgatctgagaaaccctagttatattagagtgatgagtcatctcaatcgggctttgccgtagagcccgtcacagatgactcatcggtgacaggctccatactaatgcccgattgagatgacattcaggcccgtcacggatgactcatctgtgacaggccctaagataatgcccgatagagatagattaatctctatcgggcttgaactaaggcccgtcaccgatgactatttttccatttcccagataagtctttatatttgtgagtacaaaatatatagctgctgtataataattcattttattagtcataacacattttcggatagtaaatgatttcaaatcgaaatatggtcaacaacaaaattgatcctctcatcaagatctacaacttttattttggtcatttatctatataactttgtttctaacagcttaaaattggttttgacaatatgacaaatataaacagcatttgtaaatattacatgactttaaatgggaaagccatagacagctaacttgtacagctaatcaagatctacaacatttattttggtcacttcttcatccgacaaagtgatagtaccaatgtttacaaaattgacatatctgtgttgatatttataaaccagatgagagaaatatgatttttgtgaataatataactatcactttgtcagatgaagaagtaaccaaaataaaagttgtagatcttgatgagaggatcaactttgttgttgaccatatttccatttgaaatcatttagtatttacaaatgatgcttatatttgtcatattgtcaaaatcaatttcaagctgttggaaacaaagttatatagataaatgactaaaataaaagttgtagatcttgatgagaggatcaattttgttgttgaccatatttcgatttgaaatcatttactatctgaaaatgtgttatgactaataaaataaattattataca

SEQ ID NO: 8918 - DNA, 19165 bp, Oryza sativa
  unsure (1)..(19165): unsure at all n locations
cccactgtctttctttgatataatggttcatctccctgttcatctggtgaagcaaacaaaactatgtggcccggcttttctaagggaaatgtggccgtttgaaaggtacatgggagttctaaagtcgtacgttcgtaacagagctaaacccgaggggagcatcattgaaggttacacgaccaaggaggctattgagttctgtgtcaattacatgttcgatgccgatcctatcggagttccagcgtctcgtcacgagggaaggttgtcaggtgttggcacaatcggaaggaaaagaattaggcccgatcaagcgtcgtacgcgcaggctcattacgctgtgctccaacatatggcagaagttggcccatactttgaggagcacttagcgaaaatccgagatgagaacttggggcgatctgatgcatggattaacagagaacataattctcggttcaacgaatgattcaagaatcgtgtgacaatgtccacggatgtcccaaatgagatagtacagttgttggggatgggaccgtcttggaccatagacacatggcaaggatacgatataaatggatacacattttataccgtcaaacaagatgacaaaagcacagtgcaaaacagcggcgtccgtatagatgcattccaggatcaagttgggtcaaacacatactacggccgcattgaggagatctgggagctaaactacgtcaagttcacggttcctttgttccgctgccgttaggtgaatctacgcactggtgtcaaagccgacaaggaaggtttcactttagtagatctatctaaggtgggatacgccgatgaaccatttgtacttgcgaaacaggtcgagcagatattctacataaaagacccttcaaacaagaagatgcacatcgtgagggatggaaagcgccgaattgtaggagttgacaacgccgtcgatgaagaagaatacaaccataatcttcatgtaagacctcacattgaccttgacgatgatccccaagagcctgtggcatatgctcgttcagatcataccgaaggcataaccttgtgactgatgcatttgtacttatctattgtaatgaatgaagtattttgttttattgcaaagacttgatatgtgtagtcattaatatggctaattttgttttattacaaatgaccaaaataaaagttgtagatcgtgatgagaggatcaactttgttgttaaccatatttcaatttgaaatcatttagtatttacaaatgctattaattagatttgtcatattgtcgaaatcaatttcaagctgttgggaaaaaaattatatagaataatgaccaaaataaaattattagatcttgaaaggctctacaactttgttgttgaccatatttccatttgaaatcttttactatccgaaaatgtattatgactaataaaatgaattattacacagttgctatatattttacactcacaacaaatgaaagatggaaaatgagtcatcggtgacgggctctacggtaaagcccgattgagatgactcatcactctaatataactagggtttctcagatcggatcgaaaatttttctaagtcccgctacagtttcccgcctccttagaaccctagcgccgccgccaactcctccttcaccgccgtcgtcctccctcgccgccaccaccaccgagaccgccgccaccgccaccgagcccgccgccaccgccgccgagcccgccgccaccgccaccgagcccgccgcctccaccgagcccgccaccaccgccaccgagcccgctgcctccaccgagcccgccgccaccgccaccgagcctctacaccgaccgacgtcggccttcctcgtcgtcgccgcttgcctcttcaccgacacgaacagcagcccccaccgaggccggcgacgtccttcctcatcgtcgtcacctactcctcaccgacgcccgacgccgcccgcccgacgccgacctccccgatcggcgtctacaccgaccggcgccgccgccgtgaactcctccttcaccgagcccgccgcctgcaccgagcccgccgccacctccaccgaccggcgacgccctccaccgagcccgccgccgccaccaccgagccccccccccccggccgacctcatgtgagtcctccatcgcgcctccctctgctacctgcatgtgtttgataatgaaaatgtggatgttgggatgaaatgtggatgttgggatgaatttagtgatagatgattttagtgattgatgacttgatgatgaatagatggaatgtggtgcattaatgaatttagtgatagatgattttagtgatagatgattttagggattgatgatatgtggtgaacgaatgattttagtgattgatgacatgatgatgaatagatggaatgtggttcattaatgaatttagtgatagatgcatgatatgtggatgaatagatggtatgaggtgaatttatgattttaggatttgatgatatgtttaatttatttatatgtgccattcaattcattctatcgttgtgatatgcgcaatttagtttatttatatatttcatttatttttataagtgacattcaattcattgtaatagattgtagcactcaattgtgtttttttttgtttttttggaaaaaagtagacaatgtctcagcaaggcgaaccaatgtcgacgacaactagtgggtcctcaagggcacgtactcctaggacagggaacaaaattcctaaggaacggttccgcataacagcggtagacgccgtagggttgccgacatctccaaggaaaatattgagccgatttaggtctatctgcggggtcatagggaggcagaaattcattattctgcaagacgacttcaagctcgtgccggccgtagagaaggacattgcttggctaacgttcaaggagagctttgattatcctgcggagcatgaggaccgtctcaggcgggctgctttcaaggttatgggcactgcttggaagaacttcaagactaagctagtcggcgagttcgtctacaacccggcaaatccagatccaagagagaaatttccttggatcacggaacaggtctggtcggaattccatgcgaagaagtcgacccccgagtccagagctagaagcgaggcatatcgcttgctccagactaggaaccagcatccgcaccggcttggtaccgccggatatgccggtaaggaagaggaatggcagcgtgaggatgaagaagcgaaggaatcgtggtacaccgctcgtgtttggcgatatcccacaccctcgggctaggaactgggccagggctaggtaccagaaacatgatgatggcacaatcttcatgccaaatgtagaagatcaacgagtatacgaagctatagtaagtgtctaatcaaactagatgttcgcattgtttcccatcgtgcagtttatttgaccccactaaattgtaatgcagaaggagttggttgccgagcaacaagcctcgcaagaggcctgctctcaaagacgcgaggacgacctcctcacgaaagcgttgggcaacaaggaacaccgtggacggacacggggcgttgggtcttctgttccctggaagtatggatttccagactacgcgtggcagtacaagaagcggacttccaacaaggcgaagaaagatgcacgccttgaagccaagatccgggagtcgatacgagctgagctgacatctgaattcgacgaaaagctcgagtcgatgagggccaagattaggtaagagatccgagaagagcaacagatcccccaggctgccgctactgctgcgcacaaagagttaggaagtcccaccgaaaaacgcagcagttgcgcatcaactgagttggcggaaaatccaacatcggtcgacagcgccatcgaccacataacggtaaccgtgaacttactcaatacatgaaagacgtaacgaatccatatgatatataatattctaaaaaaattgattaatctatcgcaggaaccaacgagctgcaccctcacagttagggtgatgccgatcttcactgttccagcagccgagggacttgcgtacaagccgaccccagagacaagagtgcatggagcgcaactcagggccgactgtgcaaaagttcaagtcgactcggtgaagcctgaatacgagctgttccctctgaagtatccaccgaacgacgaggtcctctcactaggaaatgcccgtggtaccttcatccaatggcctaaggacctcattgagatcagggttacagcgaggccaaccactgcaccaggcggtcgtccaccaaagagacccgcctctgctccttcagcccctcctgctcaagatcgtcatgcacaatcttacgatgtgcagttgcagtacgacacggatttcggggaggaccgaacggaggccgacagcaaggcgattcatgaacccccaccgatgaagaagagcaggaaggcacactcttcccctcagagaattactctcgataaacccgaagcaaaggggagaggaaggggaggaaaggtgcaggcctcgcttctagctccaagaaagctagatctgggcaagggccaggaagagactaagggcaaagaggtcaagaagaaatacgtcactccacaggagttccaactaggcatgccattggttggagatgacgtgcttgccgcaatgggcaccgcttgcaaggaccttcacttatactacatggagaaatctaacgccaggaagccaagtaaagctaccaatatccttggacagcacgatggaaagcctttccttggtccaacaaattatatcgtggtcgacttcaaggatcttttcgacctctacaggctctgagtggtggacacaagcctccttaagtgctactccttgtaagtattgtcgcccaactcattctggtaataacaatcggtttaacttgcttacaagatcgttgatcctgtgtgtaggttaagttggcaatggtgtcagaagcatgcaccggaagttgccttccttgatccacaagtggtcactatcacaaatctccagaataaccgtcaaggaatggtcaactacatctacgacaccttgtggtcccgccgagacaagaagtacattatgtgtgcctataatcaatagtaagtgtgttaactaaatatacacaacagcatgacacattccttgagtacttaattaactttcactatattaatgccgcagtgcccattggatcattctggtcataacacctaaatggagtacatgtcattacctgaactccagaattgataagaacgcatatgattggaccccaattcaactagcgatagatgaagcgtgggcccaatacgtgcaaagaggaggcctcaggaagacaggacatgacaccctcatccacaaaaaagacttctcggtgaagcaacaaataggtgaccagtgcggattccatgtgtgccacaatatgcgacttctgtatagagaaaaggtgaagactttggctgagtttgaggtcggtggtctcaattgtgatagactaactacattttagtacttatatatgatcgatcaactaatctggaattatgacaatgtagggcacaataaccaagtctctgactaccagctttgaggaggttcgcgaggagatagccagcttcatcctccgcgaaataattaatcccaaaggaatgtttaggcttaaactaaaatgatgaataatgttgaacttctatgtttaggcaatgatgaacacttattatgcaactgtggtgatgtaactgtgatgcttatatttatgtatatatttcatatgtttatgttaagacttgctaaataaatatttgatccaattaactcggttttgcaggtgaaatatgataaatatttgaatggatgtgaaatatgtgaatggatgtgaaatatgagatggctgtgaatgtgtggttgtgtgaaatatgttgatgtctgtgtatgtgaatgcatatgtatgaatgggtgatgctggggagttggggatattggatatctgcgtttgtttctgtcatctttgcagcgggcatggctagcaaaggcctgaggctagccaaaaaacaaaatttattttttttgtggattatagtcatctgtgacgggccataactaaatgcccgattgagatgagatcatctgtgacgggctctagtttaggcccgattgaggtcactagtcatctgtgacgggctctagtttaggcccgattgaggtcagcagtcatctgtgacgggctctaatttaggcccgattgaggtcatcagtcatctatgacgggctatagtttaggctcgattgagatgagtatcatctgtgatgggctctagtttaggcccgataaaggttagtagtcatctgtgacgggcgctagttgtggcctgatagagataggtcatctgtaacgggctatagtttgactggtcgtctgggtcaaagctatcggtgacgggctttacttagggcccgattgagatatattcattcgtgacggctgtttgcccgattgagataactcttcacatcagtgacttctagcctgtgacggacgctgtgcccgattgagatgagggtatccgttctagtgagtgtcttttttttatttactagcagtatgtacttgtcatggcagaaaaacacacatatcacattgaactataattagtaggcactgatcttccgaataccgattctttttttttcataagctatatactgaaatagaccagtagtatatatctaaacctgaaatgcgtgggtgcataattaattattatggagctacatacatgcacgatatggtcattgcattgcatatactgcaaatatcctcgatcgatctattctgccaataaagaggatgaactgaatgtttcaaaaacgaaagaaaacgaagatggtttcattactgtcaggatttcagcatcatttcctcagtcggccgttcgcatcaaaaacatatatatgtactaaaaagcaagaaccaatcgtcatggatttcaggagatcggcacagccatcgtctgggatcccgattgttcgatcggagcaagtgcaagcacaccatattgcggactctagcgacgactagcgtcactagcctctccgaggtgtgcatatgcaccatacgactgcctgggcaaagaagataagattgatatgatatacacgacataagaaataattaagtagtactaaccacatgcattgtcgctttcgaaaaggctttgcgggagatcgacgagtgattgatgccgcctgggttagttcaactattgctgcatcgcaccgtcgactagtcccgtcccgtcgcgccgttgccttggaggacgatgacctgcaattccgccgcacgatgttgccgatcggtcgacaccgccgccgcgccgcgcgtgcaggtcgccacgccgatggatcacgccgtcacctgcaacgcagccatggatcgacgatgaatctcgctgctgtcgcggaatcgacgatgaatcgccgccgccttctccgagttctggtatatcgcggtctctcccagtgacctgattttcgtatccgatgcactggtgggaccgaggaattatgcgagctcatgtcattccggtttctgtgattaaggggtacgtaattttttttctagttaaaaagttaaacgggtccgctcgttaatccgatatcaggatccatcgaagctaatcacagatcgacggtggataagagcaggtgtacatacttccaggtgtatacttccaggtgtatagaaccattttcatatatatatatatatatatatatatatatatatatatatatatatatatatatatatatatataaagtttggtaagatagatgaaataaccttgtccttgaagatatcccttcagtgctctcataatcaagtagtgtaatgtctttcacttagtttgccattgtactaattcataggatgcaacagcatggttggacgtgttcatctcttgattatgaatattttgtccatgtgctccaaagcgttaagcattggtacgaaatttttcgttgttttttttttcttgtgttggattgggtttgtgctacattgggttttgtgatctatgggcctgtacacatcagtttatggctttgtgctatcacaaatggttagatgggtttcagcttatccaatttcctggtaaaacagcttctactcttattggcaaatgttgctttaatatagtgtatgtatggtggcctctcacagtcacaacatagtacggctaccaaatatcaaatgagtgtggaattggggaaaagaagaaagagacaggtggtgcaatgactaaagcaagaagaaaattagacaaccaactgcattatcagacaatttttcttgctttgtggggtctaaaatagtactgaacgaacttgatttctttgagagagactgcagcattttgagtgcttttttatataattacaaatgcaaatatatatcacacacacaaacacacttgcctcctgtttattgcatccagaaatgaaagtaaaaaaaaatattaggaacagttaaaaatcaggcagccaaagaacacagtaacagcatatactatctgctccccaattgattgattgcacctagatccaatatcatccaaataaacaaaagagcacaaggtcaaatctttagccaccaagatcccatcagccacaaatcgatccatctccaagctcaaaatcccaattctttccaagaaagatttttctcggaggccatgtcgaccgccggcggcggcggcggcggccggcgggtcaccatcaggtccatctcctgcaggggcgtcaaggcgttcgtccccttccagaagccgccgctctacgccgccgtgtcgctcgccggccgccggggaagacgagcggcgaccccgacggcggggagaacccggactgggacgccgccgtcttcgccttcgacctccccgccgccgcggatggtatgctgcagttcgaggtgaaggcgcagggcgctgctcgggagcaagctcgtcggcaaggatgtccgntgccgctggcagacctcgccgtcgccggcggcgacggcgcggcggcggcgccgaggcacgtgagctaccaggtgtgcgcccccgacggcaaggcgaacggcaagctcagcttcaccttcgccgtcaccggcggcggcgcgtaccagcagccgcaggtggatcatccaactccaatctcctcctcttgctgcgcgccaccgccgacgtcgacgacgacgacgacgtcgggtgcgccgtatccgcctccggcgatggcaagctacccgccgctgccatcgctgtccgcgacaccgtcagcttcactgtacccaccgccgccgccgagcagctaccctcctcctccaccgccgccgccgccgccgcctcacgtgacgcaaagcttcgcaccaaacagcagctacccgccgccgcctcctccgtcgcagtacatcgccggctacccgccgccaccaccgagcaacttctacccgccaccgccggcaggctacccggcgcccagtttcccctctccgacgagcacctacccgccaccgccgccgccggagtcagcctcatcgcagtatccaccaccactgccaagatcggcgccatgctgcgatcgctcggtggaccgtgcgctgccgtcgtacatgtcgccgcgtccgccgccgcccggcgcgccgtgctaccccccgccggcggcgtggttgccggatcaagaagcggcgggagcgccgtacagcttgtacccccaacccgggactcgctacttgtagatgatgaattctgctaaattgatttgagctttgcgtatatcacaaattcacaagttgaattgaattctgcttttcatcaaaagaaaaggaaagagttggattcgatctgtaaattaactgtgaatgctttaatcgccaggacgggaacaatgaattgatcttgtggatttgtgagcatgtcgggttgttttgagcaagatcaattgtgaatgtttagtttgtttctggatttttttcttcttctccatgttaagctgtaaaaatctcttcttgtgtaaaggaaaagtcatcatcctttcgacggagctgctgcatatgggcttattgtaatgctgtgtatgggtagatgatttttttttttcaaaaacaagattattatataaaattttctgtaaaaaagccaaataaatctagtttttaaggttatagtcttaatttctattcaaactactagactgtgcgtcctcgttgctaaactgtttaagacaattagatgacctaacttctactctctcttttttcacgtgtgtttattccctaaccagttgtgttgcttactacatgatcttggaataagttcaacggaggactctcaacttgatagcgagaaatgtatacccctaaacttatacaaaccgtgcactcaaggtcatgtggcaatatatatgagtggtttcgctgacgtggcatcctaatcaacaaaaaaattaaaaaagtacgtgggacccatatgtcagctgtaatttttttttcttctcctcttctcttttctctcttctcttcttcagcgagggaggccgacggctggcgggcgagcacggcggcgggcctgtgtggcagcggagcggcggcgggcggcgagcggagcgcggcggatgagttcgccgtcgtgcctcccgccggctcctgcgtctccgccacccacactgtctaccactacgaggcggcggtcagagcaacccccgtccttgtcgtgcttcttcccttcgtcggaagcgagcggaaggcgaagcaggtaggcgacagcggcagagcagcgacgggcgagcgcgatagcggggcggctggcaaaaggcgagcacggccgcaggcggcgaactggtggtttgctgccagatagtgccgccacggcggaaggcgagtggaaggtggtgacgcagctgtgcagggcatcgtgacaccatcgcaggagagcgagctcgtcattgccaaaacaggcgacgtcatcgcctcaacctactacatgagagcgtgggagcgcgacgccggcgcagaggcggacgcgttgctagaggagctgtggaacgtgaaggccaagctcgagctcgccgagacgaaggcggtggcggcgggcgcgctggcggagaaggcgcgagatgcgtacgagcgtgacagggaggacatgaggtgcacagtgcgccgtgctccaccgctacccgcacctcgacctggccaggatcgtcgtcgcgcaaccgggcgataacgccggtgccagtcggcctcctctctctctctctccctcctccggtctcgctttgtctctccccactcccccaccgcgcttgcccgccgccgctccgcttcctcgcaggcccgccgccgcgctctcccgccgcccgcccatcactgctccgcccgtcggccgctggcctccctcactgaagaagagaagagagaagagagaaaagagaagagagaagagagaaaagaaggagaagaagaaaaaagatgtgcagctgacatgtgggcccccacgtacttttttttttctgactaggatgccacgtgagcgaaaccacccatatatactgccttaggaccttaagtacacagtttgtatgagtttaggggtacatatttcggctttgttcggttacgcccagattcaatccgggccgggaatgacaagtatagtaagaaatttatgatagatacaataagagactaggatttattccagaccgggaaccaatttactcatgatagatacaacaaaacatccgaattagttccacaactcttgactagtgggttgattcctggtctcttattgtccctatcatgagtaaattggttcccagctcggaataaatcccggtctatcattgtatctatcataaatttcttactacacttatcattactagcccggattaaatccgggtgtaaccaaacaaggccttttagaaaaatctcgcccttaagtcaagggacctccggtgaacttatttctacaatcttctctccgaacacaccctaaccagcagaggaacctgaaaattactcctctatattaggccgctatgtctgactaggtgaacctcggcagaggatggaaccaagtggcccattagaggcccaaaactcctggccttgctgccctgggttgaattggtcaaggccctacataggtcccacccttttttttccttgacagtagctctgtaagcaccaggtagccacaaagacctagggtgtgtttggttggatagatgagcctggatgtggatgggagatggccgctcgagtttttgtagtgtttggttggagggccgggtagatggggtagcctggaatagggaatattctctcaatatgctggatgagtgcatccggctgatttggctggatgaagccatccagttttggattgggtgatgtgttctattccgattggctgtggttggtttgatttcctgttaagcaagctccaaataattttttctcctaaaccgtttatctaatttatgatttgattacaccattatattttttataattaaatctttaaaataagatctcggatgattatattttgttaaaaaatatatatatgacaaatgggtcccattaacttttggcttttcccatccatgctatatccctccaatcaaataagaaattggatcgtcatatccatacaaaccaaacaaaaaattggattgtcatatccatacaaaccaaacaaaaaattggatcgctatatccaacaaaatatggatggccatatcctatccatacatgaccgtgaaccaaacacacccctagttaatactcgttgacttttttctgtacatacagttttacatatttcacaaaagtttttgaataaaacgaatggtataacatgtttaaaaaagttaacggcgtcaaatattttaaagacggatggagtatgtcacgtaggataaagaacaaaatcactgtccaaattatcgagggacatgattaacactggttttgagagtagtgggtggctttgtaccatattttacgattgatgctaatgaaagttgacccacagcgaggtatctcaagcggactttatcaactaagggagtgacgaccttatctggtaaattaggcccaatataggcccaaaatttctggcccttgctgcctttgggctcaacacttgaaggcctcctcctcctccttcaatgtagaatccaaccgaggccatggagcagcccaaaacggtgcaatggcgtgagcaacagacacattgacttttttaaaaaaaaaaacacagtgtaaatgtagacgctaataacacggtcacactcatcgtccttgtgaacacaaacacgtaaatcctacccctataaacatctccagaagattagaccgacatatcttgatattaacgaagtcaccacgtacacgttgtttaatcatcttgcttagttagtcatcagttaagggatgacagcactagtaatcgacaattactcgatcggtaggaagtgcaggaggagtagaccagttaattaactggagctcgtggttatgctttttactagttgacaaaaaatttggtcggtctcggtcaaacgatggcacagcacgggcgcagtttgtagctgcatctaggccactggtggtgagtagtggttgctggagctgaaggagcatcatccaccaccatggccatgtggggagcaggagctgaaggagagcacgcacgcctatcactatcatagcattgtacgcacacgcgcgcgagcgattcctgttcagatttccatgactaaaatatatcatatatgatcttttattgctactttctttgttttttgttttatgtcctaagttgtttgatttttttttctttgttaaattttttataagtttgagcaagtttatagctatagtaatactttaaatacaaaacaaacattatatcaaaatatatttaatattaaatttaataaaactagtttgacggtgtcgtataattttctctataaattagatcaaacttaaaagaattttgactaaaaaaattcaaacaactattttatgacggggcagtaatcgagaagtatcgtacctatccatggagtgcaaaacaatggcacggtccatgtgtcgtgtcgtactaatatccagtctattcgtgtaagcgcacgcgcacaaactccaccgatggatgaatggatggatgcatatccatcaatctgttgtctaatctcgcagcatcagcagtgcgctcctccggcttaccgctggttgtctcttctccagagaggcagagaccagagtttcaactttcaacctcacagggggcattttaaacatcgtcgtcacgagtctaaaccaaatcaggatggtttctctggtgcagaaatgaaccaaatggtttatcataagtttctcaagggtgcagaaatgaaccaaatagtttatcataattttctcaagggtggtacgaatgaatgaattaatgactactataatacgggatatctctttggaacacattacaatatattaaaaagaataaaaataaggtcttaatttgtaggggctatattcggtggacacacttaccaacggccctgattatagatcttaaggatcaagactctaaataacgaatttaggagagagatgcgttagttaattacatgtatctatacatcttgtattataaaacaacctaaaaagaaaaagcagtcgtgcctttagaatgaagggagtaattgactttgactatctgaacgtgcacatgttaaatcctgcattcctcttccgttaattagcccgaaaccaagaagggaaaggtagagagataaacgtatacgtgttgctcgctgattggtcgcctatcctctctgggacaaaccccgttctgaccgctaccttgtccccagttaaaccctttcccaccattgaccatgaatgcggtacacgtggcaagcaatccacaccttgcattgtccccttcatccttggttaattaccctggcactggattaattaccttaacctgagagtaacatcacagtacgtgtgtagtaaaatactcctgtgaaggatggatataccagcaaaatcttgtcagctggcattttatcttatcctgttctgatatgatgactagcatacactgtaggagcatatttttcttactattccgctggcattaattactgtaagtacaagttatatactccaactatttttatataaggaatattataaagttacaaattcaaaactaattactcaaactatgaatatatatatttggtatgtaaaaattgttccaatagaattatatttttaatgatatttcgattttataatacaccttatagaaagaaaaggagggagtatacgtaaccaatgcaacgaaaaataatttcaggataaggtctttacatttctacctttaattagtggtccaaactccaaagcaaacctgagtgattataaattaaggaaagaaaaccaagttagtaattttgaagttatatattaaatttcaaaattggtgtagttttatactccacaactcaacaagcaatactcctaaataaaaaatccaagcaaagtagatctacctagctagcttaatcatataagcttcacctggttttttgtttgcacatcatgtaagaaatcatgcatatgagtgtctctttagtctatatatacatagagatctcatataattacatactggctaccaagataatatcacagatctgtatataatactccagcatggcctttctactgattgactatgcggatagtacagctaattagacgatgtgctagctgttgtatattgcacaagttgatactctcctctgacgttagtaggagtacactataacctacacttaattaattaattaattaaaattaaaaaaatgtgggtgatggagcagataatggtggctggaagcccggatccaaggccccatctttgaccatcaggtcaaaactgtgtgtgtgctgacatctaagcgagtagcactgcttgcattgctacctttctaagcaaaaacaggccattatatagtctagagcccacatgcttaattgttttattttaattcccatcttaattttgagtagtgatactgccacgtgtacagttaggtactgtgttcaaacgaaatttgtgatgcttgtgttaattgattaacactctcacaccgacatatataggaagtgctatgagaagatgcccgatagtacagtgataaagggggtgtggttttaatcctaaagtttcgtattcaattttcaacatgctcatatttttttatgaaaaatgtcaattttttttcaatctgatccttatataggacatgtttaggagtttttaatagctacatccattgaatcccaattctctcatattgcctaaattttactttaggtcgtaaaatctaatggttgaaaaatctagaaatgaacgattatatagaagaaaaaaaaccataagttcttcaaaacccttttttttttcttatcagttggctacttaccatctacttcgtgtgatctacaattcctttaaacaagaccttaattacattttacaccctgagcccacctgccatcgatggctagctcataacttagctaatgtcccaccgctagcaatagtagctacttgctcaatttcctactgataataatgaaggagttcaaggcaagcaaaggagaagtcttaccctgcatctagagtaccaactttgaccagcttattagcacactcaattagtgcacatgattcccggttttttcccgtcaaacaaacaccaccacactcaagtcgccacgtgtaaatattagtcaatactcgttattgaaaccggacatattatattaaatgacacgggagattacaactctgccatcataataaacagataaaaagaatatcaaaatagagcaaagagcctcggcgtcttgaaaattcacatgaaattaatacgatcgcatgagactacccacaatgttaaccagctccgacgaaaataaaaactaatactataccaatattaatatatagcacctcctctaatttcacaaagtttcatatcaaaactcaccggcggtgggccctagatccaattgtcattgcataacaaaatatagcaataggccctctctagctcacacttactccattagtctcaacattgacaggctgtggactgggacccacctgccggcattctcatctctctcacacacacacaccaaattctaatcaaaataaaagcaaaggggatcatgatagtgtcacggctttgaccggctactgccattagataagccctaatcaaagtggattagtgcttaattagagtgtgtgattagcgcgccggatttggatctgaatcggagccgggagctaggatcagtgagctggaagtataatgcccccaatttctcaatctttttttaacctcggagaacgtgctctcctctttcttttaattttctttttctcttttcaattcaatcttgccttttaattttgaccccggtcaaactgctcccatctcgacatctctcatggaaacaaacgcacgcgtcacatgccacacatgcgtttcagtgtacagtaactgaccgaaataattactgacttaacaacaactgtcaaaagttactactaattaccttagctaacaaagatacttagcactaatcaggaacaagatgacgtaatgcgtagaggcatattcgaatctttcactgttttgatccgcttggaacaccggttaataacggcataacgcgtaatatacgccatagtgatttggacttttttttttctacgtacttttttcttttctttttggcctaacgaccgtcatgatgagcatttttgactggatttgtattcgaattcgatttattccgtctgactttgcttgggtaaaacggcacctgaaaattcgtgcgtgcgtgcgtgccttgaattatgcacagcatttgcagtttgaccaaggcttgtgctacgtgcggtttagctgcagagatctcggtgtgagtgagtgtgtgcactgaacgatccaaatatttttgaatggtttatgccaagtggaatttgaatttgctatgaaaattatggtattcatgcctacaaaattgtttgtaatcagttttggaaatttggataccactgtattgctggactcgatgggcgcgcacacaggatgtgaaatgtggggaggaagcagtttaaagtttaaacaaaccagaaactgaaaaaaggggaaagcaaaagtgagttgaaattttgcctgccaccacgcagccttgcttttttttttcttcttttcttttttctgatcagaatgcaacgaaaaaccatgtacaaattagcaccaaaacttttctgtaattacaaatgcggacacagctgcagtcgaagctgcagctgaatcatcatcgcctaaactgaactcggatcgagcttaatcttaatcacccccgttaattaccctcccggagactaattaattgattttagcctagccggagcacgccaccgcgccgccattgccgcagacgagggtggtggtggtggtggcggcggcggcctctcgccggcggcggctgccgagcctgccgaggaaggggaggcctcgacctttggaggatcttctggtggtggtggcggtggcggcggcggtggcggtgtcaccggcggcggcggcgacgacttcttggatggtgtccagcttgggcgaccaccgccgcgccttgctgtagccgacgagctcctcgtactccttctccagcttcttgtccccgcgcagcacgggggggttggtggcggcggcggcgaggtcggcgaccttgtcgtcggcggcgaggaggaagtcgtcggagaacttgatctggagcgtgccggacgcggtgcggaggagctcgaacggccgctgctgctgcttcttggcggcggaggcggaggaggcggagaggaggaggaggagggaggaggcgagggagacgaaggagaggacggagtggaacaggtgggcggggaggaggaagtaggcgtggcccggctcgagcacctcgccgggcg

SEQ ID NO: 8919 - DNA, 22631 bp, Oryza sativa
aggtgagggtggggcccacgtgggggtggcaggtttgacactttgaccggcattttttttcttttttcttttttctttttttgcgcggcgtttggatctagctagttcctcagtcgtcacactaccagcttggctttcccactttttttattttcctttttctctttttatatatactactgtataaatataaaaaatacatatagagatattcaaaagatgcgggtgtgtcagaatgtggggcccggtgttcagtccacgtgcctgcgacggtgccagccagtgtgtgtgaccgtggatccatttcgaggcgacgtacgctcgtgcatccatccactcgtgcgtgccaacgtgacaactactactcctcttctaccgtgcaaattttaatggcgcgatcgagttggcaaattgcgcctagtaatcgaggtgagttcgtggatgtttggagcacgtttggttagtgtgagggagtatttttgtaccggattaaagtaataatgttgcgtagctttaggaaccgggactgatgtgtgacgagcgatttctagcgtttggttagagtgattttgcatggagttcttgaaatctggtatagtgcgacaaatgatttttatcctcctgttagagcatagtaatattttcgtgtgtctctagaaaccgactaatgttcgtattgttgtgaagctcttgaaatctactatagtgcgacaaatgattctagtcgattaaagtgatattgttgaggagatattgaaatatgctatagtacgacaaatgattatggccttcagctagagtgatattgtcgcgtacctctagaaatagactaaaggatgcattcagaagtcaatgttcttatttcccactccctcgttttctacgcgcgctactctttctaaactgctaaacattgtgtttcttgaacaaaaaactatagaaagttgtgtaaaaatcttatttattcttttttaacattatttacttaacatttaattaatcatatgttaataagctatctatttttcatgcacgtgggagaggttcccaaccccttctccagaacacatcctaaagtgatattgttgtggaggtcttgaaatctgctgtagtgcgataaatgattctagcctctagctagagtagtgatatcatcgtgtagcactaaaaactgaccaaagttacattgttgttgagcgcttgaaatctgctataatgcgacaaacgattctagcctttggctagagtaatattgtcgtgcagctctaaaccttttttttttgatagtttgtggtcaagaaaaacatttgagttgcatttgtgtcacggaattaagtcatggatgcattgggaaaacacaatgtgtttgtcggtaatcctacctaatatgtggtgagcatttttggtgtcagattaaagtaaatcttgtcatggagctctacgaaccgaccgaactgtgaagagcgatttttggcatttgattaaagtaatttgtcatggagctcttgaattctgttgtagggcgacaaatgaatttttgttgtggatgtgatcttgaaatatgctaatgtgcgataaatgattctagcctccggctagagtgatattatcatgtacttatagaaacagattaaagtaatattgttgtggaggccttgaaatctgctatagtaaaaaatctagcctctggctagagtgatattgtcgtgtagctctaaaaactgactaaagttatattattgtggagctcttgaagtttgctatagtgtgaaaaatgattctaacctctagctatagtaatattattgtgtagctctaaaaatcgactaaaataatattgctgtggagctcttgaaattttttaatagtgcgataatgattctagtctctcgttagagtaatatttacatgtacctctagaaaccgactaaagtaatattgttattgaggccttgaaatctaccataatgtgaccaatggttctagcctctggctaaagcgctgaagtaatattatatatagagctcttgaaatttgctatagagcgataaatcatttaagcctctagctagactgataatatcatgtacttctagaaactggctaaagcaatattattgtgtggagcttttaatatctactattaaaaaaattagcgaccggcaatttcgttgtgggatcatgaaataattttagcaacgggccaaaattatattggaatagaacactggatcactaagaaacattttttatggcacactgaactttgccaaagagaggcgcctctagctagttaatttgatcaagaaaatattgaagtaacacttgttccatgaaattaaaaactgtagcgctcggttcaaagtattattatcgtttaatgtttggaagactcaagtgtgtgacaagttcaaagtaataaggtcatgtggcactttattaccaaaaaaaaaatcaatggtgtgtggccaagaaaatattaaagttgtatttgcgccaataaatcaagtttctgataaaaatatatcctcgtcaattgtccagctagtttgcctaaattgtgctaagcatttttggaatttggttaaagtattattgtcgtggagctctagaaatgaaaatgtgacgagcgattcaatatttggttaaagttattttgttgtcgagctcttaacccgctatagtacgacaaatgattatatccactagccatagtaatattgtcgtagagcacatgatcatcaacaaactttttatggcctactaaactttgccaacaagcaaagtcgctagattgatcaagaaatgttgaagttaaactttgccaacattagagttctctgttcatcaagggaccagaaagatgaactatactcgttttctcacaatatttagacaaaaaaaaatataaccatttgtttactcttctcaattcttgttggaacaacctctcactcctatgatatgcatagatacaaatgaacaatcagccccctacaaaatttttgccggaaaagtcccctacaaaattacagtgacataaaaaaaaaaggacgatcaacatggataataaactaaggaggcacgtacgtatgtaaatgctaaagtttcattttgtttagcatagcaatgcaattcaataggcggttgacatactgattctggacttgtttagatcaattttttcacccagtcacatcgaaagtttggactcgctaaatgataccaaacttttacattagaataataaagctaccaatagttaacctgatcaccaaatgatcaatgccttctagaacaactcagaccctcttctagaacgaacagaagcacaattcaagcaagaactactaccacaaaggtccaagaaagcggtgcaaaatttggttttggatttgaatttgtcgacgcatgatgttcaaccgtagtccgatcgtcactactacactcctctgcagtccggccgcatgcatgcatcttctgcagctagccagctctgaatttctctgatcatcatcatgcatgcatattatcatatcatcagatcgatcaccctccttccaaaacatgcattcatcatcaacagtaaaagactactactcctcctaaaagttaatttgtttgttaggtttggtgttgtggcgttggaccaacaacaacaacaacaacaaagccagcagcaaacacagcagcaacaatcatgtgtgtcgttaggttcggtactatctgtcaaaggatcgagtccaagctagcgtttgcatggaccagagactgctgctgctgctatcgatcaaccacacaagtgttgaaagttccaaccaaacccactgtctctaggcttaacacttgctgttgtcagctagttggtcccatggaaactacattgtcttaatttgggtgcagtttttagccacaggttcagtcattttggaacagctagtagtgattttgtccgctatttcgcctgtttatccaatgggtggaacagtggttttcaggggggaacagtgatttgctctgagatttctatagctcttttagacttggagtaattgttctaattatttatccctccttccctggccgccattgccgcgccttatcgccatcctctcccttcttcccaccctattgtttcgcttatttgtggaataaggcaaacggcatatttgcaaacgaaaaataatttatgtgtggaataagtcaaacggcatagttgcaaacgaaaaataatttatgaataaaacttttatggtcaattgtcctcgccattaataccaaccacaacccaccaccatttagcggccatacaccaaacatcacacgtttgtacatgccccaacacaagttttaagacatggagaccacagtcgtaaatcctctcatagaaatcctaacaaaaagtgcacatacacttactatcacaggggtttaatcctggttgggtccaccatcatacttttgttctttccctggtaattaatacatccccatttcatattataagtcgtttgatttttttcctaatcaaactttgttaaatttgactagatttacaaaaaaattaacaatatataaaatattaaagtaatatattttgataatatgtttgttttgtgttgaaaatactactatatttttctataaacttagtcaaactttaaaagtttaattataaaaagtcaaatgatttataatatgagatggaggaagtacgtaggaatagtgttatgtcacaagtattttgacgataaaactctagtagcaattacaaaatagaagcagcaaaattgtctagagtattaaagttttcatccggtttcgttcgcattcctaaaggttgccgtgatatctgaatttcgtccacccaaacagatctcggatcatgactccacacctttaatctaagtttcaaaccctcctttttgcttcaaccgatcgacctgtggacgtacgaaaaacagaaggccctttacttcatgtgcactactcgagtgattccttttttcggaacgaattgaatgaacataattcgagtcaaaaagcaaattaaccaaaccaaaaagcgaacgcacgcagtgtcgtcctatcgaaatgcacgggtgacaacactggagtatagtagtggcagtactcttttccatgatctttattagagaatgatatactccctccgtaatgtttgacaccgttgactttttagcacatgtttgaccgttcgtcttattcaaaaacttttgtaaaatatgtaaaattatatgtctacatgaaaatatatttaacaatgaatcaaatgataggaaaagaattaataattacttaaattttttgaataagacgaacggtcaaacatttgctaaaaagtcaatggcgtcaaatatttcgaaacggatggagtatttttttttgcctatcatttacatccaattgaatatatgtaagcttttaggacccctttaaaatacaggattgagaaaacacaggaatagaacaaaacataggaatagaatgtcatgattattggattcctatgggattttcaaacacgggaaagtcttcaaaccatcgtttgattaacatacaggaaaaatactggaattttagacacacgtagagaaaatcatgaggtgagacctcatgttattttcctctaaaattgttctagcaaggttaattccatagtaattttaaagggattagtaggaaataatccttagattcaaaagactctataggataaaattctatagaattcctatagtttttcctttgtttcaaaggggctcttaaaattgagaacttgacctttcaaacaacccaatgtaaaatttactttcataaaaatttaaacttaaaatttcaaaatgctactcaggtgacggcaactattacgctacctactctttcgctgcaactgcacgcctgcctcgagacctccttctctccctctcctccggcgcggtggccggccgggcggcgctttgacccacactgcccggccacggcgaggcgtagatgctacgtaggagcaggagtagggtaggagctagctgggccggccatggcgctccttttgcagcagctgggagcagtgcatcgagacccggagacccacgagagctacggtatctgtgtctgtgtgtgtgttttttaacgtacgtgcgcgtagcacaaggctgccgagtaatacccagatgagaagaccatgatgccatctctctctctcacacagagtagggtgcgttcgtttccggtgctttggaactcattccctccataccgaaaacaagcggttcattatcacgtaattaattaagttttagtgtttttttaaaaaatagatcaatatgattttttaatcaactttcgtatagattgttttttttaaaaaaaacacatcgtttaacaatttaaaaagcgtgcgcgtaaaaaacgagaggggagagttgggaacaccctcttgcgaacagagccaagagcaggtaaactagcagcctataaatcagctttaaaagtatatcgagatgataaaaaaagagagagaagcatgtggctacagatttatagccaactgtagtacggactttaagacacaatgtgtgtatgacagatgtgaccagatattaatagtgtagtttttatttataggtaactattatatgaattgactattaaattgactatagataatttagagttagtagttggctatactattaaacttgctccgagtttaacactccctccgtcccattttaagtatagttgtgggtttctatgtaatgttgatcgtccaccttatttaaatatatttatgattaatatttttattatgacatatgataaaacataaatagtattttatgtgtgactttaaaaaaaacaaatcataaatatttaaataagatggacggtcaaacgttagacatgaaaacccacgactgtacttaaaataagatgaaaggagtatatagtagcgtagctataagccaactgtaaaattatgtggagaagaaggaatttaaaaattgaaaaagggttagagtaaggataatagcaagcataagtcaaaaattgaaaagggttagagtaaggataatagtgagtataagtcaactatacttatgtggaggagagagttaaaaaaataaatgagagttcacttaacacgtgctcctggataaatacactaaatacataagtgagaaaaggagagaggagaagaaaaattgaaggctctattatttaacttgtacttggctttgatggaagagctgactattcacatacttcaacatgaatatattaaatgtataggcgagagatatagagaggagaagaaaaatagagataactttataacttatctactatacatgttaactctattattatttccgttctaaaatataacaactagtattatctatgaacgtggacacacatttatctaatatgagctatttaaagatggagtgaggccgtgtttagttgttttggcaaaaaaaaattgacatatacggacacacatttgaagtattaaacatagactaataacaaaacaaattacagattccgcttgtgaactgcaagacgaatctattaagtctaattaatccgtcattagcaaatgtttactatatcaccacattggcaaatcatggtgtaattaggcttaaaagattcgtctcgcaatttacatgcaaactgtgtaattgatttttttatcacatttaatgctttatacatatatccagacatttgatgtgatgtttttagttaaatttttttttatctaaaccaggcctgagaatgaaacaggaggttcgatttttacccgggtcaagtggcgaagaattccaggtagtacaggtagtactgctttttactgcggtgaaaggagcaaagcttctgcgtctgcttggcgttggtctacgtctaacgtgagcgtgcgtgcgcctgttggtcgtcgtccgaatggcctggtctccaacctcctttttcgttcaacgcctttgttggtcccccggcccctctcttcctcttcttcatcgatcaccaccttttcttttttctttcttcccctaaagattatatttgcgcgcagctgatgcagtgcactgcagcagggagagcagctgtggcactggcagtggctggctgctgctctttggtttgggtttgcctgcctagacgaacctctgcaccgtcgtggtccacctctgtcttgttaagtactcccttgattctcatacggctcgtttggttggagggagtttttaggagagattgggaatttaaagggatgatgttattaagggcctctttgaatcaaagaatttatgtaggaattttataggatttaaatcctataggaaattttcctatttggccctttgattcaaaggattgaagctttccaaatcctatgaaattcctatggaatggcacattgcatgtggattttggaggaaatttagcaagagctccaacctcttggaaaatttccttttagtctatctctctcattcgattcctgtgtttttcctgcgctccaatcaaacgaccattcctatgtttttcctgtgttttgcaatcctctattttacacttcaattcctgtcagaatcctatgtttttcctattcctccgttttttctaccctgtgattcaaaggggccctaagtgttttgttttgtcgaaacaagatttcggctatactaaaaagaggtggctatcaagctagaaaagtggatgggtttggagacgaagaattttatacaggttcaggcctttttattcaagaagtaataccctactcctgtccggggatgattccgccgagtatattattgattgtataatctaggtcaaaaaaccgtgccccgagaggcatccggacccctccttatataggggagggggtccgctttacaaaatacagtccatatcctaaaagaacatggaattacagataaaatacaatcgtaaccgactaggatctcgggtatttccttgacatacaagtttagaatctaacccgagtcctcatgaaggtattctgtctttattcggtatcatgtacccagctggaatatgaccgccatgtagatatagggtatccataatctctacagtaacccccgagacctttgcagtcgacgaaatagccatctcagaacaaaaaacaataatccgagtgcttcaattcaacctgctccagcctgccgagtgctaaaatcaaagactgtgaagggcgaaaagaaaacatggtgcatcgagtagatgcacctaattaggtgtagcccccgactatgtggttagttgaaaaactaaacatgtagtcaagaaccgagtggttttacaaccaaacattatatagcaaagcatgtgtggtagtcagtaaaacacccagccgtctgcttcttagctgcaatacatcgagaaaaaaatatgaaaaggcccgagtgataaacactcaaaaggtcctcaaatagacatatttgacaggaatccgagtaaaaactctaaagacaacccatcaaatatgataaaaaatcatggtaatcaacgagtctaatagcctaggctatggccctcatcataaccaaaatgtgcatataacatgctaagagaatgactattaataaaccagtcatctcaaatcaacccaaacaacttttgcagcctaataaagctgacaaaaatggtataacacctttctgtcgggcacctttttatttgcagcataataattccaaagaattatcgaaccgcgttaaaaaggattttagcagcatcgggccacatcattgtgagcacaaattgccaaagcaaaaagcacctaagtccctagggatcacaacgggccacgctgattataatattgggctgaagtactgtacagacccaggcccattagtactcccgataccctaacaaagcaccgaagtccaagcatcgcttcgtcttccccaccgagactctcgccatttccccactccttgctacagtagcaaaccgcaccgtcgaaactagggttcatcaatccgtcccaatccattctcaaaaaatcccacgaaacttctccgcgtgtccaccgcaccaattcctcattcccctccagctatatcttggaccaaatctaaccatgcaactcgcatccatggcggaggagagagaaagtttcgagagtcagtgggctccctccgatgtaacggaagagaatctgaaagaaatggtggtgcacggcgttcttccgacgaaggaaatcatcgggtggcgaccagcgttcggcaaagcattcccgacccccgacacacacgagattgtggtattctctcacttcttctatggcggattttctcttccaacctcaagattcttccggggaattctgaacttctatggaattagcttgcatcatctgaatccaaactccatagtgcatatcgccaattttgttcatgcttgcgaagcttttctgggcattaggcctcatttcgccttgtttcgccgcatcttcttcctcaaaccctagccaaacaagagcaaactgtgcgttgttgggggtgctggtttccaactcaggggaacactaagccaaaaatatttctccatgcccttcaagacctcaaacaaaggctggcacgccaactggttctatgttcaaaatcctaaaccagcccttcccgagtactcttgtctccctccagtctaccaagatacatggaattcattgcctacaggagatgaggcagcccaggctgtagaactaatggagcgcatgataaagctgaaagagcaaggtttgcagggagaacagatcacttggcacttcataaaaagccgattagctccaatcaaagagaggtcccgcacagcttttgagtttgacggcaaacatgatccaaatcgtgaagatccagactctcttaactttaagattatgaaggaaaggatgtacaagatcttctcgaatgctatcgtcgtcagctattcgcacttgctgctagtcatgccattcaatgctttcaatcctcctccaccgatatgtaatcaaacatttcaacttttcacagaatatagtcttgtctttttgttgaatcaattaacaatgaatgatattacgaccaggaatttgctttgatgaaatcggaccccccagtcgtccaatgccgatcaccccaccgccaaaccggtcaagggagcgggggtcccaagacccgttctgaagcccggccaaatacttccaatccagccagatttacgcaaaaggaagttggtgtcaagtgacgacgaaagcgatactgctagaaagcctggagaccgagaggcaaccaagaaactgccaaagcaggctactccaaggaagaaaacatccagttgtcctgtgccaaagatcaggaagtcttccaggtacaaatcatataacgatctctcttgcattgatgtgcacccagtgcagaaataatactgaccagccagatttacgcaaaaggaagttggtgtcaagtgatgacgaaagcgatactgctagaaagcctggagaccgagaggcaaccaagaaactgccaaagcaggctactccaaggaagaaaacatccagttgtcctgtgccaaagatcaggaagtcttccaggtacaaatcatataacgatctctcttgcattgatgtgcacccagtgcagaaataatactgacaaccaaacttgcaggaaaccatctgatatagatccttctggaaaagactctgacccgactagcagggaaacaaacttaaaaggaatcgagccaactgacgaggatcagccgagtcacagccagccagcaaccgataatgtaggatctggtgatcaacccccgactgagaatgagtcggccgaagctggagccggagttaatcaggagcccccgactaaaaaccagtcggacactaggccaagccaagagattccagaagttggagctcgggcagacagccctcgtagacaagacgccagcaacgacccgatgccagggtctcccattaaggtgcaagagtcgactcgttcccgtccggaaatcatcacaggtaaacaccttgcctgaaatcgtgttgatccaaataactctgatcaattgtctaacctttgtcagtggatacattaggaccaatgattggtgatgaagaagaaattccccgtatacaagcagctgaagactcgcacccttctatcttagtcaagtggtgggacgatgacaggcaacctcaaggaatcataataaacaaacaaaaagaagatgaggaagtatgcttgctgaaaaaggcactcagccaggccactcgcattgtgaatgtaagtccatttacgcatagctttaattgttccccttcatattttgctgaaaacgccggtaaattcttattgcagagaatccatctcaggaatgaggcaaagaccacgacacttgagaaattagttccccatcttggaactcttgaagccaccaaaagccagttacatgaggtcagagagctcgcgaggaaaactgagcatgatctgaggaatagaatctctgagcttcaaaaatctaactatgaattgagtggttcatccaaaggtaaataccatatccgtctgacatattcgtgaaaccttccttgtcatatcgattaaccgaagagcatttcagtgcaagccgccaggatttccgacctagagaggcaggtcgaagctctggagaaggacaaggccgaactagcaaagcagagggacttggccttaaaagatgttgaaggtaatgataactagttccccatgctcttatagccacctgttgatacaaatttattcgtgcaaatcgcaaaatcaagtcccaggcacagtttgatgtcttaatcaataagatcaataggcttgaaggggccagggataaagtcgctaatgccgctaccctactcatccaagccatgttcttcaataacgccggttcgagtacacttgacgcttccgagatcttcgacaagctgagagtcgctccggatacttacttcaagaatattagggaggttggatgtatgggagcaagcatggcgttagctatgaccaaatctttataccccaaaatcgatattgacgccgttgatgggtttgcagacgggacaagcgaagaaacagccctcaacctcatcaatgatgcgcaaaaagccgctgacaagattgctgctgacatagttgagagattccaggatggcgaccttcggccgactgggtctgataattccgacgatgaaaaaactgacactgattgatgttatattgtaattgtgattctgatgatgatgatgacgatgatggaggtacaatttgtacaatactgataaatttatgctgtgcatgatatttcaaacttagctcctgatttcttaaaagtttttgtcaaaccttgttgagcctaaaactcgcaaaagttgttaaaaaactttcagtcctcattgactaagccaaaaaatcaaacagagcaatgataaatcaagtaagcgaattgaattgataaagatcacactccattatcatagtagcccccgactgacaactcaagaaaaggcttgatgttagcagtcgaagaggaaaatacagaagtgatgcctaagcataaaaacaacgaaggtgttcaatattccaagaattgttgacaagagtaccatcttcacgcttgagtcggtaagaacctggccgagtgactttagcgattatgaatggtccttcccataagggagataacttgtgccgatcctatgtagtttgaattctcctcagaaccaggtcgccaactaaaaaggctcgcgatcgaacattccgattatgataacggcgtaacccttgtaaataccgagctgactggattagggctgcttcacgggcttcttccagtcggttgatgtcatccactcgatcctcttcatggcgctcttcccggaagttacgaaatcggagggattcaaactctacctcactcggcagcattgcttctgcgccataaaccaagaagaacggcgactggccagtagcccgactgggggtggtgcgtaaagaccaaagtacagacggcagctgttctacccacttgccagcatagggacgcagtcggtcgaaaactcgtgctttgatcccttgaagtaccatgccattggcgcgttcgacttgcccgttactcatggggtgtgccacagaggcgtaacaaattttaatgccaaagtcttcacaaaaatctttaaatattccgcccgtaaattgagtgccgttatccgtaatgatacgattcggtactccaaaccgatgtacaatattgatgaagaaatctctagctttgtctgcggtgatggtgacgaccggtttggttttaatccacttggaaaacttttccacagctacaaagagatgagtataacccccgactgcctttttgaatggaccgaccatatcaagcccccaaaccacgaacggccaagacaacgggatggtttgtaactcctgagctggtaagtgagtttgtcgggcaaagaattgacaaccttcacatgttcgcacaattttgtcggcgtcggaaacagctgtgggccagaaaaaaccctgccgataagccttgccaacaatggttcgtgcagcagcgtgattaccgcagatgcctgaatgaatgtcttttagcaattgtcttccctcttccaaagatacacagcgttgcaggattcctgatggacttttcttgtacaactcggtctcatgaatgacatagagtctgctgcgcctggagatctgcttggcttcatttttgtcttgagggagttcttgtttggttagaaattttatgagaggttctctccagtcggcttcaatcatgcttacgccttgagtatccatggcttcaattgtttcttttctgggcacggttggttcgtaaagatgttcgacgaacacatctgaaggagccgcttcctgttttgaaccaaaattggccagcctgtctgctgcctcattattatgtcggaggacatgggtgagcttgagtccgtcgaatttatcttccaacttgcgtacctcttgtcgataagcggtcatattgtcatctagacaggaccattctttcatgacttgattaacgaccaactgagaatctcctcggacgattagtcggcgaatgcctaaagagacggcaatccttaatccatggagcaacgcctcgtattccaccacgttatgggacgcagaaaaatgtatccacaatacgtagctcaatctttctccagtcagggaaattaaaacaaccccagctccagtgcctgtaagcctcttcgacccatcaaaatgcatagtccaatattccatcttttcctctggcatgttttcttgacactcggtccactcggcgaggaagtcagctaaagcttatgacttgatcgaagttcgtggcttgaaagatatgtccaaagatgtcaattctaaggcccacttcgctatccgtccgtttgctttgtggttatgaagtatatccccgagtggaaacaatgtgaccaccggaccgagtgaccttgaaaatagtgagacaatttcctaacggtaattaagacgccatataataaattttgaacctgaggatatctcgtcttggagtcggccaaaacctcgctaacgaagtatattggtcattggactttttgaacatggccttcctcttcacgtttgacaaccaggaccgtgctcacaaccttagaggtcgccgacacgtataacagcagcggctcttgtggatgtggcgaggccaaaactggtgtagtgagaaattttttgaagtcttcaaaggctttttgtgcttcgggtccccactggaaattgtcagttttcttcagcaacttgaagaagggcatcccccgttcaccgagtcgcgaaacgaaccggctgagcgccgccatgcaatcagtcagcttttggacatctttttgtgagcttggcggtttcatgttgagcatggcgttgattttctccgggttggcctgtatgcctctttgagataccataaatccgagcaacttccctgacggtactccgaagatgcacttttcagggtttagtttcatcctgaaagcacgaatgcttgcaaaagtttcttctaaatccgcgatcaggtcatacttctgcttggtcttgacgactacatcatcaacataagcttcaacaatgcgaccgatctgagttgaaaaacatctttgaatcatgcgttgataggttgctcatgcgttcttcaatccaaaggacatggtgatgtagcagtaggacccaaagggcgttataaacgaggtcttcaagtagtcggattctttcagtcggatctgatgatatcccgaatagcagtccaagaaactgagtagctcgtagccggccattgagtcaaccacctggtcaatgcgaggtaacccgaaaggatctttagggcaagacttgttgaggtcggtgtaatcgacacacatgcgccattgcccagtcttcttccgaaccagaactgggttagccagccagtcgggatggaggacttctttaatgaagcctgctgctaacagtttggctaattcctctttgatcgcatccttcctatcttgtgcaaagcggcggagtcgttgtttgatgggtttggcgtcttccttgacatgtaaagagtgctcaatcacctctctgggaataccaggcatatcggatggtttccacgcaaaaatatctttattattctgaagaaaggtgatgagagcgctttcctatttacaatctaactcagcgcctattacagcagttttggtaggatcggagggatctagtggaatcttcttagttttgtcgtcgccttcttcggtctttgacagcttggtcgtaggcacctctccttcgcttgccgtagtggcagccaatcggatctcttcgcgagcgagagtgatctcgtgggtttgggctatttcgcaactttctttgtcacatgtgacggcttgcttgatgtcgctccgtagtgatatgactcctcgaggaccaggcatcttcatcatcatgtaggtgtaatgtgggacggccatgaatttggctagagccggtcgtccaagtatagcatggtacgttgtctcgaaatcggcaacttcaaaacaaacgttttctgtgcgaaagttttcccgagtgccgaaggtaaccggaagagtgatctggccgagtggtgtagcggataatcctaggatgacaccatggaagggtgcattactcggctttaattccgttcgaggaatctgcatatcgtccagagtcttggcgaaaaggatgttgagtgcactgctaccatcgatgagggttctttggagcttgacgttacgaaccactgggtatagtaccagggggtaccgccccgggtggaccactcggtcgggatgatccgagcggtcgaacttaattgctatctctgaccaccgaaggtattggggcgtgttaggctgaaccgcattgatctcccgttctgttagcttctgctttctcttagattcataagccaggggtccgccaaagatgtgaattagttctttgcgatgatcttgaaaaccaagtgggacatcgtcttcaccatctttcttctttgatgtgccttggtctccgtctgagggcttacgtgcgttcttgacgtattgctctacaaactgtttgtagacgaagcaatctttcgccacgtgattggagttgggatgatgcggacattgggagttcattatcttgtcgaaggtgttgacgcgggaacgttgtcgggaagatggagaggttgttgccacaagctcttcgggcttacgcttgcgatccttgtggttgttacttccactccctcctgcggtcggctgcatcggatcccatataagaagctcgctctttacccgatcattcaaacattttgtgggcggcgctcctgctctattgttgcgtagcaatacaagcctgctcatgctgcttcggcggcgctttttcgccttctcttcgctctggacaggagccctaatggacacggggagggagcaggcgaagcgtatccttttttggcttccaagtggtgcccgactgcttggacgccgtaatagcatcttcggctttggcatactcattggctttttcaaacatctgcttgaccgtcttgggaggtttgtgtccgaacttgccgactaggtcctcgtggcgaatgcctttagtaaaggcggcaatgatgacgtcatcggtgatgtcggagatcttgttgcgttgctcagagaagcgtcgaatgtaatctcgaagagattctccagacttctgaatgatgttgtagagatcgaagtgtgtaccaggccgttcaaaagtgccttggaagttggcgatgaagtggtcgcgtagctctgcccatgatccgatcgtgccgcggggtagcccgtgaagccatgaccgggcagaatccgctagggccacaggtagataattcgccatggctttgctgtctcctcctgctacgcggattgcgagaccatagacggtgagccaagactcagggttggtggtgccgtcatatttctcgattccggtcgacttaaagccagctggccaatccactcgacgcagatcgcttgtgaaggcagcaactccgtccacatcgtcgtcgtagcgatccggtgaatgatggcctcttgctgcgcggtgctggttgatggtgtcacgaagatcgatggggcgccttcgatgtggggagtgtggtcgttcaactcgacgctccctgtatcgttcgggaggcgaacgaacagaccgttcatcatgtcccctgctcctgcgactagatctggcgccgtcaatgctgaggcttggctggtgatagtcctgagatcgaaggtgagggactcggctaccagtcggggtgcgggcgcttgcggagttggctggaaacgaagcaacgatcatggtcttcgtttgattcaagatgtttacaacatgatcagcttgattgagtacgtcttccttgaggagggtgtcgaggagagtgattgctgcaaccgcgttctgctgggggtgcgaaaaaccgctgttccatcgacgtcttgttgcccaatgagctctctcgctcgtcgcccaaattccaaggcgcgctgccgtcgatcttcaccctcctttgcaatccgttcgcgatcttgttgctcacgctgtagtcgttctcgctcctgttgctgtcgctcttcctccagttggcgacgttcagtttcttgccatgcgcgctcttggtccacttctcgggctcggcgttgttcctccgtttcgttgtcagccacgaatacgccgaagaagagaggcgtgtagttatcctcatagctgtcgtcgaagttgtcgaagtcgtcgtggtcgtagtggtagccgaagtcgtcgtagtcgaggatctcggttggtcgagaactgacaccgggggagctaaggtagccatccaactcttccgtcgagactgtcccaaggggttggagtataacgccaacctccctggatctagatcggatcggggccgaagccggagctcgcctagatcttcgagcaggagatgtcttggctgtgaagacagcggccaaatcatcaggaagttttatcaggattgagggataggacccgtcatcttgatctggtcgcggaggagtagattagatctcgtccgagtggtttgaagccgactcgggagagatgatcttggagtaggcctcggccgagttcggaataccgaacggcgcggggacctgatctctccccgactagttcgaatccgagttaggagagagatcttgccgaagtcgttggtgatgaagttgaggctgccgaaccggaacgcctgtccgggagggaaggcgaagtcgtcgatgccagaaacggaacccatcgcacttagccggtaaaaacttgacgctacccctacctggcgcgccaactgtcgaaacaagatttcggcaatactaaaagggggtggctatcaagctaggaaagtggatgggtttggagacgaagaattttatacaggttcaggccttcttattcaagaagtaataccctactcctgtccggggatgattccgccgagtgtattattgattgtataatctaggtcaaaaaaccgtgccccgataagcatccggacccctccttatataggggaaggggtccgctttacaaaatacagtccatatcctaaaagaacatggaattacagataaaatataatcgtaaccgactaggatctcgggtatttccttgacatacaagtttagaatctaacccgagtcctcatgaagatattctgtctttattcggtatcctgtacccagctagaatatgaccgccatgtagatatagggtatccataatctccacatgtttatttaggagacatgagaattttggtgggatggggatggggatgtggaattgaggaaggaactccctccttttcaatacctgggtaggggcaggtgattgggagggaattcctcctttactttgtctatgcaaatctcaactatccatttttattaatgacataatctccaactaaactccctatcagtttccatcactccaaccaaacaagatactgggattaaaaatcaaattcccatcttaatctcatcataaattcccttgtgtaaactctcaatccccttccctcgagttaccaaacaagccgataagacttagaattattttatattttgatttttcaaagtaaatgggtcataccttgtagttttcatgtatatatctgaaatttaaatgatttaccggaacccaaatacacattcaatactcatcgattgcattatatacacttacaccttcatcggttggcttatgttgttgcgtttcagcataagcagactgatgtttatcggtataagcgtttccatcgtttggcttataaagagtaatggctgattagtggatcttctgtggcatggtgatcgttgagaggtagggttcgagagaggggagtggggaatcgaggttggtctcctagcgatgtggccgtagaaaggtgtcgggaaggattggtcccactaccaatggctgatgcataatcagcccaataagctaaccgatggacttttgctgaaaatctgcctctgcaacattgaaccgatgagagtgttctttgatctttgttacattacatgtagttttggtcatggtgataaaagtaatatatctaactcttttggatggatagaatatattactaaattttcatgcgtgtgtgctataattgggatcaaaatgcttataaacgaccagaaacaatattgtttctatgaaaaattagaggatataaattctatgtatatagctaggattcaaatctggcgataatggtaccacttttacagaaaccaatctgaaaattccgtcaccattttcatctcctaggttgctagccagctgcttatggttgatggaccagatgtatagttactgagctctaaattggctatagtattgtattatcctttttaatggtaaatagtctgaaggctgagattttcttttggctgtggtttataggccataatatgtgaccaaagcaatgaaaaataattctacaataggatttttatgcttatactttcagcggtttaaaagtcagggatgaaaagtgaaaaacgatgggaaaaacatcaagagtaatataaaatcgactttgaaaattcaaattagactatgattctcatgtatccatatgcacatttgtggtacccgaattcgaatttcgctgctctaataatggaagattggttcaggatttgatgggtttataagtcatttctattaaaaaaaaacaaggtcgcaagatacggtcttaatatgttggaccttagcaatttaaattcgtactattcgtgaaggtttctttaaataatgtccaaatttggtagaaatttattcaaaaattaatcttgtgaaattttcccttaaatacccaatcgagtctccctctccaaacgacttaaacttgcttcacacactttttcccaattttatatatcatcttaaccttgctgccatattctttactggttaacggataaatggatgaataggcatgttctccgaactaattaacagtacgatttaaagaatgctttctatatataaatgtattgcaaaactgttttaaagtccaattttcaacataattcatacactgatagagaaaccatctttggtcggtcgaccccaatccacaatagtcccggttccattaaaaaccgggacaaaatgatttttagtcccggttaataagaggaagatctttagtcccggttgttgttaccaaccgggactaaaaatcatctttagtcccggttggtttatttttagtcccggttgattccatgtcaggccgtgtcagggccctatgatctttaatcccggttagtaacaccaattagtcccggttggtgttagtttttagtcccggttggtgttactaaccgggaataaaaatcaaaacacactatataatccatataccgatcctcttttcccgtccacacaacaaactcctccctctatctctttttttcctctcta

SEQ ID NO: 8920 - DNA, 65317 bp, Oryza sativa
  unsure (1)..(65317): unsure at all n locations
gtggtggggtggaggtggaggtgggagataatggcgtgtggtgtggggggaggtgggtataagagggaaggggggaggtgggggtggggcccacgtgggggtggcaggtttgacactttgaccggcattttttttcttttttcttttttctttttttgcgcggcgtttggatctagctagttcctcagtcgtcacactaccagcttggctttcccactttttttattttcctttttctctttttatatatactactgtataaatataaaaaatacatatagagatattcaaaagatgcgggtgtgtcagaatgtggggcccggtgttcagtccacgtgcctgcgacggtgccagccagtgtgtgtgaccgtggatccatttcgaggcgacgtacgctcgtgcatccatccactcgtgcgtgccaacgtgacaactactactcctcttctaccgtgcaaattttaatggcgcgatcgagttggcaaattgcgcctagtaatcgaggtgagttcgtggatgtttggagcacgtttggttagtgtgagggagtatttttgtaccggattaaagtaataatgttgcgtagctttaggaaccgggactgatgtgtgacgagcgatttctagcgtttggttagagtgattttgcatggagttcttgaaatctggtatagtgcgacaaatgatttttatcctcctgttagagcatagtaatattttcgtgtgtctctagaaaccgactaatgttcgtattgttgtgaagctcttgaaatctactatagtgcgacaaatgattctagtcgattaaagtgatattgttgaggagatattgaaatatgctatagtacgacaaatgattatggccttcagctagagtgatattgtcgcgtacctctagaaatagactaaaggatgcattcagaagtcaatgttcttatttcccactccctcgttttctacgcgcgctactctttctaaactgctaaacattgtgtttcttgaacaaaaaactatagaaagttgtgtaaaaatcttatttattcttttttaacattatttacttaacatttaattaatcatatgttaataagctatctatttttcatgcacgtgggagaggttcccaaccccttctccagaacacatcctaaagtgatattgttgtggaggtcttgaaatctgctgtagtgcgataaatgattctagcctctagctagagtagtgatatcatcgtgtagcactaaaaactgaccaaagttacattgttgttgagcgcttgaaatctgctataatgcgacaaacgattctagcctttggctagagtaatattgtcgtgcagctctaaaccttttttttttgatagtttgtggtcaagaaaaacatttgagttgcatttgtgtcacggaattaagtcatggatgcattgggaaaacacaatgtgtttgtcggtaatcctacctaatatgtggtgagcatttttggtgtcagattaaagtaaatcttgtcatggagctctacgaaccgaccgaactgtgaagagcgatttttggcatttgattaaagtaatttgtcatggagctcttgaattctgttgtagggcgacaaatgaatttttgttgtggatgtgatcttgaaatatgctaatgtgcgataaatgattctagcctccggctagagtgatattatcatgtacttatagaaacagattaaagtaatattgttgtggaggccttgaaatctgctatagtaaaaaatctagcctctggctagagtgatattgtcgtgtagctctaaaaactgactaaagttatattattgtggagctcttgaagtctgctatagtgtgaaaaatgattctaacctctggctatagtaatatttttgtgtagctctaaaaaatgactaaaataacattgttgtggagctcttgaaatttgttatagtgcgacaaatgattctagcctctagctatagtaatattattgtgtagctctaaaaatcgactaaaataatattgctgtggagctcttgaaattttttaatagtgcgataaatgattctagtctctcgttagagtaatatttacatgtacctctagaaaccgactaaagtaatattgttattgaggccttgaaatctaccataatgtgaccaatggttctagcctctggctaaagcgctgaagtaatattatatatagagctcttgaaatttgctatagagcgataaatcatttaagcctctagctagactgataatatcatgtacttctagaaactggctaaagcaatattattgtgtggagcttttaatatctactattaaaaaaattagcgaccggcaatttcgttgtgggatcatgaaataattttagcaacgggccaaaattatattggaatagaacactggatcactaagaaacattttttatggcacactgaactttgccaaagagaggcgcctctagctagttaatttgatcaagaaaatattgaagtaacacttgttccatgaaattaaaaactgtagcgctcggttcaaagtattattatcgtttaatgtttggaagactcaagtgtgtgacaagttcaaagtaataaggtcatgtggcactttattaccaaaaaaaaaatcaatggtgtgtggccaagaaaatattaaagttgtatttgcgccaataaatcaagtttctgataaaaatatatcctcgtcaattgtccagctagtttgcctaaattgtgctaagcatttttggaatttggttaaagtattattgtcgtggagctctagaaatgaaaatgtgacgagcgattcaatatttggttaaagttattttgttgtcgagctcttaacccgctatagtacgacaaatgattatatccactagccatagtaatattgtcgtagagcacatgatcatcaacaaactttttatggcctactaaactttgccaacaagcaaagtcgctagattgatcaagaaatgttgaagttaaactttgccaacattagagttctctgttcatcaagggaccagaaagatgaactatactcgttttctcacaatatttagacaaaaaaaaatataaccatttgtttactcttctcaattcttgttggaacaacctctcactcctatgatatgcatagatacaaatgaacaatcagccccctacaaaatttttgccggaaaagtcccctacaaaattacagtgacataaaaaaaaaaggacgatcaacatggataataaactaaggaggcacgtacgtatgtaaatgctaaagtttcattttgtttagcatagcaatgcaattcaataggcggttgacatactgattctggacttgtttagatcaattttttcacccagtcacatcgaaagtttggactcgctaaatgataccaaacttttacattagaataataaagctaccaatagttaacctgatcaccaaatgatcaatgccttctagaacaactcagaccctcttctagaacgaacagaagcacaattcaagcaagaactactaccacaaaggtccaagaaagcggtgcaaaatttggttttggatttgaatttgtcgacgcatgatgttcaaccgtagtccgatcgtcactactacactcctctgcagtccggccgcatgcatgcatcttctgcagctagccagctctgaatttctctgatcatcatcatgcatgcatattatcatatcatcagatcgatcaccctccttccaaaacatgcattcatcatcaacagtaaaagactactactcctcctaaaagttaatttgtttgttaggtttggtgttgtggcgttggaccaacaacaacaacaacaacaaagccagcagcaaacacagcagcaacaatcatgtgtgtcgttaggttcggtactatctgtcaaaggatcgagtccaagctagcgtttgcatggaccagagactgctgctgctgctatcgatcaaccacacaagtgttgaaagttccaaccaaacccactgtctctaggcttaacacttgctgttgtcagctagttggtcccatggaaactacattgtcttaatttgggtgcagtttttagccacaggttcagtcattttggaacagctagtagtgattttgtccgctatttcgcctgtttatccaatgggtggaacagtggttttcaggggggaacagtgatttgctctgagatttctatagctcttttagacttggagtaattgttctaattatttatccctccttccctggccgccattgccgcgccttatcgccatcctctcccttcttcccaccctattgtttcgcttatttgtggaataaggcaaacggcatatttgcaaacgaaaaataatttatgtgtggaataagtcaaacggcatagttgcaaacgaaaaataatttatgaataaaacttttatggtcaattgtcctcgccattaataccaaccacaacccaccaccatttagcggccatacaccaaacatcacacgtttgtacatgccccaacacaagttttaagacatggagaccacagtcgtaaatcctctcatagaaatcctaacaaaaagtgcacatacacttactatcacaggggtttaatcctggttgggtccaccatcatacttttgttctttccctggtaattaatacatccccatttcatattataagtcgtttgatttttttcctaatcaaactttgttaaatttgactagatttacaaaaaaattaacaatatataaaatattaaagtaatatattttgataatatgtttgttttgtgttgaaaatactactatatttttctataaacttagtcaaactttaaaagtttaattataaaaagtcaaatgatttataatatgagatggaggaagtacgtaggaatagtgttatgtcacaagtattttgacgataaaactctagtagcaattacaaaatagaagcagcaaaattgtctagagtattaaagttttcatccggtttcgttcgcattcctaaaggttgccgtgatatctgaatttcgtccacccaaacagatctcggatcatgactccacacctttaatctaagtttcaaaccctcctttttgcttcaaccgatcgacctgtggacgtacgaaaaacagaaggccctttacttcatgtgcactactcgagtgattccttttttcggaacgaattgaatgaacataattcgagtcaaaaagcaaattaaccaaaccaaaaagcgaacgcacgcagtgtcgtcctatcgaaatgcacgggtgacaacactggagtatagtagtggcagtactcttttccatgatctttattagagaatgatatactccctccgtaatgtttgacaccgttgactttttagcacatgtttgaccgttcgtcttattcaaaaacttttgtaaaatatgtaaaattatatgtctacatgaaaatatatttaacaatgaatcaaatgataggaaaagaattaataattacttaaattttttgaataagacgaacggtcaaacatttgctaaaaagtcaatggcgtcaaatatttcgaaacggatggagtatttttttttgcctatcatttacatccaattgaatatatgtaagcttttaggacccctttaaaatacaggattgagaaaacacaggaatagaacaaaacataggaatagaatgtcatgattattggattcctatgggattttcaaacacgggaaagtcttcaaaccatcgtttgattaacatacaggaaaaatactggaattttagacacacgtagagaaaatcatgaggtgagacctcatgttattttcctctaaaattgttctagcaaggttaattccatagtaattttaaagggattagtaggaaataatccttagattcaaaagactctataggataaaattctatagaattcctatagtttttcctttgtttcaaaggggctcttaaaattgagaacttgacctttcaaacaacccaatgtaaaatttactttcataaaaatttaaacttaaaatttcaaaatgctactcaggtgacggcaactattacgctacctactctttcgctgcaactgcacgcctgcctcgagacctccttctctccctctcctccggcgcggtggccggccgggcggcgctttgacccacactgcccggccacggcgaggcgtagatgctacgtaggagcaggagtagggtaggagctagctgggccggccatggcgctccttttgcagcagctgggagcagtgcatcgagacccggagacccacgagagctacggtatctgtgtctgtgtgtgtgttttttaacgtacgtgcgcgtagcacaaggctgccgagtaatacccagatgagaagaccatgatgccatctctctctctcacacagagtagggtgcgttcgtttccggtgctttggaactcattccctccataccgaaaacaagcggttcattatcacgtaattaattaagttttagtgtttttttaaaaaatagatcaatatgattttttaatcaactttcgtatagattgttttttttaaaaaaaacacatcgtttaacaatttaaaaagcgtgcgcgtaaaaaacgagaggggagagttgggaacaccctcttgcgaacagagccaagagcaggtaaactagcagcctataaatcagctttaaaagtatatcgagatgataaaaaaagagagagaagcatgtggctacagatttatagccaactgtagtacggactttaagacacaatgtgtgtatgacagatgtgaccagatattaatagtgtagtttttatttataggtaactattatatgaattgactattaaattgactatagataatttagagttagtagttggctatactattaaacttgctccgagtttaacactccctccgtcccattttaagtatagttgtgggtttctatgtaatgttgatcgtccaccttatttaaatatatttatgattaatatttttattatgacatatgataaaacataaatagtattttatgtgtgactttaaaaaaaacaaatcataaatatttaaataagatggacggtcaaacgttagacatgaaaacccacgactgtacttaaaataagatgaaaggagtatatagtagcgtagctataagccaactgtaaaattatgtggagaagaaggaatttaaaaattgaaaaagggttagagtaaggataatagcaagcataagtcaaaaattgaaaagggttagagtaaggataatagtgagtataagtcaactatacttatgtggaggagagagttaaaaaaataaatgagagttcacttaacacgtgctcctggataaatacactaaatacataagtgagaaaaggagagaggagaagaaaaattgaaggctctattatttaacttgtacttggctttgatggaagagctgactattcacatacttcaacatgaatatattaaatgtataggcgagagatatagagaggagaagaaaaatagagataactttataacttatctactatacatgttaactctattattatttccgttctaaaatataacaactagtattatctatgaacgtggacacacatttatctaatatgagctatttaaagatggagtgaggccgtgtttagttgttttggcaaaaaaaaattgacatatacggacacacatttgaagtattaaacatagactaataacaaaacaaattacagattccgcttgtgaactgcaagacgaatctattaagtctaattaatccgtcattagcaaatgtttactatatcaccacattggcaaatcatggtgtaattaggcttaaaagattcgtctcgcaatttacatgcaaactgtgtaattgatttttttatcacatttaatgctttatacatatatccagacatttgatgtgatgtttttagttaaatttttttttatctaaaccaggcctgagaatgaaacaggaggttcgatttttacccgggtcaagtggcgaagaattccaggtagtacaggtagtactgctttttactgcggtgaaaggagcaaagcttctgcgtctgcttggcgttggtctacgtctaacgtgagcgtgcgtgcgcctgttggtcgtcgtccgaatggcctggtctccaacctcctttttcgttcaacgcctttgttggtcccccggcccctctcttcctcttcttcatcgatcaccaccttttcttttttctttcttcccctaaagattatatttgcgcgcagctgatgcagtgcactgcagcagggagagcagctgtggcactggcagtggctggctgctgctctttggtttgggtttgcctgcctagacgaacctctgcaccgtcgtggtccacctctgtcttgttaagtactcccttgattctcatacggctcgtttggttggagggagtttttaggagagattgggaatttaaagggatgatgttattaagggcctctttgaatcaaagaatttatgtaggaattttataggatttaaatcctataggaaattttcctatttggccctttgattcaaaggattgaagctttccaaatcctatgaaattcctatggaatggcacattgcatgtggattttggaggaaatttagcaagagctccaacctcttggaaaatttccttttagtctatctctctcattcgattcctgtgtttttcctgcgctccaatcaaacgaccattcctatgtttttcctgtgttttgcaatcctctattttacacttcaattcctgtcagaatcctatgtttttcctattcctccgttttttctaccctgtgattcaaaggggccctaagtgttttgttttgtcgaaacaagatttcggctatactaaaaagaggtggctatcaagctagaaaagtggatgggtttggagacgaagaattttatacaggttcaggcctttttattcaagaagtaataccctactcctgtccggggatgattccgccgagtatattattgattgtataatctaggtcaaaaaaccgtgccccgagaggcatccggacccctccttatataggggagggggtccgctttacaaaatacagtccatatcctaaaagaacatggaattacagataaaatacaatcgtaaccgactaggatctcgggtatttccttgacatacaagtttagaatctaacccgagtcctcatgaaggtattctgtctttattcggtatcatgtacccagctggaatatgaccgccatgtagatatagggtatccataatctctacagtaacccccgagacctttgcagtcgacgaaatagccatctcagaacaaaaaacaataatccgagtgcttcaattcaacctgctccagcctgccgagtgctaaaatcaaagactgtgaagggcgaaaagaaaacatggtgcatcgagtagatgcacctaattaggtgtagcccccgactatgtggttagttgaaaaactaaacatgtagtcaagaaccgagtggttttacaaccaaacattatatagcaaagcatgtgtggtagtcagtaaaacacccagccgtctgcttcttagctgcaatacatcgagaaaaaaatatgaaaaggcccgagtgataaacactcaaaaggtcctcaaatagacatatttgacaggaatccgagtaaaaactctaaagacaacccatcaaatatgataaaaaatcatggtaatcaacgagtctaatagcctaggctatggccctcatcataaccaaaatgtgcatataacatgctaagagaatgactattaataaaccagtcatctcaaatcaacccaaacaacttttgcagcctaataaagctgacaaaaatggtataacacctttctgtcgggcacctttttatttgcagcataataattccaaagaattatcgaaccgcgttaaaaaggattttagcagcatcgggccacatcattgtgagcacaaattgccaaagcaaaaagcacctaagtccctagggatcacaacgggccacgctgattataatattgggctgaagtactgtacagacccaggcccattagtactcccgataccctaacaaagcaccgaagtccaagcatcgcttcgtcttccccaccgagactctcgccatttccccactccttgctacagtagcaaaccgcaccgtcgaaactagggttcatcaatccgtcccaatccattctcaaaaaatcccacgaaacttctccgcgtgtccaccgcaccaattcctcattcccctccagctatatcttggaccaaatctaaccatgcaactcgcatccatggcggaggagagagaaagtttcgagagtcagtgggctccctccgatgtaacggaagagaatctgaaagaaatggtggtgcacggcgttcttccgacgaaggaaatcatcgggtggcgaccagcgttcggcaaagcattcccgacccccgacacacacgagattgtggtattctctcacttcttctatggcggattttctcttccaacctcaagattcttccggggaattctgaacttctatggaattagcttgcatcatctgaatccaaactccatagtgcatatcgccaattttgttcatgcttgcgaagcttttctgggcattaggcctcatttcgccttgtttcgccgcatcttcttcctcaaaccctagccaaacaagagcaaactgtgcgttgttgggggtgctggtttccaactcaggggaacactaagccaaaaatatttctccatgcccttcaagacctcaaacaaaggctggcacgccaactggttctatgttcaaaatcctaaaccagcccttcccgagtactcttgtctccctccagtctaccaagatacatggaattcattgcctacaggagatgaggcagcccaggctgtagaactaatggagcgcatgataaagctgaaagagcaaggtttgcagggagaacagatcacttggcacttcataaaaagccgattagctccaatcaaagagaggtcccgcacagcttttgagtttgacggcaaacatgatccaaatcgtgaagatccagactctcttaactttaagattatgaaggaaaggatgtacaagatcttctcgaatgctatcgtcgtcagctattcgcacttgctgctagtcatgccattcaatgctttcaatcctcctccaccgatatgtaatcaaacatttcaacttttcacagaatatagtcttgtctttttgttgaatcaattaacaatgaatgatattacgaccaggaatttgctttgatgaaatcggaccccccagtcgtccaatgccgatcaccccaccgccaaaccggtcaagggagcgggggtcccaagacccgttctgaagcccggccaaatacttccaatccagccagatttacgcaaaaggaagttggtgtcaagtgacgacgaaagcgatactgctagaaagcctggagaccgagaggcaaccaagaaactgccaaagcaggctactccaaggaagaaaacatccagttgtcctgtgccaaagatcaggaagtcttccaggtacaaatcatataacgatctctcttgcattgatgtgcacccagtgcagaaataatactgaccagccagatttacgcaaaaggaagttggtgtcaagtgatgacgaaagcgatactgctagaaagcctggagaccgagaggcaaccaagaaactgccaaagcaggctactccaaggaagaaaacatccagttgtcctgtgccaaagatcaggaagtcttccaggtacaaatcatataacgatctctcttgcattgatgtgcacccagtgcagaaataatactgacaaccaaacttgcaggaaaccatctgatatagatccttctggaaaagactctgacccgactagcagggaaacaaacttaaaaggaatcgagccaactgacgaggatcagccgagtcacagccagccagcaaccgataatgtaggatctggtgatcaacccccgactgagaatgagtcggccgaagctggagccggagttaatcaggagcccccgactaaaaaccagtcggacactaggccaagccaagagattccagaagttggagctcgggcagacagccctcgtagacaagacgccagcaacgacccgatgccagggtctcccattaaggtgcaagagtcgactcgttcccgtccggaaatcatcacaggtaaacaccttgcctgaaatcgtgttgatccaaataactctgatcaattgtctaacctttgtcagtggatacattaggaccaatgattggtgatgaagaagaaattccccgtatacaagcagctgaagactcgcacccttctatcttagtcaagtggtgggacgatgacaggcaacctcaaggaatcataataaacaaacaaaaagaagatgaggaagtatgcttgctgaaaaaggcactcagccaggccactcgcattgtgaatgtaagtccatttacgcatagctttaattgttccccttcatattttgctgaaaacgccggtaaattcttattgcagagaatccatctcaggaatgaggcaaagaccacgacacttgagaaattagttccccatcttggaactcttgaagccaccaaaagccagttacatgaggtcagagagctcgcgaggaaaactgagcatgatctgaggaatagaatctctgagcttcaaaaatctaactatgaattgagtggttcatccaaaggtaaataccatatccgtctgacatattcgtgaaaccttccttgtcatatcgattaaccgaagagcatttcagtgcaagccgccaggatttccgacctagagaggcaggtcgaagctctggagaaggacaaggccgaactagcaaagcagagggacttggccttaaaagatgttgaaggtaatgataactagttccccatgctcttatagccacctgttgatacaaatttattcgtgcaaatcgcaaaatcaagtcccaggcacagtttgatgtcttaatcaataagatcaataggcttgaaggggccagggataaagtcgctaatgccgctaccctactcatccaagccatgttcttcaataacgccggttcgagtacacttgacgcttccgagatcttcgacaagctgagagtcgctccggatacttacttcaagaatattagggaggttggatgtatgggagcaagcatggcgttagctatgaccaaatctttataccccaaaatcgatattgacgccgttgatgggtttgcagacgggacaagcgaagaaacagccctcaacctcatcaatgatgcgcaaaaagccgctgacaagattgctgctgacatagttgagagattccaggatggcgaccttcggccgactgggtctgataattccgacgatgaaaaaactgacactgattgatgttatattgtaattgtgattctgatgatgatgatgacgatgatggaggtacaatttgtacaatactgataaatttatgctgtgcatgatatttcaaacttagctcctgatttcttaaaagtttttgtcaaaccttgttgagcctaaaactcgcaaaagttgttaaaaaactttcagtcctcattgactaagccaaaaaatcaaacagagcaatgataaatcaagtaagcgaattgaattgataaagatcacactccattatcatagtagcccccgactgacaactcaagaaaaggcttgatgttagcagtcgaagaggaaaatacagaagtgatgcctaagcataaaaacaacgaaggtgttcaatattccaagaattgttgacaagagtaccatcttcacgcttgagtcggtaagaacctggccgagtgactttagcgattatgaatggtccttcccataagggagataacttgtgccgatcctatgtagtttgaattctcctcagaaccaggtcgccaactaaaaaggctcgcgatcgaacattccgattatgataacggcgtaacccttgtaaataccgagctgactggattagggctgcttcacgggcttcttccagtcggttgatgtcatccactcgatcctcttcatggcgctcttcccggaagttacgaaatcggagggattcaaactctacctcactcggcagcattgcttctgcgccataaaccaagaagaacggcgactggccagtagcccgactgggggtggtgcgtaaagaccaaagtacagacggcagctgttctacccacttgccagcatagggacgcagtcggtcgaaaactcgtgctttgatcccttgaagtaccatgccattggcgcgttcgacttgcccgttactcatggggtgtgccacagaggcgtaacaaattttaatgccaaagtcttcacaaaaatctttaaatattccgcccgtaaattgagtgccgttatccgtaatgatacgattcggtactccaaaccgatgtacaatattgatgaagaaatctctagctttgtctgcggtgatggtgacgaccggtttggttttaatccacttggaaaacttttccacagctacaaagagatgagtataacccccgactgcctttttgaatggaccgaccatatcaagcccccaaaccacgaacggccaagacaacgggatggtttgtaactcctgagctggtaagtgagtttgtcgggcaaagaattgacaaccttcacatgttcgcacaattttgtcggcgtcggaaacagctgtgggccagaaaaaaccctgccgataagccttgccaacaatggttcgtgcagcagcgtgattaccgcagatgcctgaatgaatgtcttttagcaattgtcttccctcttccaaagatacacagcgttgcaggattcctgatggacttttcttgtacaactcggtctcatgaatgacatagagtctgctgcgcctggagatctgcttggcttcatttttgtcttgagggagttcttgtttggttagaaattttatgagaggttctctccagtcggcttcaatcatgcttacgccttgagtatccatggcttcaattgtttcttttctgggcacggttggttcgtaaagatgttcgacgaacacatctgaaggagccgcttcctgttttgaaccaaaattggccagcctgtctgctgcctcattattatgtcggaggacatgggtgagcttgagtccgtcgaatttatcttccaacttgcgtacctcttgtcgataagcggtcatattgtcatctagacaggaccattctttcatgacttgattaacgaccaactgagaatctcctcggacgattagtcggcgaatgcctaaagagacggcaatccttaatccatggagcaacgcctcgtattccaccacgttatgggacgcagaaaaatgtatccacaatacgtagctcaatctttctccagtcagggaaattaaaacaaccccagctccagtgcctgtaagcctcttcgacccatcaaaatgcatagtccaatattccatcttttcctctggcatgttttcttgacactcggtccactcggcgaggaagtcagctaaagcttatgacttgatcgaagttcgtggcttgaaagatatgtccaaagatgtcaattctaaggcccacttcgctatccgtccgtttgctttgtggttatgaagtatatccccgagtggaaacaatgtgaccaccggaccgagtgaccttgaaaatagtgagacaatttcctaacggtaattaagacgccatataataaattttgaacctgaggatatctcgtcttggagtcggccaaaacctcgctaacgaagtatattggtcattggactttttgaacatggccttcctcttcacgtttgacaaccaggaccgtgctcacaaccttagaggtcgccgacacgtataacagcagcggctcttgtggatgtggcgaggccaaaactggtgtagtgagaaattttttgaagtcttcaaaggctttttgtgcttcgggtccccactggaaattgtcagttttcttcagcaacttgaagaagggcatcccccgttcaccgagtcgcgaaacgaaccggctgagcgccgccatgcaatcagtcagcttttggacatctttttgtgagcttggcggtttcatgttgagcatggcgttgattttctccgggttggcctgtatgcctctttgagataccataaatccgagcaacttccctgacggtactccgaagatgcacttttcagggtttagtttcatcctgaaagcacgaatgcttgcaaaagtttcttctaaatccgcgatcaggtcatacttctgcttggtcttgacgactacatcatcaacataagcttcaacaatgcgaccgatctgagttgaaaaacatctttgaatcatgcgttgataggttgctcatgcgttcttcaatccaaaggacatggtgatgtagcagtaggacccaaagggcgttataaacgaggtcttcaagtagtcggattctttcagtcggatctgatgatatcccgaatagcagtccaagaaactgagtagctcgtagccggccattgagtcaaccacctggtcaatgcgaggtaacccgaaaggatctttagggcaagacttgttgaggtcggtgtaatcgacacacatgcgccattgcccagtcttcttccgaaccagaactgggttagccagccagtcgggatggaggacttctttaatgaagcctgctgctaacagtttggctaattcctctttgatcgcatccttcctatcttgtgcaaagcggcggagtcgttgtttgatgggtttggcgtcttccttgacatgtaaagagtgctcaatcacctctctgggaataccaggcatatcggatggtttccacgcaaaaatatctttattattctgaagaaaggtgatgagagcgctttcctatttacaatctaactcagcgcctattacagcagttttggtaggatcggagggatctagtggaatcttcttagttttgtcgtcgccttcttcggtctttgacagcttggtcgtaggcacctctccttcgcttgccgtagtggcagccaatcggatctcttcgcgagcgagagtgatctcgtgggtttgggctatttcgcaactttctttgtcacatgtgacggcttgcttgatgtcgctccgtagtgatatgactcctcgaggaccaggcatcttcatcatcatgtaggtgtaatgtgggacggccatgaatttggctagagccggtcgtccaagtatagcatggtacgttgtctcgaaatcggcaacttcaaaacaaacgttttctgtgcgaaagttttcccgagtgccgaaggtaaccggaagagtgatctggccgagtggtgtagcggataatcctaggatgacaccatggaagggtgcattactcggctttaattccgttcgaggaatctgcatatcgtccagagtcttggcgaaaaggatgttgagtgcactgctaccatcgatgagggttctttggagcttgacgttacgaaccactgggtatagtaccagggggtaccgccccgggtggaccactcggtcgggatgatccgagcggtcgaacttaattgctatctctgaccaccgaaggtattggggcgtgttaggctgaaccgcattgatctcccgttctgttagcttctgctttctcttagattcataagccaggggtccgccaaagatgtgaattagttctttgcgatgatcttgaaaaccaagtgggacatcgtcttcaccatctttcttctttgatgtgccttggtctccgtctgagggcttacgtgcgttcttgacgtattgctctacaaactgtttgtagacgaagcaatctttcgccacgtgattggagttgggatgatgcggacattgggagttcattatcttgtcgaaggtgttgacgcgggaacgttgtcgggaagatggagaggttgttgccacaagctcttcgggcttacgcttgcgatccttgtggttgttacttccactccctcctgcggtcggctgcatcggatcccatataagaagctcgctctttacccgatcattcaaacattttgtgggcggcgctcctgctctattgttgcgtagcaatacaagcctgctcatgctgcttcggcggcgctttttcgccttctcttcgctctggacaggagccctaatggacacggggagggagcaggcgaagcgtatccttttttggcttccaagtggtgcccgactgcttggacgccgtaatagcatcttcggctttggcatactcattggctttttcaaacatctgcttgaccgtcttgggaggtttgtgtccgaacttgccgactaggtcctcgtggcgaatgcctttagtaaaggcggcaatgatgacgtcatcggtgatgtcggagatcttgttgcgttgctcagagaagcgtcgaatgtaatctcgaagagattctccagacttctgaatgatgttgtagagatcgaagtgtgtaccaggccgttcaaaagtgccttggaagttggcgatgaagtggtcgcgtagctctgcccatgatccgatcgtgccgcggggtagcccgtgaagccatgaccgggcagaatccgctagggccacaggtagataattcgccatggctttgctgtctcctcctgctacgcggattgcgagaccatagacggtgagccaagactcagggttggtggtgccgtcatatttctcgattccggtcgacttaaagccagctggccaatccactcgacgcagatcgcttgtgaaggcagcaactccgtccacatcgtcgtcgtagcgatccggtgaatgatggcctcttgctgcgcggtgctggttgatggtgtcacgaagatcgatggggcgccttcgatgtggggagtgtggtcgttcaactcgacgctccctgtatcgttcgggaggcgaacgaacagaccgttcatcatgtcccctgctcctgcgactagatctggcgccgtcaatgctgaggcttggctggtgatagtcctgagatcgaaggtgagggactcggctaccagtcggggtgcgggcgcttgcggagttggctggaaacgaagcaacgatcatggtcttcgtttgattcaagatgtttacaacatgatcagcttgattgagtacgtcttccttgaggagggtgtcgaggagagtgattgctgcaaccgcgttctgctgggggtgcgaaaaaccgctgttccatcgacgtcttgttgcccaatgagctctctcgctcgtcgcccaaattccaaggcgcgctgccgtcgatcttcaccctcctttgcaatccgttcgcgatcttgttgctcacgctgtagtcgttctcgctcctgttgctgtcgctcttcctccagttggcgacgttcagtttcttgccatgcgcgctcttggtccacttctcgggctcggcgttgttcctccgtttcgttgtcagccacgaatacgccgaagaagagaggcgtgtagttatcctcatagctgtcgtcgaagttgtcgaagtcgtcgtggtcgtagtggtagccgaagtcgtcgtagtcgaggatctcggttggtcgagaactgacaccgggggagctaaggtagccatccaactcttccgtcgagactgtcccaaggggttggagtataacgccaacctccctggatctagatcggatcggggccgaagccggagctcgcctagatcttcgagcaggagatgtcttggctgtgaagacagcggccaaatcatcaggaagttttatcaggattgagggataggacccgtcatcttgatctggtcgcggaggagtagattagatctcgtccgagtggtttgaagccgactcgggagagatgatcttggagtaggcctcggccgagttcggaataccgaacggcgcggggacctgatctctccccgactagttcgaatccgagttaggagagagatcttgccgaagtcgttggtgatgaagttgaggctgccgaaccggaacgcctgtccgggagggaaggcgaagtcgtcgatgccagaaacggaacccatcgcacttagccggtaaaaacttgacgctacccctacctggcgcgccaactgtcgaaacaagatttcggcaatactaaaagggggtggctatcaagctaggaaagtggatgggtttggagacgaagaattttatacaggttcaggccttcttattcaagaagtaataccctactcctgtccggggatgattccgccgagtgtattattgattgtataatctaggtcaaaaaaccgtgccccgataagcatccggacccctccttatataggggaaggggtccgctttacaaaatacagtccatatcctaaaagaacatggaattacagataaaatataatcgtaaccgactaggatctcgggtatttccttgacatacaagtttagaatctaacccgagtcctcatgaagatattctgtctttattcggtatcctgtacccagctagaatatgaccgccatgtagatatagggtatccataatctccacatgtttatttaggagacatgagaattttggtgggatggggatggggatgtggaattgaggaaggaactccctccttttcaatacctgggtaggggcaggtgattgggagggaattcctcctttactttgtctatgcaaatctcaactatccatttttattaatgacataatctccaactaaactccctatcagtttccatcactccaaccaaacaagatactgggattaaaaatcaaattcccatcttaatctcatcataaattcccttgtgtaaactctcaatccccttccctcgagttaccaaacaagccgataagacttagaattattttatattttgatttttcaaagtaaatgggtcataccttgtagttttcatgtatatatctgaaatttaaatgatttaccggaacccaaatacacattcaatactcatcgattgcattatatacacttacaccttcatcggttggcttatgttgttgcgtttcagcataagcagactgatgtttatcggtataagcgtttccatcgtttggcttataaagagtaatggctgattagtggatcttctgtggcatggtgatcgttgagaggtagggttcgagagaggggagtggggaatcgaggttggtctcctagcgatgtggccgtagaaaggtgtcgggaaggattggtcccactaccaatggctgatgcataatcagcccaataagctaaccgatggacttttgctgaaaatctgcctctgcaacattgaaccgatgagagtgttctttgatctttgttacattacatgtagttttggtcatggtgataaaagtaatatatctaactcttttggatggatagaatatattactaaattttcatgcgtgtgtgctataattgggatcaaaatgcttataaacgaccagaaacaatattgtttctatgaaaaattagaggatataaattctatgtatatagctaggattcaaatctggcgataatggtaccacttttacagaaaccaatctgaaaattccgtcaccattttcatctcctaggttgctagccagctgcttatggttgatggaccagatgtatagttactgagctctaaattggctatagtattgtattatcctttttaatggtaaatagtctgaaggctgagattttcttttggctgtggtttataggccataatatgtgaccaaagcaatgaaaaataattctacaataggatttttatgcttatactttcagcggtttaaaagtcagggatgaaaagtgaaaaacgatgggaaaaacatcaagagtaatataaaatcgactttgaaaattcaaattagactatgattctcatgtatccatatgcacatttgtggtacccgaattcgaatttcgctgctctaataatggaagattggttcaggatttgatgggtttataagtcatttctattaaaaaaaaacaaggtcgcaagatacggtcttaatatgttggaccttagcaatttaaattcgtactattcgtgaaggtttctttaaataatgtccaaatttggtagaaatttattcaaaaattaatcttgtgaaattttcccttaaatacccaatcgagtctccctctccaaacgacttaaacttgcttcacacactttttcccaattttatatatcatcttaaccttgctgccatattctttactggttaacggataaatggatgaataggcatgttctccgaactaattaacagtacgatttaaagaatgctttctatatataaatgtattgcaaaactgttttaaagtccaattttcaacataattcatacactgatagagaaaccatctttggtcggtcgaccccaatccacaatagtcccggttccattaaaaaccgggacaaaatgatttttagtcccggttaataagaggaagatctttagtcccggttgttgttaccaaccgggactaaaaatcatctttagtcccggttggtttatttttagtcccggttgattccatgtcaggccgtgtcagggccctatgatctttagtcccggttagtaacaccaattagtcccggttggtgttagtttttagtcccggttggtgttactaaccgggaataaaaatcaaaacacactatataatccatagtaccgatcctcttttcccgtccacacaacaaactcctccctctatctctttttttcctctctaacttcttatctctttccttatctctaactcccctcctctccttccttttttccttcaccacagtgcaggcggccggcgcggaggcggttactcgggggccggtctgaaggtggcctgcgcagtggccggccagccggcgaggggggccgcgcgccgacggcggtgggcgtccggcgcgggacggcgggccgggaccgcgggaggcgcggctgtggtggcagaccgctcggcggcgaccggcgcggcgtcggccggccggagcggaggggaggaggggaggcggcagtggctgccggccagatttttttttcttctttttttttgagatgtgaacagtgatgtatttttgtgtgagatgtgaatctgtgatgaattttttagaaccctgtgatgtaatttttttaagagtttgtgatgtatttggagatgatttgtttgaggatttggagatgttctgtaatatgtgatgatttggatatgggaggggatggtgtgaaatcaatattcaatattaaaagcagaaaaaaaaagaaaaaatgttaccaaccgggactaaagattaatttttagtcccggttatttgaaccgggactaaagatagcgatctttagtcccggattcgtagtcccagttggaaaaccgggactacagggggttacgaaccgggactaaaaaacatttctccaccagtgataatagttcactcatttatttggccatcattattacaaatcattctgagattcagccatccagcacaaaagaacaacatgaagatatatgcgccaataagcggcaagcatatattgatatataatggttaatttttttttgatttgatagccagccatcaccaatagcaatgctgcgttgaatgtactcccttgctcacagtccaacaacagcgtcacacatacgtacgtacacgaatgcgtgtgcgcaaatacccttttacaatgtcattcaaatatatataaaaccgtgcctagaccttgagcttcacaacccctgcatgcgtccctgcgtacacacggaatctgattaaaatttactactccctttttgaaatcctcttttcaaataaggattccaactactcgatctaggagcttgctcctccccatggcagcaactctctactaccctctaggacaaacacatcacaatgcacaaaaaacaaaactcagagagagagagagaaggtgatacggagtaataaactgaaagtactgaaaatctgaaatacattccgggtgtgttggcatgtgtgtgtgcacacggttgtttgttttgttttattttgttttgtttgagtccttgcttgtttgtttttaccaatgcttatgaatccattttttttgtttctgtttgcatgcttctcttgaggggtgcaagggcatgtgatgtgtgcccacaatgcaagtttgaactcatcagagagaagggaaaagttaattggatagtgttgctttgatttggggttaattaaactattgagatggtacagagatggataggggtagagatatggcatagtccctagagagaattctctatctaacaagtggcactagctagcttagctttatccaggttatatacagtacatactagaagaatcatctttaattactccctcccggttgataatacttatcgttttggataagggcacggtcttcaaaacgtagctttgacaactattttctattataatatatatagaaatatcaagaaatatatgattttattgaagtacttttcaagactaatctacacatatggttttcatatttttaagataaatattttagaaattatttatagtcaaagattttaaagtttgactttacccttgtttaaaacaactaatattatcatcccgaagggagtagaatattaatatgcgttagtattatgcatcatgcccatgtttaaggaggtaaaaggaatgaaagacactagcatttcatttgaagagaaccttttgtttttttcctcttcaaatacagctccattattaactattcagcttatcaaattgcaaccaaaatttaaattctaaatgttaattttagagttgattgtcatatactttttttgttgcattttattttttacgtcgataagaatatattggggatgttctgagatgttggatgcaacagtggtaatgcgtaatgcgtaaaacttagctatgcaatagaagtaacgatctatagtaattacattatgattgagttgaaataagaaactatagagagtaaattcacgagcaaaatgtagagaagatttttaagtaaatacatttatgaaagtaaattcaataaagtctaaaagtaatttacatcaatcataaaactaacttagcacaaaataaaagtaaattgttacaatattagaagtaaactcattgtagggagaaaaatatggtctatctaaaaattaaattgaaagcccacaaattatagaattgatgactaaaaacaataaatattttatataataatttaatcaaatctaagagtaatttatatatatataacaaaagtaacttacatatataataaaagtaatttacaaacataaatattttttcatcgtaatataatcatgtaagatcttgttgtaaagattttaattgcaacgaacacaatggtgtaatcagattgtagatcggataagtaatttgagagaaaattttataagaaggaaaaaaatacatgcatgtctatatagatgtgtagtatttctctgatgtatgtggtgtctcccgttaagactaaatagataggcctctcagtttagattttacgtttcttttttgttcacaaaaagaatagagctttatttctttttttagaccatggcttggagatgtgtcctgccaagcaccgtaaaatcggcacaaagaattcctagtatagtactactaccaactaccctctccattctataaaaaataaatctaatacatgatatgaatcttattattacgaatctggacagcgactatccaaatatatatgtatctgatcaattattcatatgctaaaagatatttgagatgttctacgagagatgaattgaggagacatgagagacaatttgcttcgtacagttgtccaaagataaaaacaatattaagacgatacgtacgataacgtagcttcatgagataaaagagaactaattaatcatattaactatatttaacaaggggatatataaatacaaacaatatgcatatatattgcagtagcattaatttctgcataaagcactgccacacatgcatgtatatatactaataaaatggaaaatcatccgccctctcgttttcattttccctttctgatcccggcacttagcttagccacacaaagcaagcagaaatcctagctcattaattcgtccaatcacaatcaaattaactatgtaggcagcaacaacatgccaacatgaatgcaacgagaaacacacacatagggactggagagatctctagtgatacatacacgcacatagaaaatgacggtgaagctaagctagtgatcacagccaatcaaaccaaccaaccaatcgatctatcgaattcgaagtcaattacaagcagcccagggcatagtttggtcaaaggacggcagttcataacgcatcaggagtcaatttattagtatccatcatccatggccatgcaaaaatattgcatatcgatcgatcacacacagttgcagactattcgttggcactgacagctcagtctactctcgtagtctgaccaatgacatgtatcaatcgatcatgaggtgtttagatgaggggtgtaaattttggacgtatcacatcaggaattatatagggtatgacatgaggtgctcagacactaataaaatattacctccgtctcaaaatataacaatttttggctacgaatctggacacacagttgtctaaattcataactaaaaacgcttatattttgggacggagggagtaactaattatagaatccgttagtaaactgcgagacgaatttattaagcctaattaatccgtcattagcaaatatttaccgtagcaccatattatcaaatcatggagcaattaggcttaaaaaaatttgtctcgtaaattagttgcaatctgtgcacttagttattttttaagcctatatttaacactttatatagatgcttaaacgttcgatgtgatcaggtgtaaaattttgggatgggacctaaacatccccgaatgcaacgtgcttttactggatggacgacggatccaccggctgctagaagagtaggacgacgtagatttgttttgttaattattctaactttggtcgccgtcgtcttcttcttcctcctcggtccatggcatgtgcttggactacgtttcaaattaagcttgcaagttgcaactccatctatctctctctagatttctctgtgcctctttttgagagtctatcggtgggtctaacaagtcaaagaaaaaccaaaatttaaatatttaaagttaattttaagatatttttcaacataatttctttttaattagcgttggcttttaactcgctacgaacaaatatataaaatttttacctataaattataaattaatttttgtttcctaataagccagcaaccgatgaggctctgaaagtctccaggttggttgcaattgtacagggttcaacatggatgatatatgataatagtattagttacctaaaattgaccactgttatggagttatcgacttatcgttgtgtgtgttggtctcttgcaatcagcagcagttctttaattttttcttgatgcctgctgatatctctagaacaacaatagccgtaacactgacttgttcgactatttttcctgatacctcggcattgaattaggagttgttcaaacaaaattagttgaagttaagagcagatttcacaaaattgcactttgatataaactatggtaaagtcgattcaagcatatagtattacaagactctcgctttattgacaaatctatcacaaaaggttttgtatcaatatttatgccgtatttttccccctagtttttaaatattacaccttaaatccatactaccaccgttttttatatataacgccattgattttttacatcatgtctgaccattcgtcttattagaaaaattaagtaaatatattttcttttgtcgtcacttgatttatcactaaagaaactttaaacactacttataatttttaagatttgtataaaatttttaaacatgacgaatagttataaattgttgcaaaagtcaacgttgtcatataagtattaaaaaaatgaagggagtagtatatttctgtctctagatcaatcctaaacataatggtcaataaaaatgctcacttacggagcaaaagcaacgatattgtatccaatcaattgttttataaacccaaacaacgtctcgactatataaaaaagtcagtagggcagttatataaagcctcactgtttgacacgttttaagatgcattgtaccaactcctaaaatactgatattcttagagtgacattccttattaatttttgcatgccacaaaatgcaaagttgtaggcacaaaagcagtagcaaacagcctctgtggtcagacaatgtggcccatttgggctttggcctaccactacaaggccagagtttttggctggaccagccaacaacaatttgggcttttttggcccattctagcagggctatccagcgaattttttttatttttaatttttttttttaaaagttttacaaaaataattttccattttaaaaattgacggaagtggtcgcctaccgccctctgggagggcgatttttaaaaatcgccatcccagagggcggcgaaaatgacgtggcagacggccgttcgctctcgggcgacggccgtcaacgaaatttgcaggcggcccccttgccgccatccgctagggcgattttgtactgtgcggggggccgcctgcaaatgggcggcgagggggcatggaattttgcaggcggcccccttgccgccctgggggagggcgatttttgcctcccccctataaagcccagtcccccctctctgaaatttcattatattcactaaaaatccaaaaaaaacgaaagagagagaggggagggcagcagaaggggagcggcgaagccctgctggttcgctcacttcatcacaggtttgctcccatacatcttttgcatttgtactaatatgttatgtttgagtatatatgttgcgttttagttttagttccatatattttagcatatctgtagcacacagcacatatgtgtagatccagagcatagaatataatagtatgaattgagacatagacagtagtgttaattgtaagatgtagtttagtttgatctggagaatgtaacctacttttagaattttggagaacaatattgtagagaatgtaacttagggcgtagtacagaaatgcgaggttaacgcagttattgttttcatcaggcacaatgtcaaataaggtcacatttcagatagttcacggtgaaggaaatattagatttggtccagatggtgttgatctgtcagattttgtaatgacatctaagggcatcgataggcctgcggagagaacatttcagtcaatttatagttggttgttgagaggatttagaatagaccaagaagtctacacaatgtcagtatcagttgtagtgagtcgtgcaacagaaggttatttttgggaactaatgccgatggacagcactgctgcttggagacggtatgtggaaatggcttttgaacggtcatggcccctcgttatatttgtgtcggtacaagagaaagatataaatgtttcaatgcaaaccgaagatgtagagggtcctatcaatgcaggggatgttgttggaccatcgatgcaaaatgaggaaaatcaaccaagggaggagcaggccatgggcatggcggatgagggggagagagtcggtataattgttgatgaaatggagagggaagattcggataatgaggaagcggacgatgacgcatcatccgatgaggaaggtgatgtaatggccactgattgggcaaatgaggacttctctggacttgttatatcagagggtgatcatgtaccctgggagtataaggagaacgaggtaattgacggtgcaaggtatgctcataaggatgagatgaaggaggcggtgaagcattgggcagtttccttgcagagagagtttagggtggtcaagtcaacaaattatgtgtatgaagtgaggtgcatgaaggaagattgtccgtggcgtgtccatgcatataagggtaaatggaatgattattggaaagttagcattgtgaccgagcacaagtgctacttacaaggggtggagaagtatcaccgaaacatcacttcagcttttgtggcaagtgagatgtacagcagtgttgttggtaacattggctttgaaccaaaatcaactattaggcacatcgagaacaaattcaagtacaccataagctatgcaaaggcctggagagccaaacaaaagattattgagatgaggtatggcacatttgaaacttcttatgataatttgcctcgtttgttagccaccattgcccagaggaataataatacttactatgacctacatacatttacatcggttgatgatcgaacaaagagtgtgctgcaaagagcctttttctcattgggtgcttgcatcaatgcttttgtgcattgtcgacctgttctatgcatagatggaacttttatgacaggtaaataccgaggtcagatattgacagcaattgggtgtgatgggaacaaccaggttgtacctatggcttttgcatttgtagagagtgagaacactgaaagctggtactggttcctagagagagtgcacattgcagtggtgcgtatgaggcccaacgtttgccttatacatgatcgtcatgcgggtatgttgcgggctattgactacttgcagaacggttgggatgagaatccagctaagtggcctgatgttcggagtcggtggtgcatgcgtcacatgggtgcaaatttctacaagcaattcaagaacaagcatcttatggagctctttaagaggctctgtgcacagaaccaagagaagaaatttaatgagttgtgggacaagttggatgagttgacaacgaagcaaacagatgagcaatctcgcagaccacaagttgaaggtgacgagcctcccatacctcttggtgcattacatgatgacccaccaacaatgagaaggaggtcagggtcgtccatcagaaatttcactcagtggattgagaatgagcctaaggagaagtggtctctattgttcgacaccgatggatcttggtatggcataatgacaaccaatttggcagaggtgtacaactgggtaatgcgaggagttcggatacttccattggttgctattgttgaattcatccttcacggcacgcaagcgtactttagtgatcgatacaagaaaattggtccgtccatggccgataacaacatagtgtttggcaacgtagtgacaaagtacatggaagataaaatcaaaaaggcacggagacatagagttgttgctcaaggcacacaagtgcatcggtatgaaataatgtgtgttgataggagcaggcgtggtatctatcgcaagcaagccgtgcaggaatgtgtcttgaaggcggatggtggatgtacctgcagttgtatgaagccgaagcttcatcaccttccttgctcacacgttcttgctgctgccggtgattgtggcatatctcccaatgtgtacgtctcaaattatttcaggaaagaagcaatctttcatacatggagtgaggagatatatgggttcgggatctcaggatcttacacaacgctgagtgcccaagttttttacattccagatccatctaagttaagggtgaaaaagggtcgacgccaaactagacgcatcagaaatgatattgatgagtcagaagcaggtgggaggactttacgctgcagcaagtgtgatctgcgcggccatacttacaagaaatgcccgaagaatgcagaagttccaagcggcgcagatgctagtccatctggacaggcaagtgatggtaggcgaccacctggtgaaggaacaacaagcaggcgcgcaaggccaaggcgtcgtcgcgcagcaggcgattccatggtgtaacaatgctatcgatttaggaaataaaatgctgttgtgatgtgatgagtgttcggactaaatacttgtatcgtgtaatttcaattgaatgttgttgtaatgagtacctccgactattgttgtactagtagtattgcgaactattcggtgttgtatcataatgttatcgtgatgagtgttcggactaattactcatatcgtgtaactgcagttattgttgtaatcagaaatattccgtatggtgacacttttgtttgtttgtactcttgtttaatatgtgttagtaattcgcttatgaacatttattacttatgttgaactaattatttatatgtttctgatcaatctatttgatgcaggtatggcgtacgacacaccggcgctgttgaaccgtgggattgacaggaaccaccgctcgttcctgtcagcagtcgagggtgcacagctcggcaccttccgtccacgcacgtcgcgcgagtggttgcgtgtcgacccccgtcacgttccttggtacgcgtatgttcatatttcaactcaactttgctttgtgttgtacttatgtttgaagtttgctctatacaggttgcgtgcggcaggccttctaccactttgtaggcttgttgaggcggcggcggacaaccgtgacccagcgaagcggtgggatgcagaccggtcactccttgccgctctggtagaccgctggagacctgagacgcacacgttccaccttccctgtggggagatggctccgacactgcaggacgtgtcgtacctgctcgggctaccgctggcgggagcaccagttggtcccgtggacggtgtttttgggtggaaggaggatatcactgcgcgcttcgagcaggtgatgcgccttccacacctaggaccggccaacacccttcctccgtgctctacagtcgggcctagcaaggcttggttgctccagttcactgtaagtaaataagttgttattatcatacatgcttatttgcgatcaacagagtgttttgtactaacatttcattcttaattgtaggcggaccttctgcaccctgacgctaatgataactcggtccgacgctcccttgaggcgtacctgttgtggttgttcgggtgggtgatgttcactagcacccacgggcacgctgtggacttccggctggtccactacgcacggtccatcgcggatgctcagccacaggacgtgccgcagtggagctggggttctgccgtgctagcagccacgtaccgtgccctctgtgaggcgtgcacgaagactgacgcgggagcgatcatcgctggctgccctatgttgcttcagctttgggcagccgagaggtttgccataggtcgaccagtggtggacagcgcaccctacggggttggtcgcagcgcgcagtggccagaggacggtcccacgatggggacttactggtgtcgacgtggggttagtgcaacttcgctgcgttataagtttatcagtcgtcttcttttttttcttcacataacatgtctaattccgatcatgtttattccagcgtcgttacgctcacgtccaggtgagacgaggttacccggacttcgtgttcgagtttgaccgtctccagccgagcgacgtcatttgggagccgtacacagaagaggccgtcgctgcgagagcaccgctaggactttcgtcgttgtgcacacgcgaccaggcttactggctcaccatcctgccgatggtgttcgacattttcgttgagcctcactgcccgcagcgtgtgatgagacagttcggacttaggcaggtgtttccgggcaacgtgcagccgaccgtcctccatgtcgaccactcgtgagttcggattgttcatttctaaatttttatgataattacttcatcgagccatataatttacctctcttcacaggttgactcgacggggacagctagcaggcgcactttgggctccacgtgtacagcagtacgttgacgactgggtgttagctacagaggaggcgatcaacgagctcttcccacacacggaggagaactaccgtgactaccttcgctggtaccttcctcgcactcgtgcgcgtgtgaccttcactccagacgccccagagccgcacgttgccgctgtgacggacgcgtatcccacgcaccgtgaccgagactacttcgtgggggtacgtcgaatttgtattagttcttacaattatttcatttatcttgcataatataggacaactactgaattttttatttccatcttgcataggctgatgctgcacgggatatcagtgccgatatcaccgcagtccaagtgaggttgaacagaggtttgcacttgactgacgttgagcagaggatgaccttcgaccggatgcaggagaagatgcgtgcggtcatgcgcatcttctcctgtcgcagcgccgtggacgtcgtacctccagctggtccggtacaaccacggcctcgcgcgcctaccgtcggagcaggacctcgacctacggtacctgtttcgcacggtactgctcagcccagaggtttcttaagttttgtttctgtttttgtacaaaaacatcaccccgtcgtaacttgatgttccattctcgcaggacctcgtttgccttcgagcgcccctagcttcggagcagtgcgacctacagcaccggtttcgcacggtacagttcagcccagagattagttcatttttgtttcagcttttgcacgaatatgtcaccatgttttaacggcacgtttcctcatcgcaggacctcgtctgccttcgagcgcgttcgcaggcacgaccggcgcttccgcgagctccgcaggggcgttcgccacctcttcgggcgcgttcgccagctcttcctctcacggagcgtcgatccctcgcccacacggtactttactttttattaatactattaaatacctgtatgaaactgatggtccttgtccagcaggatttgcagccgggatcttcggtactggggcctcttcgtctcacgccggtaggactggtcctactagccagttctacgacgacaacttgcacggtgcacaccaccacgacgtactaggctcctctcagcttggaggagctccagaggcgcacactcaggagcagccagaggtcacacctgtacaggcaggacgggttggccgtgccgtacccccggaccgactcacgtactcccaggggcacattagggcgcagggtaggagggacaggggtaagaggcctcgtcagtagtgttctacctcttcagtccttatgtgaccgtttcttttggcttacaaacttgtaaagcagtactacttttgctattactactgcagtactacttgtgtttgtctcgtctacatagttcttttcgttcatatggtgctagaacaacttatgctcatgacaacacactttcggcgcttcacggtagtgtcagatccagtagcgcgcacagtccacaacagcacacatgaaaagcggcagctcgagttgtcactatcaactttcggcgctgcctgttgacataaagtgaatcacgcccacgcgtgatcgtcttgtcacatctaatgaataatgtatctcattgagttcacatatattgcagtgaaaacgacgctatataattgacaatctgaaggcaacctcttcatatcttctttcccactagcacacaacacacgaaaatggaagcgccattccttgagcgtctcaactggcgaagcgatccttttgctggttggtttccaccatggtgtgaccgtcctttgtgcgatagtggggatagatgcatactcaagtcttccctcatgatacaaactcggggcaggagattcttccaatgcgcgaactttgatcaggtatgcttcatctattcgaagttcaaatggataaaaaaaaactaacttcttcgtacacaattgtaacatcttacgcagacatatcgtccaatgtgcaacttcatcgagtgggtagacatggagaacccacaaaacgacggaacccgtgcttacccacgtagtgaaacaagatcggactacctaaggtggaaggatgagcatgaacgtcgaattgctgctgaggctttagaatggcacgtaaatcccctaggactccccatgtggcgtgagcgtccggagtgtcgttgtggtgaccgttgtcaggtcataaggtccgtaaggcaccgaactcgaggacaaaggtgtttcgtgtgtccaaacattgtcgacgatgatttcgtggtaattacaactattcttttcatcactcctcagtactatcattaacttaactatcccaaaatggatgtacataggaggatgtaaggaaatgtcaattcgtacaatggattgacacagtcagagttacttcaagtggcgggccgataacgcaacctgaaccgaccatacagttcattcatgcttggatggagtacgaacgtcgggtggaaattgcaagcttagactggaggaacaatccattagggttacctaaatggtccgagcgtccaaagtgtgggtgcagagatcgctggcaggtggctacatcctttgctgaacaaacattttgaaggagatattttgtctgccccaatgtagacaacgatttcgttgtatgtctaaccatttacaaaatccgctatgatttgcacaaaattactacccaaactgaataacattactatttttacagggcaatccaaggatgggtggatttactcgatggatcgacaatgtcactccatcatatcatggccagaagataacagagtcagaaacacaagtagagtatcaacgattgaaggaccacgagaatgcaatgcattctgaccgacctagaaggtgccgataggttaccgcatgcttgatttgtcgagatcgacaaatttgtaccgtgtatcgatggcacttcttatctattttatcattacaatgtttaattatggtggtgattttttgtatgcgtaagactaagggcctatttggattgctaccaaaaacatgccctaccttaccaaattttgaatagtacttgtttttgatttcgattgaagcctattcattggtaatacgtaatctagatttgagattatgtagaacattcttcactacaattttacattttggcagcaaaccaaatatgatcaaatgcaattttaccttaccaaatatttggtagtgccaaaacttgcttatattttggcactaacaaaatatttgtacggtaacattccaaataggccctaaaaaataataaaattgtattttaccagtcttggagattttaatcttgtatagttttcaatataaaaagatttgataactattgatatttatacaaaaatataaagcacagtataaattcgccctcccccagggcggcaagggggccgcctgcaaaattccaggccccccgccgcccatttgcaggcggccccccgcacagtacaaaatcgccctagcggagggcggcaagggggccgcctgcaaatttcgttgacggccgtcgcccgagagcgaacggccgtctgccacgtcactttcgccgccctctgggatggcgatttttaaaaatcgccctcccagagggcggtaggcgaccacttctgtcaattttcaaaatgaaaattatttttgtaaaacttttaataaaaaaattaaaaataaaaaaaattcactatcaagctgtgtatacatctgatgagtcctgttactttctcaaatgactcgcaactgagacaaattctgtaagttcatatatattacatctcatgtttctcaaggaaattaacacagtggtcaatcatctggaacttcagctttcatgaaaatacaccatcatcgtcatccagccactgcttaccgctgtatgtcatctcccggtcctagatcgtcgatcgctgggcgttgtttgtggtggtcagtcacagactggtacgccattgccagagctagagcctgctccccaatgcacggatcaaaatgacaggtcatcaactcatcatcactgttcttcatgtcaacacataaaatgtttatgtcctgagacgagaaagaacttacaacgtggtcatggtcaggaggagcgtatatgcccgtcgtcacggtggttcttctccgcgtgccgccttctggtgggttcttgatgctcttcaagcctgtcggcaccacagccaccggcatccccacaaggtttccaagacagacgagctcccagtcggtcacattgccgatgaatgcatcgaccgtgaagctctccctgacttctctgatcagtttaccccgtgctcgttgtgcctgttcatcgatcaaagaacaagaatataagttatggtgactcgcgatcctatagacaggtacactccttcagatatggttagtagagcacctgtatatagtcgactgcggggattaaccgtgcgcggcgaagctccactggccattggtcctgagcttcatagtcgtcgtcgtgtcgctcgcgttgccagttgtcgaaatgcgcaagcatgtcaacatccatggtgatgttcagtatggattggaccgattgaacggtgtagttcagcttgaaaggcactagcttaacacccttagcggaaagaacatgaacaacctgtagcaatgatcaaatcgaaggatcagatcaggaatgggtaacagataaccaggctgatgcacgtaaaaaagctctcaattacctccatctcagcactgtcaagatatccaacagtgagttgtctgatgtcaacatgaaagggatcctcgatagcaacttcacgagatgatggatcgccggcatccttgccgcgaattgcgtcaagtacaactgcgcaatctatcgcgcttctgcagaaaggaccaagtttatcctgccatttagaccaagatactaattgtttaaaagattgatttggatatgactgggaaagcgtaagacttttgaatggaaataccaagctctctgaaatgctcatgacgcccgtccgtgcaactgttccaaatgttgtgcgcaaagcagttactccacatctagcggcaggatatgttatggaacctgcagtttctgaacctattgcaaaaggaaccattcctagtgcaatgaaaaaacttcgctgagtacttgaccatatatacttcatctccttacacatgtaaacatgttgtataaattaacctgcagaggtgctagctgctggccctgctgatgaaccagtagaaaactcctcaatgttccaggggtttcttgttctccccccaaaccatatatcatcataggcgagcgagcctgttacaagttttgctacaaggactgccccagttgacttcaatctgaaggaggacggcatacacataaggagacgtaattagaattgatcacatgactcacacataactgagaagaaacaaaccttttgtagacagaggcttcgacatcaagaatttggttttcaaaagttcttgagccccaggtagttttgtattctggtactgcaattatatccttaaggccatacggaatgccatgtaagggacctaatatcaatatttgtcaatgcaatctttacttttgagcataatgttttatatgtaacacattttcttctagtacgactcacctaaagagtaccctactaatggtataactgagagattttttaaaggcaaacaaaggagagaactccccctttgtaacacacacatggattcaactaaaaaaataccagttgtttaacatttcgttccacaggttctcaggctaataaaagtgattgcatcgcaaaatatgaagcttcaatggtgcataataataaaaaaatgtagggtaatttccacgagcatcaattatgacaggaagctgctatggccataatatattaccaacaaaaggagagaaacaagatcaagactagattgtattgcagtaacagatatatcactgagcatttcaagaagatttactgcataccaagatattttccttgctccagcaagtcatcagcttctttcgcttgtttgtatgctaaatcatcagtgatagtaataacggattcgattataggaccatacctataaacatacaaggagttacatgattaaaaacaatacttctgagcctctcataagtccatctgaaagactgaaacaaatgaggaagacagaaaaaggggtctaacctctttaatctccttaagaacacagcagtaagttcacgcgatgtgacttgctttgtccttataagctccccgagctcaattatctgatatgaagatcagaagtttgaaataaatatatatgaagtttgtaaccaatgtataataacaattgttaaaaaataaactgaccgacataaaagcaatatcttcatctttactagggcgatgtactgaagatgtatggggatattgaaagcttttgttctcactgattttgctttcatcgctccatgatgatttaaagaccaatgcagacgggttatgcaatccaccattctctaacgccaccaatttccggttgtctctaaatgcaggtacattaaattcttttgcaccatcttccatctcccgaagctaacagaacagatagaagtgtagataaaaaagatattaatgcaactacttggttgtgaaaacttcaaataacattttgatagtacttttgaatcgttgaaaaaatcagcatcgaagtacttcatggaagccttcaatgcaatcacaccagtaattggttcttttctggaaacatcttttgcagaaacagcctcctttgtatcctgaaaatgaacagacaaattgctaaaaaaaaaattgtcgcaatgaaaataaactgaatattaaaaggagagcaatcttgccttccagatcttgtggtatttggaaacaagagtatatgaatggctcttcccacaggttggccagggtaaccatgtgcattttgttggccacgcctgtgtttaaaacaaaagcaaataaataaccatagtaataatttgcaacctaataatctatacaattgacatttggcaaagtgaatcccttaagaactaagtaacaggaaaagatgcagagttaagaaaaaaaatcaggagttcatatgaatatgaataactagttctgggcttctggccaaaggccattcctgaacacctctatgccattagtcaaacaatagtctcgaaagatcacacacctagtcagaaattccagcacacaagtgaaattaaataattaatctacttggtaggtaaagccacctatcttagtcagattatcactgtcctcacagcccaccgttttctttgaccgacaggatcatagaggtaaacccaaaactaggacagccaaaagttcagagaagaacactgaataccgatcctcaggtggtggggatgcaaagctagctagaggaatccaagaagagggggaggcgatacggtatacgagcgcgtaccatgtcggcgatgctcctcgcgacgccgccgccgccggttcttggcggtgctcctgctcctgctcccggtgcggcggcagaggaggagaggagagagacgaggaggaggtgggggagggggagggggaggagagggcgacgtggctcccgcatggctgacacctggcgggaaggcggggagggagacaacgagggatttggttgcaggaggagaagagcagagtggagaagacgaaagggtttcatgacttcatgcttggttgatgattgtacatttgtactactactactactccacgagtctctcgctttctccttgtttgtttattttgttggagatttggggtttgattttgtcgcatcttatattgcgtgggtgacagtttgtttatgattcactaagaggcataatcctattgaaaaccatggtcctattgatttttttttgacctttttaatttttaattttattagtattcatttccatttttcaaaaaaaaactgagcgtcgtttagccacgccagcacagagttatttggccacgccaaaaggtttagatttgaaaatatttttttaaatgactattaataaaattaaaaaaattaaaaaaaaaattgatcatattatactttcgatatcctgtaaaacatttttttatagaaagctacaattattttttttgttaaaattatcggctattggctaggcgttttagataactacaaacaatagcatatgattttattataaaacataacttatatcgtttattacaaaagggatccatttgtcctgcacgtatgcaatgtgtcggagggataagctccaactgtcatgggaaaccacgatcttggatcgtggaggggtttaaggcattcaaacatgctcgggagtaaaggacgcgaacaagtactcctatatatgtttatatgtttggacctcctgaaagatgataccctattcctatttgataaaaatgtccatataaagttaggagctctcaagctagcaaacctagttcatgttgattattgaaaaactaaccccttctaatcagttttgattgggcttttatacccaccatctctcactattagccgagagaaatgatatactgttgtaacatattcatgtcgaaaataagtgaaatagtaaggagagagaatatgaacagacgactaaattgtcgtcggccctccaagacgagccaaagctactgcatctaatttctccctgcatgtgacttgtgattggatggtgagcttcccaagacaacatgcagcagcagcaattggattacgcatgcaagcaaaatgtgatcatattatagtagtacatcttattattgtacaaaataattttaactcaaaccgtatttgaggcggcatgttttagagttatcagctggctgtatcattgaacttgctcttagcctattttctaacctttgagcttcgagccagtttcagtcgcctatgcagcctttctatgggactccacaccgaatccacctataaaggctcattgttttcaccgtagtctcaatgacactaacttcgttatctttatggagctttctaaaatagtgtatcgctttgatcaagtaaattagtgcttaaagggcttgttcggttgcttagtacaacggctgctaggcaacccaaggcagctgatcgcaagttgttttgctgcatctacaagcagctgcttggctgctaagaagggcgaacaaaccagtatgtagttttgtacttttgttgacttaaacagcaaagtgattagtattgtgataggttttctactgtttagattattatatacttgtaataaatatgtacttggcttgcacatttttaatatcctttgttctaagaggcaatcacaaatttgccaatggtttgaatcgttattacaatactgccgctagaaaattgcaaaaatatcaccagaactgatactcaagtggcattcttacaaaattaaaaaaaccaatggcaaatttgtaaaatgccctttttttctaaaaatagaagcaaactaaaaatttttaaaacccacaatagaagcaaaataaaaaaattaaaacccacatggaatccacatgacactgaaacaatatattccaccttgtttatctatctctcccatcatttggtcttggtagcggtggttgtggtggaggtgcgcgggtagttaggaggtgaggagacactaactagtgtgcgatgtgcccggctggcggcagaggaggcccagtagtcggcggagacgcgcctacaatccaggagtcgatgtcacccgctcttcccaccatcgtgagggcttgctcatagtgccgcttcttgcaccagcaagcagtagaagacaccacggggagcggtgtagactggcagaagtagtggttgtgccggttgcgaagcggcgcatagatttggaggctaggtggagtatggcaggagcggaggaggcccgcggtaccaaggcaatgccatgctccctagacctccctgctttcatcgagcccgcgcttcccctcatcgcattgctgacgacaatgactcctagcttccatctctctcctttctccccctatctttccctctctgttctctcctatcttcttggtgttgaggcctgaggcactcacgatggtgtgatgacaacctatgaggattggactagcagcgaccgacctgagcttccacatctccaccaccggtcaggctcgatggtgtagccgccaccgccacccaactcctcttcgttggtcgcctcccttctcctcatcagtcgcgtggcttggaggtttggacagagatgggaggagatagggggagagagggaagaagacttgtttcactgatatgtgggatctacatacctttttactttatgtttttattttttcctctggtgctttgggactatatttgtatcggttttaaaagatgaaaggatgcgttatatatatggtattgcggtttaaactcgactttaagataaggaacctaaagtgaacttattcaaagaaaagggaaaacataccgtaacattggggggcgcctagctggcgcgtatgcgccgctagcgcgcaccttccccatctaaccacctatactagtattagttaacattacttaacactaataacaataattaggaaagattttaaagatttttttggagatatttttactaacagattgaaaatttttcaagttagaaactttcgatttaagatttaaattttaaagttaaattttgaagacattcaactcagatttgaaaacattcaactcagatttaaaaacattcaactcagattcgaaaactttcaagtccagatttaaaagttttgaaaactttcaactcagattcgaaaacttttaactcgagattcgaaaacattcaagtccaaattttaaaattttgaaactttcaacttgagatttgaaaattttaaagttaagatttaaaaattacaaaaataggaaactaatataaactaattacgattttttttattcgtacggcaaggaaaaacaaacggtgaaaaaaaaatgaaaaaagaagaaacgcgggcgtaaaaaaaaagaaaaaaaaagagagaagcgcaagcgcacgtgcatgggacttgtgggccggcgtgcgcgccggaaacgctcacacgcgaattagcctttccggtaacattgcagcctatgacaaatcgttcatgggccgattcatcgtaggcccaactgacccattccagtccgggcccacctccactccccgagggataaacaccacgtgttcacactcgccccaccccccgagggacagcctggcacaactccccaccgtccgatccagatccgaccgctcacatcgccccagccacgtcacctccacctccacctccacctccacgcggccacgtgtcccccgcctccccaaactttttgggaagatggcatttgcgagagaagatggcaaatagtaaaaaatccccgcttctcctcctcccatctcgccgcacgccgccgccaataaaacgacgcgacgcggcgcggcgcggcgcgacccgatgcgacgcgacgcggcgaggagagggagacgagctgagcagcggcgacatggcgagggggagcaggaggaaggggtgggcgcgcggggcggtggcgttcgcggcggtggcggcggcggtggcggtggggaggcggtacgggtgggacggggaggcggcggtggcggcgttccgggggcggagggacgcgctgggcccctgggcggcgcccgcgtacgtcgcggcgcacgcgctcacgctggcgctgtgcccgccctacgccatcctgttcgagggcgccgcggcgctcctcttcggcttcctcccgggtgtcgcctgcgtcttctccgccaaggtgctcggcgcctcgctctccttctggatcgggaggtacgggacgagttcctcctcctcctctttcttcgcttccgtttcggttgctcgtagcgctcgtggtggatgttgagcagggatttgtagacgtcgagatctagacataccgtgttcagttcgtgcgtgccctgatttgattcctgtttcgcacgatcgagaagatctgacaagaattgtgatgagagtcgtatgatcggagatgggttggaggaaaaaaaataggctggcatttgtgctttctcgtgtccttcgaggaggaacgttgcgagattctttgcttgtctgtgtagaattgttggaatttttttgctttatatggaatctggttatgatgttagagaaatactgcggccgaaggaagactgatttgtttgcacttttttttggggtgaaaggtggttggtaggttcaagaactgaaaattgcaaataaaattggaaactctcatccttagtctgttaaactgtataagaatatataaattcaggagctgctgggatgaaaagctaatcagctatgcaatcttgtgtgtacaagcgtacttttgtacactggtgatagttaatggagtagtaatgctaagtgaacttgaacatgagattcaggaggacaatttaatggttttgggaacagaaaccaagagtacgctgtaacttagcatatggcccattgattgattctggttgaaatttcctgtttggaacaaaggagttccattgaaatgctaggggatatggcctgttctgttcccaggatacattgtcatttatctttgatatcatacgatatctttgatatcatatgtttagttgcaccttgtttataactacagaacaatactaggttgatactttaatctttgatatcatacatctttggtaagattaaataagaaaatggatcctttgtgatataaacatgtgattgtcacacgtaactttaattagaataaacctttgtggtgaggaggcctctaatttggcagcccaacatctgagagctctcccgatcaacatacttttagcgatgatgctggttacatactgtcacaattatattgttgccatgctatgtataaatgatggatcaatgcttattgtttataatactaactttttagtcatattgcacttgattggtttgtataattgaattttttcataatcaaattctgaatcattgcgctccaatattgcttacatcattccttcaaacaatccaataaacaattacttagaaaacggctccaattgaacatgttaattctgagtaagttaataaactaaccaaacctgaaagttatcttaaccatagatagtagaggtcaggttggttgttgagcagcctgaagagctacaacttcacggaaaggaccttgagaggtataactgcagcttgcctaagaactttcaaatatatgtagtgctggcaaagttccaccttttttggtaactttgtggctgctcatagacatgagagaagcaaactatctctcactaaggcaatgaatgcgattagtatcgaagagccaccctgtcaaggagcaagtcaagcaaaaaaaacaaagggttaaaagtcccaaatgaacaagtttaagacaagaagcggaagaatttttccctgatcaactctacgcggtcatgctgaccatattaaggttgtgtttacaaaaggttacaaataattcgcagaatatgttcccttacaattccaatagcccccttcttgttctgggaaaagttcttacccttatttttcttaaccttgtggtccatctggcacttgtaagccttgttttgcttcacttgctccttggcatctatagctgctgtcatctcagtgatctcttcgatactaatcgcatccattagcttagtgagagatacctgcttctgtcaattggcatctatgagcagccacaaaatcactcaagatggtggcaactttgccaacacaacacatgtatgaatgctctccagaaggctgcagtcatactgtcaaggtcctccccatggagttgtatctcttcaagttgctccaagaccgacctgccctctactaaattatacttaagataactttcagatatggttagtttactatgttcaattgaaccattttaaagagagttgtttggatagttttagaggaatgctgatgaagcaatatttgagcatattaaattcagaatttgattacatacatgaaaaaaaatccaaattgtataaaccaaggaagtaaaagagacaagaacttctgctgccttataaacaaataagcactgatattatttatacaactagcatggcaacaatataattgtgataacacataacaagtattactacaggttatgttgattgggagggctattggtagctaggggaaatcctcgcaggttcctttagctccatgtgtttggcctttgaggccagctcggcccaatggcctaaagcagcccaaagggcctcatgtcagaaatcccgatggatcggtggatagaactttaaacaaacacaaaacacatactatagatgattcgaaaaacaaggatgaatttttctgtttacaaccagaattaaccgcctagagcgattttcacgttgtgcctaatgccacgtccatccccacaacgcatgtcgtttgtctcaatcatggtgagagatgcgggcagccatgagctagcctcgaatgccctccaccaaaactaacatgcacgacatctacacaatctacacatctacgcacgacatctcatcgagatgaatgacgtgcgccatggggatggacgcggcattaagcgtggtttgagaatcactctaggccgttatttccttgtaagaatctggctttaaatgcagcacaaaagttcttccttgttttttggatcatctacagttcgcgtgtgctgtgtttgttcgaagttttatccgtcgatccatcgggatttctgatagggagcaataccacccacatgaagtggctgtagttgtcgacggtcagaaggaagtatatgctgtttgtttattgccataacatttagcactaacatgatttttgcagcaaatccagacattctcatgttttgcgaagtacgtaaactttttcgggttcacttgttcctctgtccatggaagttgaatagcccattatggacatttttgacacttttgctttttatttggatcaataaatgaggtcaaatttcagctaataagaaataataatctctttactctagcccatcctaatcacactatgcaggaatctagacatctagatataaggcccactatatgttgataacttgatattatgatctgctttattttgcagattgatcatcaatatgtcctggatacttttttttttctggttaaacaaagaaagtaaaatcccattttacatgttttgaataagtgaacttggcaactaaaaattagtgttatagtttgctttgtgatgccatgcaagtgggttcttgcagttatgctggttccatattgaatattgatacagttaaaagtggccatgcagtcagcatcttcaattatactgatgctctttcaggcacaataacatcattacgtcaacccgtctagtgtataacgctgtaatgggatttggatgtacatcctattatttgtcctggatcacaatttttttacctagataaagaaagtaatttccccatctttgtgtggttaggtaaattgttttataggtcagttcatttctcagttgtccatcatcttctatatggctgtacccatgggtttgtgctgttatcattcatgcatcatatattttcccttgcaatattgtttttaaaatacttactatttcttggttagtacctttagtcttggctctctttgctaatgtatcttcttaaaattttcagggcaattttcagactctttacttcagcaatggattggctaaagagtaacaagtacttccatattgtggttaaaggggttgaacgtgatggctggaaatttgtgctacttgctagattctctcctctaccttcctacataattaactatgctctatctgccaccgacgttggatttttcaaagattttctacttcccacagttgttggctgcttaccgatgatcctacagaatgtttctattgttagccttgctggtgctgcagttgcctcaaccacaggatctgagaagtctcggatatactcctacttgtttccagtacttggtatcatgtctagcattctcatttcgtggaggattaagcaatattcttctgcccttgttattcctgaagagcttaaaaattcatctactaatggaaaggctaatgtggatgacaaggcagtgtctgaaaataccaactctggggaaactaggaaaaggaggtgaccatcacaatttcttgcatattactgtgaggagctactacgaattatcaaacatttagagtagatgcagatcaagattattccacattggtcaatgactatagtaaactatgttgtctgtttcatgccattgttttgggggcatttagcagatgcgcagtcagctactgtcttgtttctgccatcaagcttttctttttctgacacatgcagatgtttcaccttgcaaacatggtagaagttcatatgctgtacatctaagttgggtagttacggtggtctaggattttcttgttaaattatatctaaggaaaccggttttgatttccttccctacttgtactgaacccatatatgacttggtagaattcagtgttctaatggaccagaattcagaactgtttctgctgttgcaatgtagaacagctgtatcacacctttttatatatatatactcttctttagccacaatccaaagcaaattatgcagtgaactccaagaatgttgcacaggatactcagtcttctgactttggttgcactcctgtctcaacacagtatttaacccatgttctgcttcactgtatttttgtccaacaattccatgacatgaagctctccactgtcctgtgttgttaccttcttctccttggtctctttgctccagaaatcatatcagatagccctcctcttcaggatgtatgccctatggcaccccagggtgagaggaaactcttcatgaatggtttcttctgcaagagcccaagcaccataatggcctctgatttcaagacattgctgctcaaccatgccggggacctggacaacatggtccggtcatcggcgaacatcatcaccgccaccgagttccctggcctgaacacccttggcatttcaatggcgcggaccgacatcgcggtcagcggggcggtgcttccccattcccacccaagagcttcagagatgatgtttgttcacagtggaagtgtggtggcaggcttctttgacaccaaggggaagctgtttcagaagacccttgctgagggggatgtcttcatcttccccagaggtctggtccatttcatcatgaactatggttttggccttgcgacaactttttcggtactcaacagtcagaaccctggtgttgttgggatcacccatgcgatgtttgcgccagattcagaggtagctgaagggctgatggccaggatgttgagtttcagagatatgggaatggatgacagtagtagtgttgattcaccatggttttactgatcatattgggttattcaatatagtagtagatacaacatggatgaaattgctagatggatgatgttttctagtttctatctgacgatttcagtcagtttggtgtataacagtgtttgtactatgtgatgcagttgattcatttctctagctgttgtggtcctgagtatgaaagatcagcatctcaccacacaaggattaagaccaaaattttttatatattatccccctacaggtggctaaaacatagatcttatgccttatctctatctgtctgccatctcatttgttcttcacaacttgtgaaggcaattgggcgcgatgggtacaggtagtgcctacccatacccatgcccatgagattatctgtgcccgtgggtatacccattactacatgacaggtaagaatgattgctcatgcccattgcccgcgggcgccttatgcccgcgggcgtgcccgtttacccgccacaacaaaagcagctgacaaaaagtctacaagcttctaagttcgaatcgaacttaaaacatcaaatattctccgcctcggtgtcgtgtctctcctctggcggcgatagagtaaggggagagaaataataagggaaataaaagggaaattgtaaaaaacaaagaacgtggcttatgtttctagtggattttgctcctagcctacatgtaagttcgatttcgcaggtaaatgggcaaagcaggcatgggtagtgattacccatacccatgcccatttacccatcgggcatagcttttgacccaataagatactcatgggtataaaatggagaacaaacccaaccctaatggggtttttacccacgggtaaacggtcaaacgggcacaattgccatcactattcactcacaagcccaattgcagtgtccagtctgatgtcaattgtgacgtgaaaagtgcgtcaagcaacagccaagccatcctccttgcttcatcatcaccaggcaagtttggcatgctctggacaagtagccttcctttgccttttgctttactcggtggaactcaacaccatttgtttagtgtaattagtactgccttttgcttcttgaaagtgaggagcttctctttctttttccatgccttccttttcacccttgaaaactcctctctctgattaagccaggcaacttgggcacctggctagttatatactccatccatctatttcaaaatataaggcatattttatttcgttaggaccaataataactttgttatagtataattttgtgatatgaaatagaatttattatattcgtatttaaaaatatttagttatgtgcttttaataacataaataatatcccaatagagtaataattgttggttaagcctcgtcataacgagataaaatataccttacatttgtaacagaggaagtatatgccacacactgctttgtgagatggtgctgtaactgatgttgttaatcattgagggtcactgtgctatattgctgatttgctgccacacatgaatgtgtggataacttgttaggtgatcaattgtcttgggagatagaagataacatcaattttgagtccctcatgttcttgtcaagcgatttatttttaatttctgtttgatcagttacagtaaaagtgggtcttgtgtggaaggtggtcacctggagaaacttgtggacttcatgtctctgcttttcattttagtagatgacttggttcctccatctttttcagggatgaattcttcatcattgacatcttggggtgcaaattttggaggattttgaaacgtcggttttgcttccaggacatatttcctcgctgatagtgattttccatgattaatggcttttcttgttttcacaagcaaaaaattgaggaagattgaaatgaagaccgtagtattaaataatatatattgatcaagaattaaacaacagaagaccagattattgaagagcttactaattaaatgatggatgagaaacatttctaggcttgaccaactctccaaagatcaaccaaaggtgtgcaattttttttctcttaagtagtaagaatggaaagcacattaaaacataaaatattgaacctaagtgttatttttaataaaaatattttaaataaaaaaatatgattgatgttcaggaactagcagtctccaagttgatcctgcaaacaggaatttgtcagtttatatgtggttctgtcgtaattgctatagaatcatcaacatcgttattaatgtaaatacagtcagagtacgctacttcgcattgcaataatttatttattaaaaatacgcaagatttggattagtcaagtacttggttttcccacaaagtcaagctgaaacttctttatcatgagatttagatggcaaaaggagtatgatactacataatcttgaccaagataactgtatatgaaaaatatgtttcattatctgatctcggtaataaacaactaaaaaattgacatcaagtttggattatccggcacacttggcagaatttgagacaattttttcttgggagaatttgagacaagttcataaccggatcaggatcagatagaatagttgttgaaatagttaaatggaactaaagttaaaaaaaaaagctcagatttttattgttcaacagtgcatttacagccatgaattgcaaaaagtattattttgcgtaatcccctctttatcatgcacttcacagaatacaatggaataaaattgaaggaacagaaagaacagatattccaaaaagtaaaaaccaaagacaactactctagttgctatgtgggccaggagggtaccatcatgctcatcatcttctagaaccctaatatgttggcagtgctcattggttgtggacataggacatgaggttgttcttgtttgttggtcaccaccatgtgcagtgctccaatatcaggtgtgttcttcaggtccgcaattcagtaccagccacaaaaagtgcaatttctttcttgcaatgggcatgatttttcttgttcttggccaaacatttgtgatatttttgacctgattaggcctccatgaaactctctacatgttactagatacaaactgattttatcaaattggctactctaagtattacaaagtattatctgggagaagatctgtacaaaggggggcattggattattcttccagagcaaaaaaccgatgaaattatctggccaagcctggccacaatcaagcaatacctactttgatctaatccctctacatttccaatatgtatgtcatcatacttgtcatatgtatagaactttgtatgtactaaacatggccgtgcgaaaactttggttttgattccagataactagaaattctccttgtggaagtcgaatttcgtgctcgtctttctcgagaaatcttgagcgagctcacgcagttccttcgtcagcaccggcgcgccacagtagaacacccctgtaatgtcaaagaagaatcaaatttagtgtaaaaattcagaattccaatagtgcatgaagacatgataggattggattgagatgatagcatcatgcctgataatgatacagttaggtaagggagcacttcttgaaaacatggcacaggcatatcttgggaatctttttgtgcatatgaactgaactttatgggtgaagaattttaggatacctgactatgtattgtttaatgtatagctcgagcctaaagggactgtatgccaagcggttgtaactatcatcaagtaacaatgattggtcaatccataaattatatagtactaatatgattcctattcaacctaacaaacttctccccaatccacaaactaagtgcataaataaacaaatctcaaaagtctgatgttgctaatgctatgcatgtattgcttgtcaaaagcttcgacgaagaagtatttagtattcctttacttattagctgaaactaccaggaagcactaacttctattttttttagagaaaaaatgttactcaacattcattgcaatctaattatcagtgacaactaacagtgattgatctgtccccattccctaatctcaccagcaggttcctgttcaaccttgataactgctgcacccagtccatcactacttccaattgaacactcaacctcaaaactctgatcatgcttgtccccatcagctagatccccagaagcaacttatgccaaccccaatgcagctcaaaaccagctcagcctactatatcaagaagtctaatttcccaaagcatgtagtatagatttaaaatttcccctactcgctcgaaaaaaaaattatcggttggggattaaaaaataaaaatatcccgacccgacttttcacagtcttcaatatgcaaatttgatttaaaacttgtaaagtctctaacccggcattttacggttttcaagatgcaattttaattgaaacccaattttttacggttttcgagatgcgactctgatcgaaacttaacggaatgttgggagaactagacaacaacaacaacaacgatgatgatgatgacgacgacgatgatggtggtggtggtggagcttaccgacgcgttggtcgcggtggttgagggcgatgcgcttgtagacgttgcgccagttggggcgggcgaagtgggtcttgacgcgggtgccggagacgacgtcgacgccgtgcttggcgtggttgagcgactggagcatagcgatgagcgccgaccgggcgtccccttcctcgtacacgctggtgcagtagttgtgcagctcgatcacccccttcttgtccgtctccgccacctcgtccatcaccccccggaaccactcgaacgacccctgctcccgcgtcacccagtagaagtaggcgcgccgcgtcttgaacgccgccgacgacgacgacaccgagttatcgttgccgtcgccgtcctcgaggtcgccgtccagctgcctcatgttgtttatgatgtccttgatgatggagatcatcggggtggcgccgatcccgaggccgacgaggaggacgatgtcgtactgcttgtagtcctgcgccggtgcgccgtacggcccgtcgataagcaccttggggaagctgcagtaggaaaaaaaattgattttcttaaaattttattaattaagctaaattattaccatattatgatattatctttgattaattttgataaggaaattgaaatggtacggttttgtagacggatacttcactgttgttcagctagaaaaaaaatgggaatctttagtcctacattttacatttctaggatggagatagaacatgagcagagaatatgtgtttgttctctagtcaccaaaaagatttcattgtttttccctacaagacaagaaatattccattcttgttctacaaagagaaaaacaaaatcaatggaatatatggcttggcaaaaacatccccccttcaccttatcctcaactaagggccgtcttccacaacacagaaaaaactctatttatcttctcttccacactcatatcatcattattcagttagttgcaacctacttaacttactagtactaccaccatctcaccaaattaattaccattacaccgactaattaaattatcaccaccctatctacaaatgtcaaagatcatgctctgcagaacagcaaaggtcaacccctactacacaagaactacatatacacacacatgatgaggataacaaacacaagtgtcaccaacagaagggacacaataattaaacaagccatgtgaaagcatgctttgtactactactattactactacattttgctcatgcctgatgcaagagatgatctcattctcacacccagtgcaagcttaggtcagagatcatgcataccatgcatatatacatacacgcacaaaaaaaactatttagacagatattccattgaaaggaacaattattttaggtcagagatggtggctaccaactcatatcacactagcactttacactaatccccatcatgtgtgaatcaaaaacctagtagtggtaattatgtttacacggccactaacacttactaccaaccaccaacctaccctgagccacacaagtgtaaatgtgtgaccaagctgacccgatcgctcggtcgcaaccctgaccggcgacccggtccggtccgacccacctcacctcacctcaccggctgaatcactttccacacgctcgttgtaaggctggaccccatcatgttggaccatgccgactagtttctctttttttttttggtctcttttatgtggttttttgaaaaaaagggggaaaatgtggttgacatttgagggaaatgcggggaattttcgtagcggggaagaagaagaaggggggattgttttgcgttcggggttgtgttctcaccttgggttggtcatggcgccgtcgcggtcgtactccgcccggagcaacccgctcttcccttccgtcggtggccggcagacctgaaaaacataatattgtcatgattaattcttttttactttgcaaaaaaatgtacaagtcatttgttaagctaaaatattagtgatagtaaccgtgacagcgatgataataataatgatgatgaggaggagatttgtaggggcttaaggttggataagattgtgagatttgtgacaaatagatggtgagatgggactagcggagtacccttgagaagacgttcttaagctcccgtgtccagtcaccgagcgtcctgatgtggacgctgacgtagtcgtcctgtggggccgacgtgatggagaatgggtgcctgcaggtggggtcacatggtcagcatcacatccttatcacagattatatatatatacacatatatccagcttatctcctctgctttggcttagccgtcctaataattatataaaagatgatgctcaaagcattcccacttaaggaactttaattgcttaatcaaatcaactagacccacaggtgatttaattaattattagtccaaaaggcatccttatgcactatcctacttccattatatatatatatatatattctgataatccgatcggacggctcaaatcgatcggtgtgcttaccattggaacggcgagacggcggcacagttgacgaagatgtactgcccactcttgtacttgaaaccctgtggcttggagaagtgcagcgacagcacatttccggggtacaccgcaaccttgagtatcttcactggcctcacgctcgaccggagcgccctcgtcagcctctcgcacgcgtacaggaacatcggcaccgccaggtacatccacgtctgcgtccacgtcacccaccatcagcaccgccacgtaggatagagagacgagggcatgtacaatggactaatagataaaggtttagtggtacgtaccgttttcttgtaccaatccttggtaaggaagaggtagtagccgtggacgatgaggagggcgtagacgatgacgaagcagtggtgggagtaccagaaggcgttgaaccccgtgaggcggttgagcgggcgggggaggcggaggcggccgcggcggaaccacggcgtggcgagggtgaacgccaccgccatgagcaccagcatcaccagccccgtccacccctccgtccccttcacgaaccaccagtagttgggcggccgcgtgtcgccgaagaacctcttcatcggctcgtactcggcgtcggtggcatggagcagccgtggaaaatcgcaggtaaggtgagagatgacgtgcagcccggcccccacggtgatccccacggcgatcaccttgtggaagttgaggttgtcgtcgaacggcacgacgcgggcgacggcggcgcggttgcggatccaggtgacggtgttccggcacaccgggaggaggatgagcgccatgttgaacttgagcgtctcggcgccgcccttggcgacgcagacgcagtagcccatgacgtggaacacggcgcggtgccggtactggatgaacttgtaggtgaagaggcccgcgcagatggcgagccacaggaggagcacccagacgcggcgccagttgtcctcgaggaagtaggaggcgcgccgccaccaccgccggagcgggttgggctccgccgtcggccggaggttctggctcagcatctggctcaggttccggctgttcgtcgtcccgatcctcaccgactggctcggcgcttgcagcagcagcatctccaggttgtacagctgcaaaatcataaaattattatcggccatggttgccggcgacattgacggtgacgtcgattctggaccgaaattgtttgagaatttagtgaaatttgactgaattttgaatatatgtacctcgatgtagccgaggttgctggggtcgagctcctccatgatgaggcgagcgtactcctcggactgctcctgcaccttggacagcttgttggccgacgcgctcagcgtgataatctggaaggaagaacacaatagttttaattataattctaattaattagtcaaaaaaaaggattgaatctttctacaaaagaaaacaagaacttgatccaaaaggggagggaaaagaaacacgatctttctctatcaaaatttgatccggtaacaataatcaatttaagaatgcgagtctggttggccattgcgatcgagacacgacacgaggaaaagaacttgaattagaagtcacattaaaaaaaaaagtcaagcaagaactttgctgtcctcaagagagcaggatgtgcagttgtggagaactggtcgatgatgctgatgtgcatgtgccaactaagaaattgagcttcaagctatccaagctactactatcttaactagaacaagaaacagagatcgaaactgatcgaaaaccgcttggaatttcagagaaaatcagcaaatttttctgttcttggagggacaaaaaagctgggtatgtttgaattacctctttaacctcctcttctgtgatcctgccatccgcgttcttgtccaccctggtccattaattaccaaacaagacagttgattaattcagccattgacgagttaattagtcaaaaattaactgttggtttaattggtgattaaacaaataattaatgaagtgtggttgctaaatacttacatgtcgaagaaggtttggagacggctgtcgaagctggtgtcggagatttggtcccagaattccagcagctccgccttgctgatgctgtcgccggagatgttccgccgcctcgccagcgcgtcgaacagctcgccggcgaactccagctccttcatccctgaagccagccagagagagtgattgattagttgatgagaggaagaagacgacgacgatggagaaggtgttcgagatggtaccgatgcactggccgaacttggagcgggggaggaggccgtccttggcgaggtcgtcgaagcgcttctcgacggcgggccagccggcgccgccgtcggcgcggctgatgaacttgaggcccttgagggcgtgggcggcggcggacttggagcggtcgaagcggggaccgccgccgccgccgccgcggcggttgacggaggcgaggcggcggagctcctgcgacacctgcttgatccgcgacgacgcgttccggatcaccgagtggccgaacgacgacgaccgcttctccagcgtccgcgccagcagcgtcacgtccgagtcctcgccgccgccgcccgccggcttcacgctgtgcaccgccaccgagtcgtcgcgcacgtcgagggtgatctccacgtagtcctcctcgtcgtcgtcgttggcgccggcggcggcgngcngcnccnccgccacccccgacggcgcggacagcggcgccgacaccgactccgcgaacctcgcgctcttcctcatcccggacctcttgctcagtggcccgctgtgcggcaccagccgctccctctgcggcggcggcgcctccgccccggcctccacgatgtcctctcctccgccgccggcgccatcggcggcgccagccctggtatggtgcatggcgcaacaacaacaaacacctcaagcgcgctctccaattgaactcccaagaaatgaaaccaagaaacggcagctgctccctccaatggcggtttcgattcgtgtgggtggaggaggaatggaggatggtggggtgggagagggcgtctggcgggtatatataccggaggtgaggtgggtgaggaggggtgtgtggcgtttaccagtcgccatggtcgccatggtcgtcggctcaggccgctcgtcggctcgtggggtaggtgcgtcgcgtgtgtgcgcgtctactgctctgctgctgcgttacactctgcactactcgctccctctttgacgctctggactaatgtttggccactcgttttattaaaaaatttatataaatattaaaaaaaattatgcttaaatcactttagataataataaaataagtaaaaaataaataataattctaaatttaataaaataaatgattaaatagtacaagcaaatattaaaatccatattagggtaggaagggagtagctgctgcgctgcgtttcgttttttttctttttttttttgggtgggaataaaattctgcggtcaagcggcggctgacgcggaaacgaacgacgttaaattaatatatttcttgggctgaatttgggctcgtgttttgttttatctatttacttgccattttttcccttcgctttcgttttttctggactgctctgtttcggaccacagaagagtacgggtagctcaggtttttgtattttgcagcgtcgttgtacagtacagtggtggtatctctggtgtacgtacgtatatacgctttccgtatatacgtttttattgttttttttggaggatgcgttttttttttgttgtcgagcgtttggcggcgcgtgctcctgtgcagtagcattcaggacttttacgtttcggcatagaaaagggaggctccattttgtgccgtttagaaagtgcaagtgtggtttcaacctgatatcctgtcttcattccccgctcgcagtttcttcttaaaaactatttaagaaacaatactcccttgaaatcttatttttcaaattttgttccaattatgatgtagattttattttgatttccgtcactattttcttaaactactgtacaaatgtatctctggtaaaaactttcttatatataaaagtttctttaaaatatcaaataaatttatttcttcaatttgtaataattaaaactcaattaattacgcgctaatgattttttttgttttgcgtgccttgtcttcatattcatcttaatttctatctcaaatactcacttattcccaaatcgacgaaggataatttaaattacatcaatcaaaacaccatacataacattctcttacaatgtatgtatatgatgatcaatttaagaaattttgaattctattatatgattatcaatttgagaaggagctgggagtaccacctaagaatcataattatgacattttggaaataaaattataatcccaataaattttcaaagtaaaggaaccatgttttcttcttctagagccacattgaacgtacaaggacgcgctggtaactctgaaatttcagaagtcgttccgttcaaaaactgtagacatagagacattttttgcatgtagagagagaaatttaattaacttatcatttgtaaggctgtcagataaattgagccaccatcgatcataatcaaacacatactcgtgagagaaaaaaaggatattaagtttcgttaatgtccttaattatacactacgatgttcctcgagcaaaattaatttggaaacggcactgggatatggatgttctcattaccaggtcaatccattcgatcgaggagagtaattgcattcttacctgcattgtacgacttcccgtgtgtgggggcattcactcattcagtactgtccagaggagtatactagtagcagtacaagaatcaccgaacccgcgttttttattctctttgagcacggactaaaaatcttgaggagaacagtacaacgtttcccatcaccactataaaaatccccgtacgtatcgttccataggtgtaggttcatttaaaatcgagtaggtgtaggttcatttaaaatcagtatctataagcttttccttatctttacgtgataaaaaaatactttctctgtttcagaatataaaactttctagcattgcccacatttatatagatgctagaaagtcttacaatcttacaaaggattatatgtgccggttcaataggaaaaaccggcattaatattataggtgtctccatctcaaacataaccactttttctccatgtattatcgtaatattagacgtacatgcatgcatacattatctatcaccattttctcctctaaattcgtgttgttataaatcctctatcatcaaacccccaatcacattacttgcaggtataaggtgattaaattctttgttggctttttcgttagtgatgctttgtgcatgccttatattttaaaataagggagtaaaaaacgaattatttgtttcacacttcaaaaactatattttcttaaaagaaattcttttacttattacttttggatcactttgtaaagctatttatttattaagtataattttcaaaatatataatttctagttataattaaataaataattcgtattaacaatccactcaataatatgttacaaatacattgaaatttcaatcgatctcaggcaaaactgacttgtaatattaacctatacaataaaaacaacggagtatttttttttatatttacgcatacaatctgaaaataaagaatggctcggtttggtaaggggcacctatgatatactataagtacagttttttaattaactggtatctataatatattagaggttctgtttcttttaatgacgtagtgaaaaattagacaaaatgaagttttagtctaaatttctgctatatataaattgcattttgatatggactattcttcctggtacatatttggtaatggcattttttttacaatttttatcattttagttttgtacttagattttatgatattttttgttttactttgtggatcataatgtaatagaatcgttgtttttagtttttccccaaaattttgaattatttccaaactgactcatcttcctgttctttttattttttaagcctactttcatatattttgtggataattgtctgcaaatcaaattgttgagatttcattttatatattctcgattttattaaatctcatatcattttttttgcatgtactctcgtgttaatgtgttttttaatccaaaatttgatatttttaaactatatatatatatatatatatatatatatatatatgtatgtatatgtatgtatatgtatagactcttggagttgtattttggttttattttttttttcgtcgggtgtgggcgggaaagacaagccccgatcaaactttattaatataggaataagtgttaaatattacaacaaacatgattgcgtgttgtgtgtattttgatatttttcatccatatagactccactatttctaaagatttcatcggtcaaaagcttaccagcagagtgtggaaccataccacatagtccatgtacgtctcctgtacgtatcctcaaccaagcacatacatacacgtacgtacaacacatatacgtacgtacgtacaatagtcaat

SEQ ID NO: 8921 - DNA, 39951 bp, Oryza sativa
  unsure (1)..(39951): unsure at all n locations
gcctcaattgtgcaaacgcattggatattccatgggcagaaccaagaaaaatggaggcttccaagttgtattatagggtgctggaggcaatctgcagagcagagtcacagaacaataatgtaaataatttaaccccattgttgtcaaatgaacgttttcatcgatgcttgattgcatgttcagctgagctagtattggcaacacataagacagtcatcatgatgtttcctgctgtcctggagagtactggtttaactgcatttgatttgagcaaaataattgagaactttgtgagacatgaagaaacccttccaagagaattgaaaaggcatttaaattcattagaagaacagctattggaaagcatgtcatgggagaaaggttcatcgttatataattcactggttgttgccaggccatcactttctacagaaataaacagccttggtcttttggctgaaccaatgccatctcttgatggcatagtagcacggcagagtattcaccctgatggcttgccacctactccctcaaaaagatggccttctgctggcccaggtgctttctcaatcattcttaaatttaatgtttttgtaatcaactactctcatttccaaaactactgttcttattgggaaggtacttggtatggatagatttgatcaccttctggtaagctggttgaacgttgctttgaacattatattatcaaatatcaactgattgcacatcttgtcttaggctaggtagcagatgttttatcagtttggttgcacagtgcattgctattacattttctcttatcaatcggattgcaaaatattttctgttacttaccttaacattggttaggtgtagacttttagtcctacttgtatattggtaatcataattgtcatcaccaccatttttgtcaccacaaggtttcatgagttcatagtaactattagtatcatgtccattagttttaggttagtgtaatagtatgtgcaattctgcattgtagcctatatataggtggcagaaaggactgtgatgaaaaggtattgccactaaaaattttaaaagtccctataatgtaacaaaaagtgccatttaccaaggaaacctctggctcctctagacttatgagctgaactgtacagtctagcttagtatggactttggtccttgaacatagtcatgcatctattactcttgaactggggataccacgagctcagttttgcagcagcatgtatcctattttgtttcatatcaactgttgtcggtttgcattgaaagtagaattgacgccttattgtcatgcacaaggaatgcttgaggcagtatggagcatttaagtgtttatttatggactaacaaatttgataaccatatgaaatatgatcacacattatttaaacaggaagttcataaattaaaacttctttaattgcttgttgcattgttcggttattcatttctcaaatggttttttgtagatggcaactgttatcctcaatcaccaaagagattatgcaccgaatctaggaactcattggtagagcgcaattcgcagacaccacccccaaagcaaagccaaacagggttaagtattttgaaagcaaaataccatcctctccaggcaacattcgcaaggtgtgatcacctacttcagtttgtgaagagtttgagcatatactatttttttgctaaccagagattgatgatttctgaagaaattgttttactatctcatatcttttgcagccccactgtcagtaatcctgttagtgggaatgaaaaatgtgctgtagtaggggtccagatcttcttttccaaagtatggtccatcttgtaattaaatttatggtttttcattgtttctatgtttatcgaatatttagttctggcctaaaactttgcagatcttgaagttggctgctattagaataagaaacctatgtgaaaggctacgacatgaagagctgactgtgagcgtctataatatctttaagcagattcttgaccaacagacagctttatttttcaacagacacgttgaccaaatcattctttgctgcctctatggtgttgccaaggtactacatcacatctccttgagttttgattggaactgaacttctgtgttgattgagggatatgcctactttttctggccctaggtcctgtagtttctcataattacgaaatggtatgaaatataaaataagagccagactttatttcaggcattttaatcattgttgtctcaagataaatatatttgtttatctcaataatatttttactgttcactaataaatcaattaattaaactcatgtttctataattaacctgccctctgaaacaatctgaggacacctactaaaaggttatttagttttgtgaaaagtctgttcgaatttatggaagtttgtttgtattacatatattgagcctcttatttttttttcttcctttttatttgtgttgaccatgctttttctgccaggtttctcaattatcattgacgttcaaggagatcgtcaacaattataagagggagccacaatgtaaaccagaagttttcagaagtatctttgttgggagtacaaatcgcaatggtgtatgtatcttttaattccagtatctgccatttttctttcttctgatagttcttcccctagcttcttatttttactttgtttttcttttcttttgaaaattctttgatattaacagggatttggatcacgtcatgttgatatcattgttttttataatcaagtatttgttcccacggtcaaacctttgctggtggctctaatgccttctagtactcgtcctgaagacaagaggaacactaatagtatatcctccattctgttttctcagtttaaacctgctaattctccacttaattcctcttataattgacttatgtctattacctgctttcttaggccaaattcctggatcacccaagtcatctcctttctcaaatttaccagatatgtccccgaagaaagtctcatcttctcataatgtgtatgtctctcctctacgacaaactaaggtgtgcacttctcttctcatttctatactttgatcgttttagtttgtcaattttctctttactcagttatagttaaattcttgagcggactatatttcatgccgatgtgtcttttttggttgggcctgtgcatgatctttttaacgcatgattctctgtatcaattacagatggatgcattgctttcaccaagttcacggagtttctacgcgtgcatcggtgaaagcactcaagcttttcagagcccatccaaggatctggctgctataaatagccgcctaaattagtatgtcaacttcctctgaaatacatagtctctctctctctctcacacacacacacacacacaagaagtgaagctcacaacactcagaattcactctgtttcttgccaaatatgcagccctaccaggagaatcaacacacgaataaacttcgacatggtgagtgactcggtggtggctggtagtctgggccaacccaatggtggttctgcctcttcggatcctgctgctgcatttagccccctctcaaagaagagcaaaacggactcttgatccaaataaatgggtccatccatctgtatagagctcataatcccacagattgtttctttggttcttctgaataagtgggtgaagcaaagtgcttctcgactgtaaatgttgtgctagtgttgtaataggctgtagcagtgtaaaaggcggctgattgtctagaattaactaatggggtgtatcatttcattccccagccgattcattaggagcgaaggctatgtaaaatgctacttctttttcagtgtgtaaataaattctgctaatatcccttcattcagctttggcaattaggcaagtgtttgcacagtgttgttctcagatggatggtaagcaacaaaagaagcccttagggtcacttatacatgtaacgtgatgattgatatcaacctcattgtcaattgttgtacaagtaatgagaaatagtgccacctgcgtatgaccatgcattgtctgtatgaggactggtgagaatgttctgcgcactgaacattattaattttcggtctaaccactaaaaagcatcttctattgccacataaattttggaagggcatccatcgtaatcattctgcaagtatagaactatgtaatagcaattgaggtttcagttctgggagatctcctataacagctatggtttgatccttagaaatcagcaggaaatgtacatcgtctttctcacttcttgtgtggcctatacggaacgactcagtccaagtcttgtagaatgtatcagagaggtgagacgagcattattagcccgtgtcactccatgtcttgtagaatctgactcagtccatgtcttgtagaatgtatcagagatgtgagacgaacattattagcccgtgtcactccatgtctagtagaatctggtctccgatgactccagcggatgatagacgatcattagcccatgggagccactgctcctcaacatgctgcttcaaagcagccaggtcagctcggagattgatgagttcaccatgaattctctccctcccagcaatggcagggacaagaagaggtgattcaaagtccttgggaagctccataccttcaggaagcttcaataccctggccaaagctgctttgaagtccccagataacaacggtacatcatcagtgaccgctcctcccaataaaagatcatctccaatatctgatgcaagtgtagtgagcttatcgcgagctcctaccaactcgtccctagcttcagccagctctgcaagccccgcaagctgtgtgtcatcaactatccagccctcttgattcacgtactcctccaggtactgataaagttcccgcgcatcattcagtggttcacaccctgacactgtgacaacaacaggaggcggtaaaggcaagctgcctggtggcatcagaagttcagcatgaatacgacctgcacctggaccatctggggccactgtcgttgagttgagatcaaaaggcagcaccccatcctggggaagatgaaacgcactagccactgccgatactacccgtgagtcgatgggtggccgcacccaatcatccacttcgacgagaacagttgaacccgcaggtagatctgggactcgttgagcaatgacaaacaaaactggggagcatcagcacttgtaaggtttccctgggcgatagctcgaagtcggggaatgtcctctgccttaatcaagtcgtgagcaccgtgatccagacgatcctcaacaaattccagtagcctgtgaatattggctgactgctcacaaggtactctaataatcatggtaggaagtgtaggtgacatttccgcaactgcacgaacgtcagcaaggccattaatgtggtgaggcgccattggcgcacacaatctgcagatcaaattaaattcagttagctctcataatctaggagaattaaacacactgttactacagaatggcattgtatgcaatcaatgaacatgtaatgcatgtaaactgagcagagtgccacagagttatgccagggctacaatgtcacaatgataaatgattcgttcaaggcactatctaagtagttaaaggcagcaaatcaatagtactcttcaagtaggaatccaaggatggtgagaagtatcaagtacctagcaggccactttctgggaggatcaagtgatagatttcagcacattattcagaggatttggagaaaaatataaaccaaggagccaggaatcctaattcaagagctatcttgaatgtccatcaagcaccaaatgttggggctagtaagcaatgggaaaaaaacaaatagatatggaccagcaactagttactacataactaattagacacaatacaatacatcagagctagctcaacacattttattaacttgcttggtgcacggaaaaacagggatgacgtatatattcatggtgtgcagcctatgaacccattgcagttagtaaattgtgcaatcttgacactaatttctttccaataaaacaaagtggacctagagatatcatgcaggcatactctggtggatccttctagaacatgttccctggtgtgtttaacattattgttgatagtacaaactgtagtaacatcgaccaagagtacataagagttgtattatgcagtcagttcggcaattggctgccaactaaatgggaggaactatgaacaactaataaacatctgaaaatgtttgtacgagatgtgaaggatcaaagcaccaatgtcatcagggttggcaaaaaaaaaatccagaggggagggtcctcgcgcagttcatgaatctcatggccgtgcttgcgccaccatcccctgatcccctggcccctggccggtggcgtccccaccgacgcggcgtcgccagctagccatgagcggatgagccatccacaaatctgaagctatctatcctcaccgcgtgctgcccgcccacccgccaatccgaacccaaacataatgggggaaaattcgaaccaaaccctactcacataccggagaaaaaaaagcctcgatcgagcccgcgcacccaccaaattgaaccgaaacagggtggaatctgacctcagggacgccccggagagggctccggcggcggcggcggcggtccggaggcggagggagcaccgatcgccctcgaatggcaagggcaaggagcagacgagagggggtgggcaactctggcgagcgatgaatggaggcgcgccgtctcccgcccctatttcgtttggatgtggatgcggtggagttttttttttttttaaagctttttgacatctgtttcggcgggcttcgccaaattgatgatgggcgtcttcgtgtgctttctcaaaataaccctcgcgtctctcctttagatatgcattcaaattagaatttggttgaggagttgatggattttgggttctttttgaaactttatgacatcctatttttaaatgccactagagagaatttgtcttgctcttgtgccctttttcagccttgcgcgtgccacatcactgttacaacgtggaatcagtggggagaagataagatttcccctagcccaagaacaagaggaagaagctccccgatgtacttgttgtcagggttatggataccacatacctaatagtagttgactaaatctcggcaggacctaccacataccatgttctatacggaaacaacctacggatataggaagagttccggataaggaaagacaaccagagttctacatggaaacgacaaggactactcggattgtatccatattgttttcctagttctacttagacaaggggacacctataggtataaatacaaggcccccctaggaggagaggggatacggacaatcaacaccaaccataatctacggaacaacagaagccacaacatacaagccaacatacgccaatacaagacgccggatattgacttcagggataggcacggctagtcccctacggtgtctccggatactgttaggagagacgaaagcgctatctctgatcttgccgggcacggattcgaggaggaaaactaccctgttgtcgactacgagtcagaccttcagaccgccatgtcgacaatagttagataggctaccccaaatattgtattggtgtgattatggtgaataagagcaacaatggcttcagccaacaggatgtagggttattacctgacaattcaggggcccgaacctgtataaaaatcctcgtctctgtctcttttacctcagtctcgcgtatatcctagtaccaacgatccctatacgatgcaaataccagaatcgcgacatcaaacgtcgacactcgtgttgtgcaccgccacctccctagcgccgggcatcagatggtgaggccgggaaagcaactgcagtgacatcaaggggcatgacgttgccgtcaatgttgagggagcgtggagaagagcctaggggaggaggacatcaccgctaactagtcgatggcaagaggttggtgatgtccaactcgcctagagttgaagctacccacttagtgctcggagaacaacaacaggagccatgtagcgaggcgccaacgacgagctccgtccctaaatttggagttccctgttgtggtgctcgaaggattgcgctagccatggagcgaggcacccatgtccctagatcgagagctcctctctaggtgctcgaaggatggcggcaacggccaatgaccgaggcaccagcgacaggctctgtccttggaactgagtctccctgttgcggtgcttggaggacgaggatgatggccatggagcgaggcaccaacgacgggctccatccctggatttggagctcctcgttgtggtgcttgaaggactacagctgtgaccgtggagcgaggcatcgtcgatgggccctatctctagatctgaagctcctcgctaggtgcttgaaggatggcggcaacgactaaggaccgaggcaccagcgacgtgtgtgctccatcgatggaactagacctccccattgcggtacttgaaggaggacgacgatggccatggtgcgaggcaccaacaacgaactccatcctatggcatctaccctccatcttaggaccactcctagaatgagaaattcgaataggaaaagaaaaggttggggactgcattaacttgggatatgttcagttaatcaccatttttgtggtgtgaaattatttccccttaatctccttcaaaccgaacaaggcttatggggtaatcatatattttcttcctatatactccctccattccaaattgatctacatatttcaaaggtacatcaagacccagaaaagctaataactctctcatgctatatttactctagcaacaaactcaatacatgcaccatccccactatttcctagccaatagcaaatcaagatattgcatgtgggttataaatgcttgtgtgcatggatgcatgcatcaatgtccatttactccaatacacaaataacaaatagacctaatgaatgaacacaaatatgtaagatcatttagaaataacctcaaaaaaactatatgtagatcaatttggaatggagggagtaattggtacccactacctatcattattgctataaagcagctacaggaataagccacgtcatcgagggaatgcagccgttagatatcatccaagagataattccagccgtgtaatatggttccatcggccgtcaatcccaggcgtgcgctcacttattgcgtggttgggccaagccatggcccatttcttttctcccgttggcccatcattaggcacaaagatgcaaggcgaccactacattgatttctttgttttttcgcaagcggaggaggcgccgtgacaaatgtttcagattctgaaacggaggaaggcacatgaagagatgagaagtattgagaactggtatgccttttattcccccacacaccacgatgctttcttccagtaatggcaaccggaccaccgatccgagtccctggtcatcgactctacgtatgtgggcacatggagaaattcatgtatattattttgctctaatcaggttttggttctggtctgagttatgcagattcgaattggactgcccgccgatgggtgagataactctaaaatcgtacgcacataatatgcttgatagaatgcataactcataattggacgtacggaataagttggacaaaaacatcttcactttttataatagtagagatatatattcgaagttcataaaaacataaaccaattaagtacttgttgacgaaaaaatcgaacacaccggcctgggagatctgcttaactcctgtgcaggtccaaagattggttggatgcgggtatgccagtcagtttgatcctgcaactgacaagatatgcaaataatagacaaaacagccgatggagtagttccagccgatagctgatgccgataccagccgataatgatagggttttgagcaatcggctatacgtccaatgtagattctaacactttagtaaataatgatatataggcaatcgactactgataataaaatataacaataatatagtccagtataaaccaatcggctaacattgatatgatagaataagcactgatctggaggttaaagcatacatcggctaaaggtccgctgccatgaaatccacaagattagattaaacagtaaaacctttgttgtcatcggctaaatccaacttatatgtatatgcaattcttatgagccgatgcaacgtctagataactcaccggctgaaaccccgatgaaacccttattggcaatcaagaagcagactagagattatggttctaagcacgacttagtagatcaaacttaactgatgcagcactaagtatgaaaagaagcataatatctagacaatcaagccgttgattgagttttcagggtggtagatgtctaagctaatctaatctagcaacgcgatttagccgataccggcagaaaccctaaaacaagaagcagccgatagagctaaattgatatgctaagactagattaacatagacatatgataaataggtaggcaaatatatcatctaaaccagagcaatccaagaggtcgaatgtactgatgcagccttgaacgacgccgacataaacgatacaattgcctgggctgacagaacattggacttaccccttagccggagatcgaacaccgatgcagccccacgtcaggtgccaagtcctgccggacgataaaataaagtagaaaaggtaaaaggtggcgatgcgccgaattgtattgatcgtgaagatagtttacaatgatcccgggtgtacatatttatacccatggtagatactagtccttgtaggataagaaagaaactttcctaaagataaaaggaaaacataaagtctttataggacactgaacacacttttctaaaaataaaaaggaaactaacaaactattcataattaatagatacaactgccttcttcggacttgatccgtacatggcaatcatcatgaagcacgtcaactcaatcagacaatgattccaatatcaccttgccggaatcggctacatcggcttaccttgttcgattcggtaactgccgatgcacactatagccgatgcggttctgaagccgattcatactctgtttctgttatcgatttcctcccaaatccgcttcagctttaactccaaatccaatgcaaatttaccaaatttggtcgttaacagtactgtgatgtgaaaaaatattaaagatcgtagaaaaattaatccctccgagttaataatacttgtcgttttggacaagggcacggtcttcaaaatgtaactttgacaactattttttattacaaaatatatataaatttcaacaaatatatgattttattgaagtactttttaagactaatctacacatgtggttttcatatttttaagataaatattttagaaattatttgtagtcaaagattttaaagtttgactttatccttatccaaaacgactaatattatcagcccggggggactaatacactttatagttatattttctatgaagataatatgttttcttacacacagggttattttcctattgataaaaattgaatagccagctctttatatttaaaaacatagcattttattctttcttttatattattttaaaatttgtatttattattgaatatatagtcatatccccgtatgcatgcatgtttctgaaaatacaacgtatcgtgtatccgtgtaaaatatcagctgcgacatttcgaatatttaatcgcatatatagacgttgaatgcaacatggcatatacagcaaatttctcattgataggaatttgtcgaatacatcattagatataaagcaggggggaaaaataacaaaagcaattgcgatgcaaacacgaggcaggagacccaacctcgcctgggctggtcctatataaccttccttgttgggcccggcccatcgaatagtagcagacaggcgggcctctcttccagctcacgcagcattcgatcgatccgttttctgccactttccctcgctcccatggccgctgcgccgtcgccgccgccgccgccggcctttcttccgccccacccccgtatcgtaaactacatctccactcgccagggggcattcgagctagcagctcaggcggcggcacatccggggacttccgtgatcgtcgtggtgaccggatccaatccactccaggacgcacgcaaactgtttgatggattggttgcccggcgagacgcactgggatggtgtgttctcgggctcgacaagttttcacagctgttggagagatacgacgtgctctgcgacgacaggaacaagttgagggagctggtgggcagcatctacgccgacatgctcatcggcggctcgtcggctccggaggtggcgctggagagccacgacgccgccgacgacgtacaaggcagggtgcgtcggctactgagcatcgcggatggggcggacgcggcaacacttcgcctgacgctgctcgacgacgccgacgaggctcgccgtctctgccgcgctgggttcctccaagggcgccgcgacctcgccgccctcaagcagctagtcgaggacttctggatcccatccatcaaccgccagcttgaaggtccagcgttcgtcgacggcgtccacctgccggaggagctcgtggacgaccttctcaaccagcgtcggcttcacccaccttcccaggaggaggcagaagattaatactccgttttttaatagatgacgccgttgactttttctcacacntttaatcattcgtcttatttaaaaattttatgcaaatatataagatataaatcacacttaaagtactatgagtgataaaacaactcataacaaaataaattatgattacgtaaattttttgaataagacgaatggtcaaacatgtgagaaaaagtcaacggcgtcatctattaaaaaaatggaggtagtacatctcattgcccattgccattgatctactatatacttgcacttttactgcactcatgtgtcatttaattacctgatcacatcatagattgagagaccaaaacatcttacaatttatacagctgtcgttgcaattttaatttctactgtagcagtcctagcactgcaactcgcaccacgtgcaacttgtttgtgctacattaggaatatgataatctaacacggcgaggaatcgcattgctaacatatttggagatagtgtgttcatatcctttcgagcatttcgcatccaagtcaccaccaaaagtgattcggcaaacagatctgtcaagccgatgatcaagaatcaggagttctagtgctggtgagttctccacgaaatacagagcaagctcaaggcttgaacggcctgctgaaaatccagtcattttgaccaacttgaggtttttatgtggacaatgtttctccagacttctcaactctgcttccttttccatgtaacaaaatggctcctctatatcttccagctacataaagtttcaacaaagatgaattgcttaggaaaattatgagtctcaaaccagacaccaaagtttaaaagtatgtgctcataaaccaagttggacttgaaatttgaacattagcacattcagaatacacaaatggcctaaaaaagctacagcagtccacaatttcatactgctatgaactgaaaagttgtgtagcacggctgtggttttggtatcacattgcaacaattgtacattgttcgaattcttaatttcttactccttcccatttcaaaatgtaagaatttccaggattcagattatgtaccacaatataccacccattccaaaatacaagagtttccaggattcaaattctgtaccacaatataagcattgctgtgctgattcccatggttccaatgattccaaagtcaattggatgcttagaaagggaatctaagcaatttaaaattcaaaaattgaccactgaggtgactaaaaggaatcttttgacttaaccttactatttgctaataaacaacctaagaaatgcttatattttggaacggaaggagtattactcaattaatcagacatgacctatccactgtttcagcttctactataagtattacatgaagatcacacagggctcgaaataatgacaccacaaacgtttctgtacacacaaccacaagggttaaggagaataaatcccactattcccccaaacgattgttggtccacttattcccttaaacatttgggaaggaaaagatgttggagaggaagccatatgattcatgccccatattcgtgtccaatttcttgtgactctttcatagttaacatgaagggataaaaggccttgcaagctactgagcgtctcaggctctgagcctcaggctcccatggttcacttccaatttggttcttgcttcctgaagcagctctggaatcttttcttgttcctggaaaccatgctgccggtcgatcactcttgactagttctgtaacaaccggcggtgattatagggttggaggcagccagattcgttatacaacacatcacagcaggtctggggtttagggtttagcaatgggtgaaggagcatggtgataacggtgagaggctgtggccatggcagctaaggtggagagaatatgatgtgttaggatctgtcatctgggggcaaatttatgtcgatttcaactgaaggggttggcagaggtgacaagaaaggaaacatgataaaaaattttatggcagaaggacaaaggtgaacataagattttttttttttttttggggggggggggggttggggggcataagtggatcaacataccaacatcatatagcttaacattagatattatctagacaaatgtaagttatagagtgatgttctaaaaaatgcctataatatggcatatacaacgaagagtgtcaacactggaatttacacttaatgtgcattccactgatggcatcatttacttttcaaaaattttgtttaaaactgcaatataacagaacagttcaacagttatcaagttaagggcctcgaggctgcttatcccatttcttggagaaccagttatttaattttagtactgtctaaagttcatgctgctaaatgtgctagagagaagtaacttacatgaaaaacgagagcttctaggactggagcagcatcaacaaacttagcaagaaatagaagatcatatttcgtcgatatatcctgcaattttaactccaattgcttcaggcaatggaatctattgcttggaggtctcctggatataatcatctgcataggaaatgtagtcaagataaagaacgtaaagtatctcaaataagtgatattgttttcactaacctcagtacagccactcaggaacaatgactcgaggtctggcatgagtggtgcaagatcagtaaaagcatactcaataacatctgatgacagaactaactcaatgtgtgcccccttcaacactaatgcttcactcagtactatttttaggtgacagatattgtaagtattaatcgcaacaagattttgagcatggatctccaaaatcttcagccacaagcagggaacgatatcaatgtagacaagcttagctagtacatcagtgatcttcaagtattccagcattggacattgccttagcttcaactgttgtagagcaggggtataactcaacaagctctctaaatcttctgtggttatacatacaagggccaaatcaagagtcttcaagcttcttaggccactaaaagttggtaaaggcctcaaattcataaagcaaagcttaagatgctctatagaggttggttctggagcagcaacattagaggatggaaagctgtatttgacatcacgaggatgagcataccatcgtggacttaggtcaatagtcagttcatttgcaccagatcggactgcaaagtaaatccaacggtcaatatagtgtgcgtacttgtgattgttgaggttgcgcttcaaggtgaatgagttaatccctgttccagcgtggtgccttatgatggtgttaacacacctgacaaatttagccctcctcccttgtttgtgcacccgtttattcaaacccaacgccttcgaggtgaactctaaattaggatagagcctccaagattgtagccacttttgcgacaccatgctgacacgcgcagcattagtcagcgaaagcaaccggattatcaagaacaccacatcctatacatcaagaagaagtcagttgaatatatatatatatatatatatatacagaactccatactcacattcataaaaagaaaaacagcacagtcagtataagtggacctatataacgtacatagaatggaaattgacactagattctactagtatttacctcaggaatgtcatcaaactgtaatatggctcttttgttcttggggaccagtttcccatgacatggattcattcgcttagccattagaccaaaaaaacactgatctgcagtcaactggaagttaataaactgtaaattgtaataggccattattagcgttggatgggtgctactgatgtcagaacagaaagaaaacaagagagagaaaagatgggagctttaaacatctactcaccacagtattgcagcagcagcacgcaatgctgacgaaatttgtggatttgagtctcccaagtattcgatcgatcccctctagatacaaacagaagcagcgcaagcagtggcgaagccaggataaaaattcacctatggcgaacttactacggactaagtactagtctagtactctagtttgtataagaaaacatacatatataataaaataatggactgaatttcattatcatctcttgcttctatattttcatttccatctcctcctgatatattagcagtgctactgctaaaaaatctctttatactgacaactaacaaacataaaaatttaaaataagagatacgttaaagtgaataaataacagtaccaacaagggtagattaaattctcaccttttatttttttcccaatctgggtagcttctgaaattgggcgcagtcggcgtcggcgattattagatggttcttcctcttccatggcgcaatctgggtaactacagatattacgagctagtttaacattactactcgtaacaactgattgtctgattcaacaggatatagttgctaatgtgcgagagatggaaccaactggtgtctcggagtgattactgtggcggcgtccagcgtggcaacggcgtccggcggtgtcctggacctggagtcggagatcgggcggcacgcggcaggagacgagtcaactgtcgacgagaggaggcgaacagccgatgcgatgaggcgatcagccggtgggcaggtatggcggccgccatacctcgccatactggtggcttcgctactgagcgcaagatccccaaacaaccgggccgatcgatgccaaagctaggagtggccttggttttttttcccttcttgtataaataagcaatccaaatcaataccgaatcggaaccagagaggacggaggggtgaaaaaaaggcgataactttgagacggactcttaccacgaaactgatttcaccgcatgggcatgacgagaaggagttggcgccagatgttctacgtggggggtggagcggagtgatgatacagagggaggcgaaatgatatgcgacgccggccgcggccggaaggcgagtacacggcggcgccggaacggacgagagagaggaagggggggaggggtttgtagatttgggttaacgagagagagagggggtccgtcttttttttttgccgaatccttttttctgttttttttttgcttccggttttattttctttttatttcgttgttttattttggtccgtctttttttttggtgtttttatccggtttctttttatttcgttgttttattttggtccgtctttttttttgccggtttgttttttctttgctgtttttatccggtttctttttttccgttgttttttttgcccgattcgattttttttgctaggttcctttttcgcttttttcatccggtcttttatctcatccgatctgttgtacgttgccgtcgtcggaccaaaccctatagtggccgccacttcgatccgtctccatatgcgttttctcctccaattgatcgtttccccatgcgttttctccttcaattaattgcgaaaatcgattctccacctctctcatcatttttctcacatttcccctctcaattcggcttacagttcgccaattatgcccgaccggcctttttatcccattttgtgaattctttccgatttcgggaaaacagaaagaggagatcgagtggatcaaaattcaaaagaaaaggaaggaaataatgggttgtaggcccaaaaaaggaataattttcatttactttttcaattataatgaatagcgatcctaatgtttcttcattgctagcggttgtactactcaaaaaacgtttttgccccgatgcaatgcacgagtatttttttctagtatatctatatatctatatatctgtatacctatatgcctaataaaaaaatacgcaaggtttccggttttttttccgtctcttttttcgccttttttttatgtcccattagttcttttccatgtgaaacagtttttttcaggctcactttttttatccggcttttttcatcgtcatttttttctgctctcaatccgatcctatcgtcttttcttattgctctttagtccgatccgcacatgggcaaagcccctccagccgccgccacgatgttcattcatccgtacgtttcctcattcaatttactgcgaaaatcgattttctaaccttgttatattcctctttccatttggttttaattcgttggatttaatcccgaccgattgattttgaaaaaaaccttgttatattcctcatgatttcctctttccatttggttttaattcattggatttaataccgaccggttgattttgaaaaaaacagaaaaaggagatcgagtagatcaaaagccctcaaccaatttcggggagatcgagaaagattcagctggatttgctcctcggcgtcatgcgtggcatcttctagaggttgaagatgcagtcggttatgcaagctagatttgtttatgggccggaccaaggagagacaaaccgagcgaagggatgtatcgaactgggatagggctgaaaaataaggaagtttttctcaggcttccttttttttatccggttttcttcattgccgttttttctgctctcaatccgatccgatcgccttttcttattgctctcagtccgatccgctccacacgggcaaagcctctccagccgccgccacgatgttgattcgtctgtacgtttcctctttcaattgattgcgaaaatctattttctaaccttgttatattcctcatgatttcctctttccattcatttttaattcgttgtattcaatcccgaccggttgattttgaaaaaaatagaaaaaggagatcgaatagatcaaaagccctcaaccaattttaggagatcgagaaagattcagctggatttgatgccgaggatcggctccggcatcattgtaggatcgaggattcagctggatttgatgccgaggatcggctccagcatcattgtaggatcaaggaggccgactagaggggggtgaataggcggttttaaaacttaatggcacttcaacaaaactaacctaagttgctaggcaaggtgaggtacaaggttaactaagcaactaagttaagttttgcaaacctaagtgatatgggctcaaatatgtctctatgaatgtaaatttgctcaaatgtaaatgcaacaaataaatgagacaagagacaaggaatttttcaccgaggttcagaaactcgccggtttcctaatccccgttgaggcgagtccaactccaccgctcaaccatgaagccaccgcacgcccccttcatcaaggggtgggcaaggtgggagccagcccacggagaggactacccaagcctcgatcactagggtagttattccttcacttcgaaggtggtgaactccaaatcactcacaaacggcgtcgggcctcctccacaatctcctcggagagatcaccgggaaacacctccacaagccatctaggaggtggcaacctccaagagtaacaagtctaggatgcttgccgaggatgatcaagtaccacactagctataacaatgaagcaatgcacttggattggcttaactcactctctaacacctcactagataaactaagtgcccaagggtgtgagaacactttcaagggttcaagataatgcaatggagtgccaaaaccttacccttgctgctagagagtgggtatatatacccccaaccaccaaaactagccattgggattgaaatccccaactctttgctctgccggtcagaccactatagtgtggctggtcagatcggactactttgtaacggctaggcaatcattgagcccactcaacctggccggtctgaccgcagtgtagtggccggtcagaccgtccacggctcgaccagaccaccaggggctcggtctgactggttgcagctctagcggctttggatcgccaagacgagacctccttcaaaattaggatgagcggtcagaccgccatgggatgggaggtcagaccggacaacatacttctgtcagaccgcaggtcacttttcagctcaaccggctgttagtaaaacggcgatatctcttgactcgggtctcggaatttgacgttcttagactctatggaaatcttattcaaagggctatccaacccatgaacaattcatccaagaaacacaacttaattcagggagaaatggctcatctccaaaggatatccaccggacatacccacaagatgtcactcactcctattggacatacccacttctctctttgtttgggacatgagaaaactcatcatacttagctagacaagaccaccaaatgcacctacatgcatatgaactaatatggcacaagatcatcgacgtgctcgcttcatagacccctcttgataatacggcgcctatctagcaaatccggtctacaccaaacaccaagaccggggaaagactacgaaaacattcttatttcaattatacctttatcttgtgccatccaacttggggtcaatgcttgagccaagatcaacactcatgaccattcgcttgaaccatgtttatgccgaggtcttgaccatcctttgttaaggctttcttctcatcacaatcttgacttcattcttgtcgacatggcgatgtccttggcttggtgaccatcaacccatggtgtcatccattagcctcatcacaattagacctattcctttgcacatctcaaaggggaacattagtaccaacaaatcggttgtcatcctccacttggtgactaaccggttgcatatgaaagatatggatatgtttgttgagtattcattaacatcgcaaagtgtcatatactcgtatgcaagctcaaatgcaaagatccaatataaataataggtgaacaacgtggatctaaaacatgcacaataaatgtataggatttgctccccctaaatatatgcatacaaataaatatacaagagagacaagtgtatgcataagttatgaagaactaatagggtttatcctatacacatggagaaggcatgtagcaatgataaagataaacaaaaaacacataccttcatgatctccatgttctcaatgtaaaggagactaaataagataagactcaagtaaacattagtctcacacttatataacaataacatggaaatcatatatatgaacctatcaaaaaggatgagataagaagtgatacatatcgctttatctccacgaatttcatccttgtcatgattaaggtccatcaccaaagaatgcatatctaccacatcttattatcgggaaataaccttgttgaaaacttatgtaaaagagagattaatcccataaatatcggtttatcatctatcaccaaagcaacaattacacaaattatttaattcaagatctttcaatcttttctctcttttgtgatagataataatccgatataaacaatatggagagatgagatgaaagatgatttcaaatcaagatagaaatcttaaataaacaaaatatagagtaacctccccctcaagatgtgcatacatatggatataaaggaacacatatgcacataatcaatcaagatcaatgagggagctcacactatattttggatccacaggagagacaaagttagaatatgtgaagtttaatacatacctctcatcatttttactttcatatccaaatgagattagtcaaacaaaagctcataaaaatgttagtatcatattgtcggtgacatggggccgggggtatcgtgactagaggcttgggtagccgcggtcacccacgtggcctgaccccctcgggggggtcgggcccgagggtgacgtggccacccctccctctgtctccccgaggggtcgggccgctcccgtttcggccccgagggctggggcgccccgcccccctgtggtcttggcgccacgtgtgtgcgttaggtgagccgaccgggctcacctaaccgcatttatagcaggttggacgagcgcgccacgccgcatttaatgcggcacagcgcacgcttatccggtccgtgaccggtcgcggtgtgtgaccggtcacagaccggtcagatcgcgggttaggtggcaacaggcggcctgtcacacgcctcgcctcgtcccatcggaatgatgagagcttcctggctctcgtccctagccggagccggcgtgctaactcctggagttggtatgtcagtcccggtcagatccattccaggcttcagcgcaagtatggcaaggaagtcactggccattaaatgaaggttgaagtgggcgtccccgggaaaagcgggcgagcggggcaggaggcgtgtgctctgcttgtcagatgtcacttccggctgtagactagccctcattgtaaaaagcatgtatccctccttaggcagcaggaggccaatgtggtgaccccggaccagataaaaaggaggcccaggtctagagaaaggggggggggaaagaagagttgggacgctagcgattgggttctagagcctgaactctctctcgctctcgggcgctctgtattccttcactcacagatccatcagaacacaggagtagggtgttacgcttctcagcggcccgaacctgtctacgtcgcccgtgtcttgtgcatttcctctctcgctgacgttcctcagatcgagggcgaagaacctcacttagcgcccccggccgaaccggcaaaggggggcctgcgcggtctcccggtgaggagccccacgctccgtcacatataattagatttgtcattaatcaccaaaaccaaattaaggcacttgaacttacaatcatgcgtggcatcttccggaggttgaagatgcagtcggttatgcgagctagatatgtttatgtgctggaccaaggagagataagccgagcggccaaaaaaaccaacgaaggactttcattaacttcttcgattataatgtatagtgatcccaatgttttaatttattgctcggtttctaatagttgttgtatcactgaaaaaacacctttacccattgcaacgcacgggcatttttacgcaaggcatccgaatttattttcatccgtctaaatttttttccactatttcttttttattttcttttttcgccctttttctctttttttcgccttttttttctcgggtttattcttgtccgctttctttccatgggctggcacagctgctgggcctgagcggacacgggattagcggcccaagaggtaggagaggaagtgtggcggctgctgggcccgagcgaacagatggatgacggctcaagagagaggagaggaagcgggacggctcgggggtgaagaaggaagaatgggctagatttgatcccagatttaggccctgtttgtttcagcttataattattataatctagattattaagccagattattataagctgaattataataagctgacatagaataagctgtgagttatttgtttgtctggattattggaggcatggattattgggtttgaaaggataaagtctataatgctctcagctatctgttcggttgatggcataggtgggtaatttttctcaagtatgtagggatagtgggtctttagccactcaataatctgaaaaaagctcctctatagcagcttattagattataataatctggcttatagattataataatatgctataataatctacttgtttgtttcagcttactcctaataagctagattataataatcctaagctgaatcaaatagggccttagaagagggtttttaagttagttttaattttaaattaattattaaaattagcaattgagctttaaaaaattaaaaaaattatagagaatgtggttaatcatgaaaattttaataaaaattaaattcaagtacataaggcttgtaggtattccctccgttttttaatagatgacgccgttgactttttctcatacgttttaccattcgtcttattcaaaaattttattcaaatgtataagatataaatcacacttaaagtactatgagtgataaaacaactcataacaaaataaattataattacataaattttttgaataagacggatgatcaaacatatcagaaaaagtcaacggcgtcatctattaaaaaacggaggtagtattattttggtccgtcgttttatctattgtcgtcatttttccttttttacgttgaggtattttttttatcggtgtcagtcttctcattatgcgcgagaaatccccttccggacgcgcgagtcccccccccggccccctctcttggcactctcttcgattgtcctctttttatttaaaaaaaaataaataaacaatctaaattcataatcacaaaaagataaaagatctaatctgactatatatatatacataggtttccggtagtatttttagttcgcttccgcttgcgttaaaatattttccatgtgcgtcgaaaaaaaattatgtatatcgttgctcagaaatccatgcacatgttatcgcatgggtcatttggggatgactagggatcggtcgcccgatccaaatctttaaaaatcggcatgacgtcaacgccgatttacgtgtaaaacaaattcaaactgatttttctcttaaattatttatccaaatcatgatccgattgcaccattaaattcgttgcaattaaatcttctaaataagaccacacatggatatattctgatgaaatattttttagcttattattgattttttttaatgttgcacgatgttccaccaggtatatcggaattgtttcaataagtagatcgaaaatgtttcactcgtttaaatcgggtgttgtttcaccttatataaaaacaatgtttcagcaaatagcgaaagaatgttttagttcactgcaacatttgatccatacatagtgaaacattgtgagtatactaaacgaaacattttttaatggaacaaaaaaataaaacgaattcccttaataaagggtttccaaaatatgtgggttttttgttgcaatagagtatctcagatcactgtaactttagatctataaatagtgaaacatcatgagtacactaggtgaaacatttttggttgaacaaaaaataaaacgaattcccttaatagcgggtttccaaaatacgtgggtttttatgttgtaacagcgcgttccataatatcaaaatccaatgcaacatttgatccgtacatagtaaaacattatgagtagactagctgaaacattgtaaaactactggttgaaacatcaaaagagaccatatgcaacattaaaaaaaatcaataaaaaactaaaatattttttttatcaaaatataatcatgtgtggtcttgttgtaaagatttaattgtaacgaatttagtgatgcaatcagatcgtacattagctaaatagtttatgagaaaaaatcttttgaagaaatgagagatgaaagcacgtagggaaagattctttgcatgcaaatggcagaccatgcagcgtctgatttttcttccctcccatcggacgcccgacaactagcattctccgggtcattaccgcagaaagattgagaaattaacccaatcctaccctattgtactattgtactgcttccttgccagcttgaactgaatcgaaactataattccacgagcgtaatttctactccctccgtcccaaaaagactcaattcctaagtttccgtatccaacgtttaattatccgttttatatgaaatttttttataattagtatttttatcgttgttaaatgataaaacatgaataatactttatacgtgatttatctttttaattttttttataatttttttaaataagatgaacggttaaaggtcgtaactatcgatctgagacacgtccccatgatcgtccatccgtgcgctcgtgcgtacgagattggaagtgcttttgtttttttattatctataccttttttttataagaattacacagtacaacgcagacattgacaacatacgtgcactcacccctataaatgcacgcacgcaaaccgtacccctagcatcttcgaagactgggccggcaagtccttgagagacaacgcacgcacactcacccctatgaacgcacgcacgcaaacactacccctagcatcttcgaaaagactgggccggcaaatccttgagagtttgacgaagtcatcataggcacctcgctatcgaggggtacgtcgcccaccactgaaagcacaacgccgttaaatcctggaaaattcgctcccattgggagtcgaacccaggacctcaagtgctaataaggctcttgtaaccactaggctacatgccatttcgcttttattatctatatctaataaaaaatacctaagactttcggtttaatttcggtaaatctgtttttttttgttttttttccgattagtttttctcttacgtggaagttttttttttgggctttcggtttttttttctgactgaaaaaatacccgtgcgttgcaacgggtaaaaatatttttggatcgttatatattttactctttggttttggaccaaaagctcatttcattccttgtcaagtggagttgtatgtcctgctcgcatagctgactgtcctcttcaatcttcaaagacaatgttgtgtccgtacatgccaaaaccgatacccgtcaaatccggtccaatcttttacgatctttcaaaattggttgagggtttttgatacacttttttttataacaggcattcataatacccggcttttaaacaaagccaaagataacagaggtcttacacaacagaacgagaaaaaaaatccgacttaaaagaacaagttaacactggagcataggatcactgcagaggcccatcaatcagataaaaaacacacccacgaaacaccctaaaacaagacacctaacatgctaaaccaaaacccaaccccttagccaagatccagatcatccggcaacctccctagcgggcgtagttgtttttgatacacttgatctcctctatccgtttttattaaaatcgaagtgataaaactcgggataaaaacggtgattttttaaatagagattaaattcagtggattagagcagagttaaaagggaaaatcgtagaaaaaatgatgaggggtagcggggaattgatttttggcaatcaattggaggagggaacgcatgggaaggcagatcgacctagtgtttagccgggcgataaaaaaacatggtacataaaaaaacaaatccttaccgcgtgcgagaaaatacaactaaaaaacagcagcaaacatatgaaaaaacccggtaaaaagacctaaaaaaagtaaaaaacagcatagggtaaaaagcgaaaaaaaggtgaagagaaaaaaccagatggaaaaaaaagcgaaaaaaaaacaaacggaaaaaactgtgaaaaaaaagaaaaagagtgaaaaggacggaaagaaagaaaaaaaatatacggataaaaaaagaaaaaggaatcggacagaaagaaggaaaagaaacgggcggagaaaaaaaaaggaaaacggactggaaaaaaggaaaaaagggtgaaaaataaaaaaagacggacgaaattttttacggaaatagatccaatccccagcatcgtcacgacatagatatgcctcgccgtgtatttctactctaattgattgaaaaaagcaattccctgttcatccttcatttattgctcagcttctaatgctattcccaatccaataactaggatggtgtctatagcattaaataagctgccaactaaaatgaaaaatgatgtggtaagtgaataaatgaggaaagagaagaaaccatatcttgcatgagacatagtttctacacaatatcgaagacatcacatgagataagtagtattaaatttaagtattgagtagtggtgtatgcattggaagagtagcatctttagtactattttctcgatgacgtgaagtttatagaaactatgtctagtgtcttgggctgggaatggcctaatagctgttttatcaatgagaaaatatttttacccgttgcaacgtacgtgtattttttctagtttcataaaaagtacagaaactacataaaactaaggcaataattataaaactgcatatttagtggaaactaaaaaaactatatatttaattaaagcatattgtagagtttaaatctctatcaatattattattagggagaattggtcattcgactctattctgaagtctaattaacaatctgaccctacgttttcaaatttgcttattagatcctgtttttcaaaattggagttgccattagaccctgtttctattataccattctggtttcatttaagaaaagaaaaaaaatgtgttctaatagaccaaaatacccctgattacacacattaaccctatccccaaatttatcacttcccattccttttcctctccctctcccctctctccctctctctccagaggagctctcctcgccgtgcagaagcaggcacgcgacggaggaacagtggcggcggggcccgggtggcggagcttggactgcggtggtgttgatgtaaaaaacacgaggccggagagatctgcttaactctagtgcaggtccaaaaatcttgccttttaggttcgtgagcgtgccaattgatttgatcctgcaatcaacaagaaataaagacaaagaaatcgtggttaaatccataaatgatagccgatcggctagttgacgatgacatattatttatctctgagccgatgtcatatgtgaatcgatcggcaaccatgaataaataagaaaagactaaatctactcgatcggctgtagatattaacaatatataatccttatgtcgatataaacttaaatcaagtaattgggatagatcggtcgtcataccgagacagtataaatcacttagatcgaagtatatactaacaatgagattatagatgttcatagcatagccgatccaatagatctagcatgtatcggctaataatccgatatcactctatactaagatattaaaacaagtaaaatatatcaaacaaaagcctaatatactttattgtaataagatcttaatataaagggaagatctagcatatctgaaagtgtaaattaggcctagaggggggagggtgaataggctaattcaaaaattcaattaaaagcggaagcactaattttcggatatttctgaaatttttggatatatccgaaaattttcggagtcagcacaaacagcaaagtaaatcctagatctagttgcctacaacaagaatatgctagcacaaacagcaactagacctgtagcggctcaaacaagcaaagctagtggagagggaggaagtaaagtcaccaaagatgaagctcacgaggttgttcccgaagttcgaatccttgaggggattctactctccgttgaggagctcactaagagtcgggtcttagctaaccctttcctcaagaggttgcactaagcactcctccttccactaagggtatctcttcccttttggaggtgagatccgaccttcacaaacttctcccggccaaccataagtagatcggtggctcgggagcgacacctagccgcctaggagtcctcaacctccaagagtaacaaatgaagcaaagaactcccggagatgatgaaagtgctcacaaatcttcacgaagtcaacaacaagcactcccacaaactcgaatccacaactctcacacacacaccaaatccaaatcgaacacgggtgagagggaaaacaagaaaacaaggctcaaaagtgctagagaaagagcaagccaagggcacaaatgattggaatggaaccagcagccctcacaagtgaggggagggggctatttatagccacagcccagattctgtccgttatgcacaataattcagattttcggatattccgaaagattttcggacatgtccgaaaattccagctcagcaccaacaacaaagttaacgaaggatttttcggacattccgaaaacttttcggacaagtccgaaaatttctagtaccaacaacatcgttctggatgttctcggaaaagtccaaaaataactttcggacaagtccaaaaatatacagaagcgaaattgactctactgatgattttcggaaaatccaaaaatcagattcggacaagtccgaaaatatacaaaaccacttttgctttcgcagtctttttcggaaagtccgaaaatcactttcggacatatccgaaaatttccagaagcgaaaatctggttctgtgtgttttcggaaagtccgaaaatgagtttcggaaaactccgaaaaaatccagaacacaccaaactgaggagaaacactttttaaaaatagattttgagcactttgatcactcctcgtatgtcaatgcatcatccctcttaatagtgcggctttcctattaactcaaggaaacgaaaacgtacaaaataccatttgctcatttgccgcattacatcacatcaacgtattcggcgggatatgtattacgctaactcattgaggacaaaacaaccttcacatttgcttaaataaaaatgttagtcctctctaatcgcattgtaattaatcaccaaaatcattaggggcctagatgcactttcaatatcaatcaaatacatgaaatataaagctaaatcaggtaagatcggttgaaaccccgatactaccctaatcggcaaccaaaagcaggctagagattgagattctaagacaacttataagatcaaactcaactgatgcagctataagtatgaaaagaaggacaatatctagacaatcaagccgttggatatttcatagagcggtagatatcctatataatctaagtcaacaatagtatttaacctgatcggctgccttttagcaacagatgttagccgatttgagggttagataacaatattgcctgagattatatagaatatctgataactcaacgaactacataaacaagattagagtatcataaagatggaagcactaatcccgaaaacgcaagccgccataacaagttttacctctagttgaagatcgaaaccgatgcagctcaatccgaaagcaagaactcgtcgaaacaaaaccaaagtaaaagggtggcgatgcgtcgagattgtattgaacgtgtgttgttgtattacatggggctcggggtctatttatacctgagattacaaaatatgtccgtgtcggacacgactcttatttctaacaaacttttaagataccataagtctttgcggcagacttttgcccaaacatatctttaaggaaattacatgaaatatcataattaatagatacaattgccttctcaggactctatccgtgcatggcaatccatatgaagcacattaactcaacccgacaacatgcattacgtcatattgtcggtatcggctcaatcggccaacctagtccgactcgaactctgctgatcctgatcatagccgattcggactttagccgattctcgctatgtttccgtaacgatctccatcttgaattccgcttcgattctatcttcatctccgatacttggattaccaaatttggttgttaacaggcgggcgaatcagacgaggaggggcggcagaggcccgacgatgacaaggacgagcagtggtggcgaggcccaggcagcgaagctctggctacggtggtggatccggcagtgcttaggcatctgggctacggatccgacattgtcaaggtgtgccggttgcggatccggtggcaacgggacaacgacagtggcacggcggtagcagctcaggctgtaattttgcgccggcggcgccgaggtgtataggcggtggatctggtagcggcgggttggcggcggcagggccagggcagcagagttgcgttggcagtggatgtagaggtgactgggcatgcgggctgcaaatccggcggtgctgaggtgtacgggtggcgggtcagtgatggtggcacaacattggcggaaatcagcggtctgcgacgatgcatgacgtggcgaggatgatggagtctaaaattttattgaagtttattcatatttttatcaaatctatgttaaatttgtcaaacatctatcaaattgaagtccattttgtcaaactgaagtcaaatttgaaaaatttaatataacaaatataggtcaaatttgaccaaagtctgagtcaaacttgtcacaaatcggtgaaacttacactaagtgcacaaatcattctcattattgccaccatacaaaactatgctaaactaactaaatgctttggtaaaatagggtcaaaagagcaagggcagaagagaaattttatgctccttttaagaccgttacatgcctttgatagaatagggtcctaccgtatcttcagttttgaaatgaagggtcaaatgagcaaacttgatataagatggttaaattggtagttagctttcaaaagagggtcagatatgtaattgccccttattattatgttggaactattaggcgttgtagttttgtacttaaattgatgcaaaacttgtagttattaaatttgctaatcaatctttatttttgggatattatattttaaatctctagttctatgaaaatttccatgctaaatttgtagttttgtaatacaagattataaatatgaagttttacgataatttggttgtagttttctgaaatttacttgaaaatatatcattactatttacctatttaaattagtgtacagtatggtatgaatccaattttcatattattgtagtggtaccatttcagttatacgaataatggtagtattctttaaaactgtcaaatttataatgatatgatctaactaaccctttaaggtatatcattttagttcatatattttttttaacagggtaactataatttatagctactccctccgggctgataatacatgtcgttttggacaaggctgaagtcaaactttagaatctttgattatgaatcatttttaaaatatttgtctttcaaatatggtgactacatgtatagattagtcttaaaagtactttaataagatcatatatttgctaacaattttatacatattataatgaaacataatggtcaaaattgttttttttggagaccgtgtccttatccaaaacgacaagtattatcaaccggaaggagtataagcgatgtcactttttatattataccagtaaatattttcttttagcccctgtcctttttcttcctcttccttctcttttttcctctatgaccaaattgcaatgtattctaccaatcatatccggaggagcccagaccatctattcccttccggtgtaaatctgtaattgccgcggcggtgaccagtagcaggatgcgcatttcggttggccatgatggcagggttaattagacacatgccattataaattcgaaggtttggaaaaatgccattactattcgataaattgtaaaattgccattacaaatcgcataaaactagaaacatgccacgttctacgcctgatccgcgattgtactcggttttgtgcataccgtatttatgtatggaccataatgcccttatgtatgactatgtagggaccgagtggaatcagtttgaccgcggtgcatggcgcattcccagtgaaccataaacctagccctaggcttctccggcggcggcgggatttggaggcggcgtcggcggcggcaaactttggcggcaatggcggggagaggcagaagagcataaggaagagaagtcgaggatgcagggtttggttgagccaaaccttagacagatgcaatccatatatatatcagcagctgaatgattctaagaatgagtgtgagcagctaaagaagatgttgaaagaagagaagtgtagtcatagtagacaactttatgtgatgttattcttgttggtcataattatgtatttctatatatgttctgtaaattttgtagccacatttggtgcaagtaggtaaatcagtgccattttgtgtaatgttaatcattgtctatgaattatgtggattcaatttcggtgcgttaattatgtggatttaatttcccactctaggtgctctgttcaggatatgtctggcagctcaaggtacaagctgatattgtgtatttgcagcaagagctgactcttgcactaaagctgactccatagacgccgtcgccgctgccgagccgaagacgtcgccgccgtagacgcagccgccgcagcccgtgccatcgccgtagacgttgtcgtcgccgcggccgccgtagacgacgtcgccgtcgtcgctggtagggttaggtctaaatcgaactagaaaggggataaaatgtgtgctgctcctgctgacccgactccagtggcggacgcaggattaaaataaagatgggacgaagatgctcgtctcaataagaacaactaaacataaaaaataccatatttatgttgtaatcatatgaacatatagtataattaataaattaaggcaaacaaaaaaaatgatattaaaataaagtaataatttttgcgccatacataattcattatacataaaaagatatatattaaaatcgtagacgggtgacaaagtcagtgacatataatggattctctaaaaagatactagtaaacatattaatttgcaaatatgagtcaatgtttgatagatatcttttaaaaaataaatatatgagaagatatcgcattaccaaaataagatgattattattttgtgtagaagggagagagagaaacattagacacctaactatagtaggggacgggggtgagcagtgtcgaggaattgactcaggaaagcatcacataagcaggattaaaattggacacttgggctggttatttatggcccaattgtgaattggatgtggtggtaggcggcccaagaaggatacggagggttagggcggcacgggccgtagctgggccggccgcccaaccccgcctaatgcgtggcggttttgctataaatctgttgacaaatttcttcctcagaatttgtcgatttttgaaccgcttgatgaaactcgggattcgtgcttttatgtcgacgctttaatttgtttctttcgacgttcgccggccgccggccacaggtgtggctcatgcacgcgtagatgtctagatgacagacgaagggcaaagataaagcggcagggcatagccgaacatgcatgcatgaatgatgacctccgcacgtatcgtacaaacatacattgcgagttcgtaatccctctttcacgtgggcagtgccaaacataagttttctaaagttacatctcacttatatgcaagttatattatagttacagtgtagttatactgtaattacagtgtaattattatatttacagtgtaattacatgtaaattatagtgtaattattatagttaccgtgttgttatagtacagttacagtgtaattattgtaagttacagtgtaattacagtacaattatattgtatttacatttgacaaatttttaagagaaaatttgtcgacaaatgtataggtagtccgttgagtcaaacgtggtcaacaatgatgcttctggcgtagagagtggcattgattcagtttctccaaatttgtaatgacatctttacaatttgttgaatagtaatgatatttttccaaaccttcaaatttgtaatagcatgtgtctaattaatcctatttatatccatatgatgagtaaacttgtttgattattttctttctttaagcaaaagtacaaattattaagctgattatggtttttcttttaataaattatattgacgatatacttatcaggtggtataataagtaaacatttgttttggtgtattaaattatctgatacatacgtgcgactggtacttgcaaaccaagaccaaaagcctacgatacggccaattcaacggcatgcggcatgctcttttctttgaatacaactaacaattcagcgacatacggagtacttcccaggcttctatatatatatgagtttcttataaatgtaattttaatttatgtattttttatggttctatgaatttttatttaagaataatagctactacgcgtacattataaataactagaaaagacacgcggctttgccacgtaattggctagctcgtaggaaacactaatggccacaaaggcaatttgatgggcgaatcatgtttctgtgtattgttgacattcttttttttttggtaatcatatggacaagagcactgggaaatttgacatctctaagtaaaagtgtggacgaatatcagagctggctaataagtatatcgttctataatttaaagatcttacataatttaaggttaatagctgagctatcagttctcatgagaggagagatcagagtgaggatgaaatccagatcaaattacccttttcatcgagtcatatgtcgttgacattgatctttgttaggatcgagtcatattctccttattcgattcaaccttctttagatatagaaaaatgtgtatggcttgttttgggttgatcagatttaaactcttgcaactccaacactggaatgtttctttgctttgtgggaccagtggctcgacaacgctatataaatatgctgtagaggtgcactgtggctacaatattatgaacgatagcgatagcgcacaatgcacttgttaaaatcacattatgaactattttgcactgtagcatatgtaatggaatatactccttccatcttgattgtgttgacttttttataatatttgactatcatatttaaaaatttagcataataaatatgtaaaagtgtaaattaagattatagttttcttgataaataaaataaaatgatattcatacaatattgttgaagacttttattgtcaaagttttattttgaactaccctaaaaaaatctttttttttggatcacagcaaataacttttttagcatccatcaaaaaaatcaagcaaatcagtctcagtacaccattaaatttctctatccatatatcatatatgtaagccatatcttcaccataatggaggatagtccaaacccaaaaaaaatggaaaagttactaagtccaaaatgaaaatattggtttaagggtgatccaaaataaaacattgctaataaaatatggtctaaaatgtaatttactactctttaataaaataaatagtcaaacgttatttgaaaagtcattagcgtcggatggaaggagtacaatccaattcacaaaatttagtgagatgcatgtaaaaatgatctaaatgcagccacaattgttcttcctctgcactaaactctgttgtactgcagaatcccaattcctgtttagagcgagatagtatgccaactattagctccaaaaatattcacgccaataatatattgttaacttaataatagagagcatgtacagtaatatgttactattagcttatctacccatatttacttcttaatattttattctaacatttttattgttagtcctatccactcgttcttttctgccgtgaaaactgaatagagcagccgtgtatcagggtggccagtagaatcttatgctgcttcactcgcgttgaagcccatgagtctacgtcgataaattagtcgcccgtttttgctctctcttcactcaatcctcatacatctctccactcaatcctcatacagatcaccacttttaccatcatatacagattatcgttgcgaaatggcatatagtctagtggttgcaaaagtctaaataacaccttaggttctgggttcgactctcatgggtgggaacgaattaaatattgtgctttcaatgataggcgatgtacccgttgacagcgagacacctatggtggcttcgtcaatctcaattttttagactttttggtgtttgaatctcctgaaaatgaagatggagataaagattaagtgttccacataaaacgagatggtaataatgtttgattaattgagttttaattattacaaacttgaaaaatgtatcaatctgacattttagagcaactttcatttggaaagttttcgcacaaaacacactgtttagtagtttgaaaagcatgccacgagaatccaaaatttcatctcctccttgatggagaaacgaacaaagacagctatactgtacagattatcgctggcttacaccagctatattgtactacctccgtttcagaatataagactatctatcattgcccacattcatatagatgttaatgaatctaggcacacatatatgtctagattcgttaacatatatatgaatgtggacaatgctagaaagtcttataatatgaaacggaggaaatacctgctatattgtacctgctcttaccattcgtaggccctgtttagatgggactaaaacttttaagtctctatcacatcggatatttggacactaataataaatattaaacgtagactattaataaaacacatccataatcttggactaattcacgagacgaatctattaagcctaattaatccatgattagcttatgtgatgctatagtaaacattatctaattatggattaattaggcttaaaaaatttgtctcacgaattagcttttatttatgtaattagttttataagtaatttatatttaatactctaaattagtgtttaaatacatgactaaagttaaatcctgatccaaacaccacaccaccgtagaactacagcaaaaagtcagtaacaccttcccttgaaaaataataaaaatgagaaaagagcaaccgctccaatcttcaccgcccacgtgtccacacctgagaaagcctcctccccctccaccaccgccgcgttcgtcgccaccgaccaccgtcgctatccaagaagaatagacgacgacgaccaccccggaaaccgagctcccactcgcggtgaggtcaccaatggcggactccctcctcctcctcgcctgccacctcctcctctccctcgccctcctcgccgcctccctctcccacctcctcctcgccgccaccacccacctctccccttcctcctcccacctccgccgcctccgccaccctctcctccgcctcctccccgtcctcctggctctccccttccccttcctccc

SEQ ID NO: 8922 - DNA, 32128 bp, Oryza sativa
gcacgcaaaaataagcttatttttacaggcagacctctcaagagaccgcatgcaaaaatagattttcgcatgcaggcatcttaagagcaccgcacgcaaaaataccctcccccctcaggcatttttccctctcaaccacttcaaaaatttctatcttatcctctccaactactcatccttatcctcatttcttctatctctctcatctctcatgggcggcagcggagcggcctcgcactcccccggtggcggccgggagcggtggcgggcggcggaagcgcaacctcgcgtgcaagctgcgaccgggaccggcagcagcgcggcctctcacacgctccctggtggcagcgcccctcgctcgcccggatctagaggcggcgcccctctcctgcccggatccggctgtgggcgccggcggcgacgcagccgggagcggcggtgggctcgggagccggccgcggcggccgatcgcggcggaagtgtggcgacgctgacaacgacgatgacggatgacggcgatgacgatgacggcggatgacgacggcgacgatgacgacaaccacgaggagggcgtcagcttgggttagggtttgaatattatttttttggggttttttttcgtgcgggtgacataagccaccctgattttcgcgtgcgggtgcatcgcccgcacgaaaaaaaatcagatttttgcagacactttggtgcagacaggcaggagatccgcatgcgaaaacccttttcgactgcacggaaaaattgttttcgtagtagtgaaaaattcaaccccactccgaagccatacaacaactcacaaattgcaatcgggttcaatgtggtctgccaatccagatgactagattgtgataaatctagggttaaggcttcatagaagatagaactgattcatatgctcaagtgaagtattgttcattgcttgagtagataaaagttccaaggacatgattttcagtgaactggatggagaaaactattgcacatgtaagatcaatatattgctgaaacagaaaagatctatcggacatgctggcaggtaccaatgtactatgaataaaccatcctagcgagtacttatcttgttaacatgttatatgtatactaatatatgtatagtgccagctcattgaactcaaatacaacaactatcgtttgacatttatcatgaataccttcaatgtgatcttccctcagctagaatgaagttttctttcgctctcatgaagttactctactaatgagatgtatatggttgacaacttggcatgcattttccagtttcacaacaatatgttcattatttaaggtccgcttgcaaccttataagggctctcgtatagaaaaaaagtcatttttatagtagtgtcataaccggggagaaatatatactactaacactataccaaaatataacaacttttagccgtgaatctatagataagtatttgtacggatttgtagctaagacttatttaattttagaatggagaaagtacctctgtatttaaatatacaatgtcctaggtattatttgtctttggcatacaattttaaccactacatgtattattagaacatggcgataatatccaacaaaactatatattatagaagtatttataaaaaaaattgaccaaaaatgacttatatgtttgcaagctaaagattttgagagctattgaaggtaaaaattgtaaaattttgaccaaataaagttaatagtgttatattttaaatatggaggggtactttcttttatatcgttaatttttcacaacgatgatcatgaactcttctattttgatctttggaccataaggaataattactccttccaatttggagatatttaaccatttgccatatttagatgtgacaattaactttttgccattggacccacatgtcatagacacatgtggatccacatgtcattgagataggggtggcaaatagttatttgctaaatctaaaagtggcaaatagttaaaagcccctctaatttgtcctctccagggattatatcagatcatgagagcctcttaacgtctgtttttttccctcaaacacacagtaaagttaagcttcatttcgttaagaaaataagagaaagtaaagaggaaaggtcaaactcaaagaaacctctaaaaaaacaaccataacacttctacaaacacgccagaccagtagaactagaccactatgatcagcacattaccaactagattaagcatctagggcgagcgactgaagaaagagctcatgcagtacatcatgtacagaagctccagcccaataccataagctacactcataagagctcctccactgcaatgataacacaatcacacccatcaacaatttcttaaaaggtaaggcacacacataagaaaaagcatgaactagaacatgaaattaccttccagactaagggaggaagagaaaaccaacctaggatacaatgttaatgtggcacctctgcatttcttgatgtgtcccagtcctagtcctgtatgtctatcagttctctttctcattgcaagttaatccaatttttaggtatcacaaaaaataagcttggaaggtgcacactagctattaagccaacatatatatgcacaaaatttccatctcttccttccctcaagtaagctgatttcttttttttttctgaaatcctaagcaagcatctcctttcttcttccttataaagagtgagcactgaattaatttggttgcatctattaggtcaagcagtagaaaagatgcagcacatggtttgtaattgagtgcagactacactgagccaagataagcatttagtgtcagaaaactccatatgaggtctacaacgattccaacattttgatcatactataaaccatttacatttgttaaattgtgacaacgaaaagggaaaaaaaagagaagaacgtggccatgcatgcacggtaacaaactgggaagcattatcggagaactgacacacatatgacttggtgagactattggtattagtttttattataaatcaacaccaatgagtgcgttagatgccgattcttaatttgatcccgtcaaaagggatcatctgtgtgagaaacctttcataggtgtcggttttaagtaaactggcacatatgagggcgttacagatgtggtgttcaggctatcacaatgcttgcacctatttcttgatgtgtcccactcccactcctacttctccatatttatctctactatatttgtactgcaaaataaaccaacatatatgtgccaggaatcacgactgttctattcatcaattacccaaagtggtaagttagacactgtcacattgcaaagttcacatgtaaaggtatggcttataagggagacgaggtgcttgctatggattccagagcttacatgagggaaggtagagatgggacagaatggcatatatgaacatgtgtaatcttaatatctagtgtgcacaagttaacctccaagttcattttgtgatcgctcaaaaaaatggtttattttgcaatgccaaagagaaccgatggagatggtattaggattgggacgcatcgagaaatgccgaggtgcaaatattaatattgtagtctaatgtggtttcctcttccttaatttgacaatctggaaggttatttttcctattctaattcaatgtgtttcttatttataccatttttgaagtagctgatggacttgtgtttgtattttagttaacaggaacggaatgatcctgttgtgaagttctacaattccggaatccagggcgtgaatgaagttcttcgctttcacttcaacgtgaatgaagagatcggtttattaaggataggggaaatgatacgtttttttccattaatcctcaaattaaatgtggactatttagtacaatatttttctcaaaatgaagaaaaataaagagcaaatattgaaacttgagctgataaactgaaaaaaaaacatcaattaagtaaaaagccatcttattcagcttgaaaaatatcgcgattatctgaagatcacataaatgaatagccgaatcaatccgtgaatacttttttaggtgaaatgcatatcataatttatgtttcatttagggaaaaaaactgattaaagagtagtcaaacagaaaaaacctctcagattaattaagttatgcagtcaatgaaccattttaagtaatcaagtcccgagtatttgttgccttcatccaactattctgctcattgacatgaaagggcaatagctcagtaattagcaagcacatgtccagccatcagctgttgcaacctaaataatacagctggtgactaatcaagtgaaatacattccactaattccacctgaagaaaattctcaactgggggatctgccatgtgactatggaaaaggaggaggggagaggaaaagggaagatgagatacaatagctgatttcacatcatccggtctaattgagtaactgattttaaggagagggaagacttgaactcacaactttaaccacacaatcttgctcacctttgacaatccttagttccttacaaggactttgcaatcatcatatggtagtgatatagtactaagcattgcaagacttggaacatgaggtgttgctgtatttacaagggatcagggattcgaactcgagacctatagatacttttgcgagattttagacaatgcttgctgcttccaattgcctgcacattgtttcctcaaatttcagaattcgatgcgatgttttgttgcctgacgcgtcctcagtctgtcatgcaattgaacgaccgctcctgctgctctactgttaaataaaactcgtccaaggaccaaacccatgaatgaatctgaatacctgatgctaatcttttttatatcactatggtctttttcttttgtcgtcaccatttaacagatgtagtaatatatagtttccacagtacgattaaattaaatggagtcgctgtagacttcactatgaacttattctgatactaaatgtagatcttggctcagtgcacggtcaactgaattcccagctctttctaaggagaaaggagatgctaaggatttcagaggaaaaaaaaccagcttacttgagagaaggtaaagataggagggttcaaaattttggaccggaatttcagaaatttttgaaatttcagatctatcagacccacctgatacgaaattattttggccaatgttttgggttttctcaaacttttgtgaatttggcaaaagttagtcgaatttggacaaatcttgttaaaaaaatttaaattattttggatcgagatttctaaatttcggctatatcagtacctccgatagaactactgaattgaaaaattgaaccctgatgggacaaaatgacacatatgagtatatgttagcttaatatatatagccagtgggcacaaacttcccagttatattccgcacgaagaaaaacttccctgttcattttgtgatccctcgaaaattgggtttagttcttcaattcaaaagagaagaggtggacgtagaacgaataggattgggatgcatcgagaaatgcagagttgcaaacatggacattgcggcatggaaatttcctgttctaattattgcatgttatttcttatgtgcgctagaagcaccatttcgcgaagtagatgacgcattactttggatgtctttgtgcttatgttgcagaaaaggtgctggtctggtctggttacaaagttctattataccagaaaaacgttcaggacaggaatgaagttcttcacttcagctttaccatgctgttttccagtatgatctttacatccattcatcaagcatactgtgttggacttttcatgtatcttttctcaaaattaagaagaattaacagtagacatgaaatctgagctgatgaataggctttgtagaagtaaacattttctcattccacctgaaaaatgttttaagatagcaaaaatgtgtaacccaaagaatcaatttaatgcattttcctaagcgatgcacatgataatttatgtttctccttcatccaattattctgtttattagcaatatgacacgattagattggctcattagtaagcaccatgctgttgcaaccaaaatacagttggtgactaatcaagtgaaacactacacttcttaatcgtgataactgaaggatactctctccatttcatatcatgtcgtttgatttttcttagtcaagtttgaccaaatttatagaaaaatatattagtattttcaacacaataaaatatattatcaaaaatatattcaatattagattttatgaaactagtttgatattttagatggtgctaaatttttccataaaattagtcaaacttgattagaaaaaagtcaaacgacttgtaatatgaaacagaggaggtattctttgagagatctccaaggactgaactcattggagggtaggtagacggaagacgaaaatatataccaatagttttattatagtatctgcgtaaataagttattccgtagcagctgattttaaggagaatgacatgaacccctaatatttaaacattatagtcttgcgcctctatggctatatgcctcccaaaactttgaaatcatcatacggtatagtgatggagcgatcgacgagccgacgagcattgcaaggttaggaacaggaggcgtttgggaacgtaccaaagcatgaaagtgaggatcttgaactggttgtgacaacacaagaggttctatcctgctagtccgtaatcatcatatgctagtttttgcttttcgatgtcccatttttcttcttttccacagtccctgcacatatttgatcctttgcgtgagttgtgaatgtgagaggcatccagtaaaacaacatctgccgaaaacacaagttctttcctctttttttttttaggaaattggagcggttgaaacacatttaaccattgtaatagcatattatgaacagatatctactggcccgtagataaaacccaatccaacactgaaatcaaccaaaatcttcatgctaatcacagttcccctgaacaccggaagtggggatttatgcacaatgctctggagcacatgaacaaaatattcagaattaagacatgaatgggaaaaaaaaagagatcaagatcatgatcatggacaattgtgctacatacatcatacatcatgttttgtttatcttagatggcctacaaaaatatgtaatacgattcctaggatattgccctgatttcacatactatgtgggatcagcttaagcaaacacatgctgtgatttctgtgcaactcttttagcatgctctctgaaaatatgaattctggtttttactgttggtggaagaattcagtaatcctatgaatgaatactatagtgagatacacatcatctaatcgcatcccgtaaattgattttttttttaaaaaaaagaaatttggaggctcaaaccggcccacaaaagtttgcacacaacaagagcccacactaggacagagagaaccacataaagtatggccgaagaaaaagttttaaacgtttcagaaaaaagaggtaagtttttaaggaaaagtatgaccaatagaattgatggaatttctcaatctgagtcctagatagattcatgtttaccaccaaaaagcacatggtggcaacatgttgcttttctctggggatgcagtttcatcattcaaatcataggccattgttttatttttctcgacgtaagaaaaattaataaaagaagaaacataatctccaaacaattgtgaaaggtactatatattcaaacaatataaatcatccaattgctctagacacagtgatcacaatagaagattaattattcttcccctactacaccactcttgacaatcttcctaccctattgcagaaacaagcatcctcgcattttgcacaaacaaattaaggggatggctacacacagatgaaaatgtactgcttttgagaaattaatatatttcgtggaataatcaacaattccacacaggatattaaaactggatcagatgcatgtatgttaatcttagaagatatcaatacagaagcatgtgcatctctatgaaaaacatttttttaataaaaggtaaataataaatatatgataaatcgacaaaataaatttctgggctagtcatgaattggcttagcccattactctctaatccacctataaaatggctttgcaatcgataaataacgtagccctcacgccgccgccatcgccggagtccgccgccgccgccgtacacttccgccggcggcaagggcaaccatgaagtttttgattccgccgccgctggttcggccgcctcctcctgacctctcctacatcaaccgatcgtaccgatctgtccgtcgacgagaagatcgagatgataatctaaggtgcgttaattcgttcattccttcgtttcaacgagatcgtacttacgtgccaatgcaagctgagatcgatcgatcgatctcagattcagttgccctcctaattaaaattaactagtagtaataactagtggggattttcttcttgctgttcttcagaaacatagtggtgcacctataccattcgaggagtcgcaaatccttgaatattacaagaaatttttggcccagtactctgactacgaggatgaggattcagaggaggattcagatgaggaggattcagaggagggggagaaaggcaagaagaatgtatgttaaaaggggggagatgtgattttatcacaactgtctgtctgagtgacagtttagaagaaatcagacgattggagtttagcgtctcccatttatctatcatttatcagttaatcggcgtatataagatgctatcaaattcatgagtaaatttcagaaaatctcaattattatggtcaaagtttcagaaaaccacgtgaactttgacatatggcacataacctcaggtattatggtcctaacatttcacaaagccacatcactaattgttttgacttgatttactaccttttaagttctacaatcacatcttaaatttatgagcattttattcctaactagaaaggtagcccgcgcacatgcgcgtgcaactaatttaatatgtgtgaaattttattacgaatatctatgtatgtgactttgtattaaaatattactttactatatataaattattatttaacttatttaatgtgctttcaacgtgggttatgattttcttctaattacccttgcagcacataaattctaaactaaaattacttaaaatcgtacagttttcactttatgagataatattatgtcgagacaatagatgtagttcctatgaaaaatttttgggtatttcaactacccatggggatatctttccccaaacatttgctcaaaaagtccaaatttttatcagattctattcgaaattttagatattttcgttctattagtcctgctaaaatatttgaatatttccatttagaatgggttttaaacccaacaattttttaaaacatttacataaattttgaattcttatcatgtccatttttaataaattggagaattccattctaccaagcatctttgaaatgatttgatctctgcaatttgggttataaatatatgtgggttaagcctacaacctgacatggggtaaaatcatctattctaattatctctctggaattgagtaagaatatgaaaatagaggtcatataataaatgcacatttctatattattctacagtaaatattatgaatttacgatgtagcatagcaagttttaccaaaaagaaataaatgaacatggtctttaattccatatggaattaactcactatattggtaatgccacctcagagttgtttcactgctaagatttcttggtgcatttcctcaaaaaaaaaaagatttcttggtgcaatccacatgtttggtactatcagttggatgttcaactgagcatgtttttttacttttaaaatgttgtctataaaaaattaacgctagatggagtacacattatgacataaaaattgttatcatttaaagatttttttctctaatttattagtgacttcatagattatatataattttatctcctaaaaatatcatttattgataaaagcaccaaaatcaaattgtataggcaaattaccccatatacatgttgagagaaattaattaagttgatagaaagttgttatgtgtctaatgggatacaagtaataggtctacaggctttattaaaaattaagatgtgatattttgatttataatgatgaattttcatttttgttttactaagtggatgcctcaagatggatgtgggtccggaatgtaatttttatgttaacatttaaatatactcaatatggatattaaagttgatttcactaagaaaatacaatagttcaaacaaatcataagttgaatatatgatttaaaagattatattattttatttatattgttcccataaatgttagtaagatgagaaagagaagaaaagggatcatgggagagctagctagacctgttatgtggaggtccatttgtggttttttcccatgaagataattttaatttcaattattataagaataaaaataagagaaaaggatgaacgatgcacaccatatagggataaggtgggcgagatgtttttcttaaataaattattgatatatttttttcaaaaaaataaaagattgatataatgactaaaataatgtgttggatgtttaatgtataaggctttaacattgttgggtgggggagagaggaaaggaggtttgtttctttttttaaataaaaatctcataacaacctaaattctatgcccatcgatttaagtcgaaaccaatgattagatgttttattcttaaatttttattatttactctatttacgaagtgttacagagtggtttacaaacatttataaggatggttaatgggttttaacgccacatatgaacgcgaggggagtttgggatgttttacgtaagaaaaagatatatataataacctaaaataatgtaaatcgatgaacgaatgttttatatctttttagattttctctaatttaggtgtcaaatagatgttcggtaatatttatatgatgtttaatagacttattaggatgggctagaggaagaatagatctagtagattgatggattttttaggcatgcatttttctaatttaattattatggaaataaaaaaacgaaaaaaaaatggaaacggagggatcgtacgtacgtacgttgctgatggattgatggaaagtacgtacattgcggaggcgtcggagggggattttattttaatgtaaaaataaatctaacggtcaaaattaatgagtccaccaatttaaatgaaaatcgatggttagatttttctattttattagagtgacatgtggcgtctcgagagcgtttataggatgccacatggcggcttaggagtgtttatagaacgtttaatggacttttagtatataatagatagaagatataaatattacatccgttttttctattttgatatagcagtatgttaaaatggttaacaatatgattttgtgaaactttaggatcataatacatggggttatggtgtcacgtgttaaaatacatgtggttttatgcaatttggatcataatagttagggtttaagaaaatttactccaaattcattcgtttgttcgttcattcattcaatgtgtattaattcaagtgttgggtgatgaaaaggaaccgggtatcgtgaagcgcccgccggaggcggctcctcttgaaggcgagcacgagtgcaagatggcaagaacagcaccaccgcaaggaggagaacataactcgtagtcccctctgtaggtaaaccctacctccgttttcccaatctgcaacgtgtatagatgcaatttatttaaatgatctacactaaatggttaaacaagcgtgtgtcttctctattggcttggcttgttcatcctaaaataacccctcaaatctagttttaaaattatcctgcctatgcctttgtttatggacaaataatagagcagtactgttgggttcttatttgaatgtactttgatatggccatggttgtgtggttgttagcattgtaccatctcaaataattagcagtactccgaactgtctgaataaaaggtcccagaactcgagttagctgaatagtagattttttacatgttggactctttaacagaaacaatggtgcagtttcatggtctttaaccaagaaattaggtgagggcaggaatgtagttaaagaggggaaaaacataaagtacgtgtttagtgtcaaatcgtttggttgcggacattttcttaacctgcaatgctcaattgcacaacttttgcaagtcattgcatcacttaagagtttatgcagtagtagaatattttttctgtgtgtttccaagttaagagtacatgctctataagtataaataaatgaatcaaatcatcattgtaatacagacaacaaacataaaaggccaccaaatgcattattgttccggtgatttctcctgagggagagggaagaaccattttttttttcgctcagaatcaagttcatagctgcagttctttgttaaatatgacctatatttatcttcatcgcatgatatggtgtttttgtttagagcaaatttcacaaaaccccatgtttagaggcaaatatatcaccaagccctagcatttttttgcccccacttaacggcaggcacacaaccaatatactgtaacagctaatccagttttttgacattacacatagacacatgggcactgagctggcagcacaatccttgcaggcttgaggcaatcttgtcctctaaacatggggctttgtaaaatttactcttgttaatcttttcatccatcgacttcaaaatgtttctatccaagcttcgtgcagttcctttttaacccagccttgaggtttcgaactgttgcttacatagatttggtttggtttgacaggatttgatgaagacaggagaatgcaacaggagacgaacttgtgacaattttctgcattacttgtgctccgttacgtttcagtggcaactgaataccgaaactcctattgggcgattgatcgccaggggccgccaggagcgatcggatcgggtctccccctccctctacctagttttcttttttggcaccacattactttcctattttagtaaatttatgcatctaaagtttatacacctcaagtttacacatctaaagtttaaagaccaaaagtttataagtcaaaagtttatatatccgattcaaatttgaatttgaattcaattttttttatatatagtatttctatatatctaaagtttatacacctaaagtttatagatccaaagtttataaatcaaaagtttacatacccgtttcaaatttgaatttaaattatatctgattcaaatttgaatttgaattcaaatattttctatatatagtatttttatgcatctaaagtttatacacctaaagtttatagacctaaagtttataagtcaaaagtttatatacccgattcaaatttgaatttgaattatatctgattcaaatttgaatttaaattcaaatagtttctatatatagtatttctatgcatctaaagtttatacacctaaagtttatagacccaaagtttataagtcaaaagtttacatacccgattcaaatttgaatttgaattcaaatatttttatatatatatagtgtttctatacataaattttttcaactttatttttttatttttttttaatttatagtgtagtaggaagagaagaaggggaggaggaaggaaggagaggtgtgtacagggggcgtggggatcgatcgcttgatcgatcgcccattagccacactgtaatcgtaatgttgggtaatagcaattgtgaatcttattaggtaaaccttttattaggtggatcttgaaccatatgctactgatgtcgtcgtttggttttcagttctcatgcaacttaattatggcacttgtaataatgtgttcatcaagcattattgtagctttattgctagcgttgcaaaaaagttctcatgaaacaaagagcgagcagatctgttcacgagtgtatgattggtgctgtagccagatggctaatataatcttaacaaatttcacttaaaattttccggtatttcagatgtcggtacgtacggatccttataatcgtattccttcgggttatcgagttactgaagacggccacagtttgaacccgagtgatttctgtgtgagctttctccgtcttttttttaaggaaaaacaacactagattgtactttttcgtgggagaaaaaatacaacccctatcgtgccaaaaaaaaaaaagctctttctccgtctattgtctcaaccaaatgttagttttgatttatatttaagtaaggagcttaagcttactgtgcatggtaattaacaaattttaccaacaatctattattatatacttaaaaattcattaaactttttacaaacttttctaagacatcatgtgatgtttctacatacatcctaaaccgccacgtaacattgtctaatcccactattgattttcacttaaattggtggacctattatttgacattattagattagatctatacatattatcaattttcacttatattactatcggtggacccatagatcattagattatgtaataccttcctcatatataagagaatatataccgctgaagggagaaaaaaaaacatatatacatacagtatgtatgatttggaaaaaaaacaataaagattaagtacagttcggtggaaaaaaaaacatgtccacatacataagataaaaaaaaagataaagccacgtgtaaaaaataaaaaaaataaagccaacggaaaaaaaatcgaaaatagaattttcgaccatatacgataaagtaaaagaacatataccataaaaaatgatgatatttataatataatttatatataaagataaatatattatttcataaatataggaagttaaactagatcgataatataaatatcaaatatcgaaccaatggtctataaacgttcacatttgaaaatatttttaaattatatatccaatttgtgatatttgttgtatacctttaattaaatgaactattgatgtattataaaatttatattattgatatttgtagtatgtcttatttgctagttccaaactactatgctcagtactattattaatgttaaaatattaaaaaatatataacatacgaaataaattgtttttcaaagtaatagcttatttttttaaaaaaaagggttcatttcaattagattgttaatattaattttagaaataaataaataaaattcttagttgagattttaatatggatataacttcatatttaaaattcattgtttttttaaaaagaaaaactaaagagctaatttacaatggcacaatatatttaacacgattagtatattctgtaggataaaagaatgatttaggatattatatttaacacgattttatattctttaggtataagggtttctatgttgcgataaatattcatgatcatatttgtttcagtttgtattcactctatgactatattcgataatatttgattatgtttcgaaatccaaaatagaaataaaaataaatatggtagataccttccatccgttacaaagccgttttcatccctaaccggggctccactgaccataggcctggatggcggttggtaggattgtggtggggtaactgaggcaccaacaagttaagttgcgagggacagaggatggcgacaaggaaggggactgtgcagcaagggaatgatagaagttcaggtaaccattatatatgggtctcatcgtgtgaaggaagatgaatattgggtcatcaggtaggcggccatgggactctcaagtcatggctcgagagtagaagagaatgaggaagggaaaaaggacaaaccgtgtgtgatcacgcgtttcacgcagcggcgcatgaattaaaatcccctggctcatgttgacatagtaactactactaactcaggaccaattttttaattaataataaataatattatttaaattaaattattagtaattagaggataacatttaccaaaataagatggacactaatagaaacagcgtccagatgtggacgctattaccattaacgtacagatgtggacgccaattggatcgacgtccaggttggtgcggtcataacctggcgctaatcatcgcgattagaaaaaagaaaaaagaaaaatcccccaacgctagggcagggtgcctctgccgccgtccaaatcgacgccgggagtctgccgccgccgccggcgtccgcctcaacctctggagtctgttcctccttctaactgagcgtagggactacccacgaggcaaatggcgcggcagcgctaaggcagggggctgccgccgccgccgccgccgtcgtccacctcgatgccgggagtccgccgtcgccgtccaccaccaccggaagaccacgccaccgcctgaatcgacttttgaagttctgagaggtggctgccgtcagccgcttccatccgtagcttgctgtcttccctggaggctgcagctgttgtctgcctcgactcctgccaagtgctgtcatctgttctcatcttggaagcttgcagccaccattgacgtccaagcccagaactcctacagtcaaggtgattcaactaacttattttgttgtagcctatttaataaacattttgggacacaatttatggatggtaattacaggagatggagaatcaagaaccggcttcacaacttctaaaaaaaaaagaaccggcttcaaaaatataacataggttcatcctgataagtctaatgtataatagagatctttataaaatatatgtcaactgcatcagagttgtcattggagttccaacttcggaactggaattacatttattcacacagtagaattgaaatactaatttagcttattgattgttaacattttgtgcagctaaaaaatggctgatagtgatcggttcagtgatttactatggatgcctcatgggcagcacaaagtatctaaaatttcagaaaatgtgagttgtctacttagtttggtttcttgtcgatttgtaaatatattcatctaggttcccatgagtaattgtttttatctttgatgtagcctagtagttcaatgaatatacggcaccatcgcgttggaatcccttaccacccattgtgccgatcggctcaacaaaatattagtttctatcaaattgcaaagatgaggagtatcaaaattgacaaatatttgatatctgctttggtagaacgttggcggcctgagacaaatagctttcatctaccgataggggagatgacaattactttgcaagatatcagttgcctttggggtttgccaatcagtggaaaactaattgtgggccaatctgatggaaattggaggatatgattgagaggtatcttgggattccaccagaagatcaagaaataaagaagaaaaagaggaaaaaggaagatgatacatttgcactgagttactcacgatactccataactctgagcaaattgcgtgatcactttcgtgtcatgcccagtaacccaacacaacgggagatcgattggcatagtcgagcacttgtcttagaaattcttggctccattatttttactgattcatctggagatagtgtgcctgcaatgtacctccaatttatggataatttagcgacccgcactgaatacaattggggaggagctgtacttgctatgttgtacaggcagttgaacaatggtgctgagaaggcaagatcaaaaatttttggccctctagtattgttacaattgtggtcatggtcacggttgccattaggtcgtccaaaaaatataattcaaaagacggatgaagtggaggagcaagaagaagaagaatcagatggctatcctatatttggggccaaatggtgtagttatcatgaattccccaccccacataattgtggtaatgttttacatatcttttgaattatgtctcattgtatattcttataacaaacaacatatatgtcaacatgcttatctttttatactaatattatacaggcactcaatactaccgaaaccaaattgacttgattcgagaaggtactgtacaatggcaaccatatgaaggtctcatagagcagatgcctatccaaattcagaatgaccgtacttggtggtttgctagactacctctcatccatttttgggttgtagagttccattatccagaaagggtaatgagacagtttggaagaaaacaattaattccaccatcgcctccacatggtgaggttgagcttcggaagctacgcaaagtgaagcatgtaggaggaaaagtgtgcgattggaataaattccatgccaaatatgtgcaacaatatgatgggattgaagcaacaatcgttcaagaggattgtcctttcgacgtagctagcttaaaggagtatagatgttggttccaagcaaatggtatgttcactatgttttttgattctcaatgcttgggaggacttgaaaactctatcccataccctcgagataacatggagtggactgggtacatgcctagtggtccacccctagctcgcattgtaagttatagatttcttccaattactctttatattgcagtgacaacctagatctgattttaactcataattgcagggattgcgtgagattaaaaatgcagcatggggaatcaaatgttgtataactaatggatgcaagaagataggtaaatctatattgatcacatgtcaggggaatattagggatcttaacttggaatacaaattgcaaaacatgttatctgaggctggactaccaattaaggttgaagaaattccatctgatgacgatggcactactgcttgcacgccaagtcctccaaatgaaagttccgttgatatatttgatgagtggatgatctcaggaaaatgttttagtagatatattgatctaggtgtggaaactactaatagagttcccacaacacaagatgcaagccaagtgactcaatgtttggaaaatgaagatctggtaaaattctaacacttgtgtgtatgcaaattaactttgtaatgtatttaatatatgatatactattgggtgacatgacaggtggcttcaagagaagcatcagctccattgcatcctggtgaaagaacgtcaagtcattcagaaagttctatccaagtggttgattggactagtactgagaggactcctatgttcaaaaagaacactccaagttaggaagaccatatattctgttggatataattttgtagaacttttggagctatatgttctaaatatatgttaactagaaatcagccactccaagttaggaagaccatatattcctgttgacatatatgttcttttcgaccactgtcttatatgggtgctatactatgtaaaatatggtcatgctgtcagtggttgaatggcgtgttactttactttgtactgacttactatattaatggatttttatgttgccaacttacatcccatttgaatgagcgcatgctatttacttcagtttattgccacgatatgtgtgtgttgtagggaacaaatccctgtttaaacatgtgctcagatacatcctacaaatagcagtacagcagcaattctgttgtgtaaatcaaatcatatgaaaaattgataaggtaattcaaattgaactgtctgtactctcaaataaatacttcaaaaacaacgttcgttgagctccattcatgttcaaagccaaccagaagaatgtcctattcctggacaactataagctaaattgacactgtaatttatagatagactacacgatgcgtaaaactatatggtgccagagggtccatcaacatgtgttctgctcgacgttgcacctacaaaacaatcaaagagagtcatatatcaagtaaaagttaactaaccattataatgcatataattcccattgtttgctacctaaattgtcactatctcttgtggaacggtgtgcctggtgtccaagtcgtcttccttgcatttcatccatgtacattggtatcctgttatgctgacgacggcctagatttatctgtctaggatcaggaacaattattggaccagtaaatggtggccattcaatttgatttccataaggaagaaattgtatagcccaggtactagcaagtgcttgagaagagtagaatggattgatcaactgattttcattaagatttctatgtttgcaaactgccaagacatgagcacatggaacacctgtcaaatttggcttttgacagtcacaagatggtgtgttgttgggttgcaaaactaccttatacttgaagtccctccatgtgtaaacctcatggtttccttgttgcattgggactaactcattgtcgacctttacctcatatattccaacttcatctccatacgagattacattcatatgtccagccttatttcctcgcttcactaatagcttatcaaccctttgagaccattgcttgccattgttaagtaaattaacagcatttcgccttctctcaacaaaccattctaagcactttgaaaatgtttcctccacaatggctgccaccggtaacctccgagaaaacttaaacacattgttcaatgactcagatccattgcttgtcatgattccccaacgatatcctccatccttgcattgaaataccttctcgagcttttcttgctcatctttatcttcatgcaagtactttccaacatttttaatatatgttattgcctcaggacaaatatttgcaattgatcacattccttcatcaaattttctaggtttctttttcttcactgtccacttaaatgtcttgagcattatttcattgcgacaaaatttccatagattctcagctacatgctgtgagcaaaggcggtgcacacattcaccggcgctctcattccatccaatgtggggctgcttaaacaaccatttcatggctttatgtcgatcagatataacacacataaactttccatagcctattacctcacttcgtagccatctcataaaccacccctagtttgcactatcttccttctccacaatagcaaatgcaagagatagtagttgattgttagcatcatatccacaagcaatcaacaatctatccttgtacctccctgacaaaaagcatgcatcaacacttataactggccgtaggtagggaatgacatcgatacaaggtccaaatgcccaagcaacacttttaaatgctcgccgtccttcctgagtcattggctttgacaaaaggacatactttgtacctaggtttttagcttttatagcctgtaagaaagggatgaggaggccatatgaaccttcccaactaccaaaaagttgtgctattgccttctctctgcctcgccataatttactataagatggcttcacatttctatatctctgttggactagtgacctcacattttttatactcaattccagatcatcccttaatgcatcacgtatcacattagcaatcatagaagatgataactgagcatgatcaaatctatcagccggtgctcaacaggtgtgagcatatggacatttccttatcatccaacctgaacctatctttgtgggagttgcatagagcctccacatgcagctattatccgtgcattcagctacaagtttagattgactacttgtgttgtacttgatttctgaatttttacatatatgaaactcacctatagcaatttgtaggtgcttttttgaatcaaaagactttccttctgctagtgggttagaaaattgattcttacgtccaaagaaactctcgtctgctgttgtctccctcaatatagatatatcactaaatgcttttataggattttgtccagatgcacgcataaaaggaaatgcattgacagaatgaacaactcgtggttctggtggctcatcatctaaactattatcaagggcaccatcacaatcctgctcgttgtcatcgtccagtccaaatctatcctcaccaacatatgtgtcttctgcagtattgtcatcatctatagttggttgtgttttggaaaccacattatcctggttgataggttatcctggttgataggtgaagacaactgaactgttgttgaatgcagaccatctactaaagtgggtacaacctttgcttgtgaatgaactgtacctggctccaacaaaacacctgagccatccctttccgaatgcctagttgatgcaaccaaggttgtactattaacctgacttaatcttgcttccgtataggcgcattcaacataaagctcaacaacctacccacatgtcttctcaaatatcatcctccatcccctgtcttcataaataggaatcaattgaaaatattgtggtccaggatttccgatatcaaaccgagcttggatattcattgcacaatgatcctcagtgtatccaagggcctgaaaaatttcttttttgacttcctcaaaggttgtagcctccactgccggaaaagttatttttggaggaatattatattctgcacccttagctccatattgtattctcccatcaacatacactagaacaataatcattttttctcagtcaaatctgcaaaacaaactaaacaagttagcaaaacaagttatataattaactttaagttagataataatctgctgatatatcctttcaagttttaaaaaatgttgttttgcatattaaaaatgtcaatgaacaatagtcattttatttcctggctgtgtcttccaaacgaactcaacaattaacaaaggcatggtatatgtctactagttggataataatctatacatatattcaataaaacactcatgtcatatatcaagtatagatatgaacaatgtagtacatatcaattaatgctaattagatgagggtgagcaaagacatgctataagtgaaaagacatgcatgcgtgatataaattgcagggcaaacctgttgctcacgacgagagagctgccaatgcacacggcgccgtggctggattgcaggattggtggcgccgtaaaacacggacaaatcgaaggccccggcgtcgacgacgagagtggcttggacgacaaagcggatggatcaaagtcgtagagagggtgaactcgtatatgagttacgacgatgtgtggccggctgccggcatgcgcgatcgagcgctcatcgctagagttagggttttcttttgattgtcaaggttttcttttgattgttctcactctattcgtggcttggctgcaccagggaggtggacgttggttccaacagcgtccaagtatggacgttgtttacaacggcgtccaattctggatgctttctgtattagcgtccatcctactcctgtaaatccccccaacgatttactaattatttaatttaagggtaattgtttattataaataaaaaattcggaactcaggatggtggtgatcatgcgggtaagcattcgcaatctaagaagcaagcaagagaagttaggagcttatggttcttccacacttagaattgaactatcatcattactttcacccttattttgttgggattctcctgatctatttttagatgttctcattgccgcctcctttgtttgcacacaccccaacaacaaccacaacgcgctatggcgcctcctatggatagcgcaatgtctctcacgagctcccccattgccgcccctttctcttcctccttccttccacctcaccccaaccccaaccccaaccctggccccgtcccgcgcgtacggaggaggggcccatgcatgcatgcgggtgaggtgacaaggacgcggccacggggatcaccggcgcaccgaccgggatgttgaaggtgaggtggttgccgttcaagaagacccatctcgcccgcagcaacgcctccgacgcgtcctcccccacctccgccgccgccgccaccgccaccgccgtcaccacccaccgcctctaccaagtctggaggggcaggaacgtacgttttcaaaaacgaattcggacaaaattcgtgcgtttccacattaaaaggagcccatatattttgttgttgttgttgtgtgtagagattcctgtgcggcgggcggctcatcttcggcccggacgccagctccatcgtgctcaccgtgtcgctcatcatgacgccgctcgcgctctttgtcgccttcgtctccttccacctcgccgccctcatcgggaagccgctcggccaggccgtcccggccgtcgccatcgccgtcggcgtattcgtaagcccggccaccaccatttctgcgtcgctcgagcaaaatgaagcaattgaccgatcactttgcgtgcatgcgtgcgtgaaggacgtgatcgtgctggtgatgacgtcggggcgggacccggggatcatcccgcggaacgtgcggccgccggagcccgaggacatcggcgtgtcgtcgccggcgttcggcggcggcgggtcgctcccgccgacgcgcgacgtgtacgtgaacggcgtggtggtgaaggtgaaatactgccacacctgcctcctctaccgcccccctcgctgctcccactgctccgtctgcaacaactgcgtcgatcgcttcgaccaccactgcccctgggtcggccagtgcatcggcaaggtaggccgtcttctccgtctccggcggcgaccatctccgacgtgctgaccaactgttcgatccattgcctcgcagaggaactacaggttcttcttcatgttcatctcgtcgacgacgttcctgtgcctgtacgtgttcgtcttctgctgggtgaacctggcgatgaccgcgaggcagttcggctgcagcatggggcgcgcggtggtggagtcgccggtgtcggggatcctcatcgtgtacacgttcgtgacggcgtggttcgtcggcggcctcaccgcgttccactcctacctcgtctgcaccaaccagaccacgtacgagaacttccgctacaggtaccaatgttttaaatagcgggctaaaacatttagcggttacttcttaaacagctatagcaggctaaattgagctatagcggctaatttgtactctctccgtattttaatgtatgatgccattgactttttgataaacgcttaatctttcgttttattaaaaaaaattatgtaattataatttattttattgtgacttaatttatcatcaaatattctttaagcataacataagtattttttatttgcataaaatttttgaataagttgagtggctaaacgttggttaaaaaatcaacggcgtcatatattaaaatatggagggagtacacgagagcaaatagctcgaatccttctcaaacagttatagcgggagataagcagcagtttagcgagagattttaaaccttgacaggtacgagcggaaggcgaacccgcacaaccgcggcgtcgccaagaacgtcgccgagatcttcctctcgccgatcccgccgagccggaacgacttccggtcaagggtcgccgtcgagcactactacgccgccggcgccggggcggcgtcggggcagtacttctactcctactcgatcgggccgctctcgtcggagtccaaggcggccagcttcaacacgcgggggagcctcagcttcgacatggccacggcgagcttcgacctcggcggcgtcggcgtcggcggcggcgtcggaggatactccgccaagcgcaccagcgtcgacgtctgctccaactcctccgacttcggcgacatctacggcggcgagcagcagccgccgcggcactccatcttcggcggcgacggcggaggagggaggacgagcgtcaggaaggccgacgacgtcccgacggagttcgggcactacggcgccgccgctgccgccgccgccggcggcggcggcggccggcctcgcgggagggagttcgaggccgtgtgacgtcgccgccgccgtcgtctccaagtgcgttggcgccattttcttgggagctcgacgatgcaacgcagctaattaatcgatcaattaatgtagcgaatttttctctgtttttttttggtgatcttgtgcttccgctgctcgtgtgttgtgtagtagctttggttgatcagcttcctcatgcttgctaatggagtagtggtttccatagcattctagtactacttgcttaacttgatttagtgaaggtgatgtatacacacacaaatgcacacacacatgggtttaattttgtgtaattaggactgtgcatatatataaacggtgttcatgagttatccaaacattatcttttggcatgtactatgtttcatattataagtcgttttgacttttgtcaaattcaaattattttaaatttaacttaagtttgtagataaatatagaaatatttacaacacttaattagttccgttaaattgaaataaatcaatagttgaatatatttttataatatatttatcttagattgaaaatgttactttttctataaatttgatcgaatttgaagtagtttgactttgacaaaagtcaaaacgacttataatctgaaatggaggaagtaatgtttctttagaatacaagaatttggcctttctacatctgattcctataaaaaaaatcctacaaaatacataaaaaattatgtgtaatgaggcgttgtggatggatggaagaaaatgagaacaaagaaggtgttgcctgacaaaaaaaattattcaactgtttcagtgggagagagaaatgagacattatgagtatgtcagctcctaagaacataattttgacacttctgttgacctaattagttggtagagatacataatcctgctatgccacttcaacttacatttaatctttttacatatcatgaaagaacatatagccaaaacaaggaacagcatgaacccagaaagttgcttcgctggattatgggctaaaatgaacaactaagagagttgctgcttgttgccttcacaatttggtatctgactgaatccaacgatcagcttgtccctttcataccacttgccccagaatggctattttactagcatgcagttcaacaagcaccccatatgcataaagtaacctgaggtgagggactgattaatgcatttagcgagaaagctcggcgctaattagccaactaacactatgttattgtagtgcacctacaatttcatactgatcatgatcaaccttgtaacagaaggaagcagagtgctactatctttagagcaccttgatgcaatgcgtgcagatccatcagcagcaaaacttgggaacctattagtcctcttgtattccggctattttacctgcggacttgtaagggagatggttaaaagcacccattcaatatggccaagacaatagtataacatatatatatgcatgtctaaaatattctcggcagtttttatgtggttctatgtattcataaaatgattggatagaaatacttaggtaggcatttcttgactgcactccaaagaaattaatccatctgtctatgaagattaaacttaccatattacgagaaaacaatcaggtaatctatatttttgaaaaataaatcccaacacccaatgaacaaagtatgttgcttaactccagtagccatgcagcatttcttgttacttgagctaatgcaactatgcaagctgtaaatttagacactgtggcttgcttggcttctctcctcccccgaaggctttctcagtttcttaggcaacaatggtgtacatcaaacctccatgagatagccttcaagggagagagagatccaagaaaaccgtgccgtttaacatcactttgaatgtagtaagtagaagtactaaccaatgcttttgcagacacatgaatttgtatctgcaaagcacatggagtggaatgactggaatataagtttgtggcagtatatatagtgtccacaaagctactatacatacataaaacaaatgagaccaaactaaaagggacaacagaatcctgcactaaataaaggggagataattgtattgtggagtgataatgtaattaatgaagaatcgactcaactgcctagaaagcagaaagagatacaaggccatgaggataggagagctttgcctccattagttctagaaaacttacatttagtacaatggcacctttccttcatgatcttttggacaatggtatctgactatgccgaacaattggtccaactcatggttacaattgattcccacccttaacacataacagcagtgccaattaacaaatatcatctataaagaggttagaagacaacgtacatgtcaccacaggttcttaatgttgagtgaaatactagctaatcttatggtgatacaacattagaaaaaagtctatttaatactccctccgtttcaggttataagacgttttgactttggtcaaaatcaaactactttaagtttgaccaagtttgtagaaaaaagtagtaacattttcaacccaagaaaaatttattatgaaaatatattcgattattgatttgatgaaactaatttagtattatgaatattactacatttgtctataaacttagttaaatttgaaacagtttgactttgaccaaagtcaaaacgtcttgtaacctgaaaccagtggcggaactgagggggggctggcaggggccatggcccctcccaataaaaacaatttttttattacccccatatatcatagcagattcagtgaacaagcaatagagcttctcaatttgtgtacgtctttggatccaagtgattcattcagttcattcaacattgataaagtgtgctctctagcttcaaagttctatcctgctgattttttagaacaagagagccaatttgagatgtcaattacgtcactatgaacttgatgtacccaccaatcctaaatttcaaaatctgacatctgtagctgatctttgtcgtcgacttttgcaaactattcgcttttatgtattgccaatgcatgaaaaaaaagagaaattgctaattttttgaactgtcaaaagccggctggcccccctttgattttctgtccagctccgccactgcctgaaacggagggagtatcaaattgcttaggatagatgtcctccaaaatttagaaaagccataaaagaagcttgttaatggtcagactgaaatgttcagtacaagtagctatatgtatatagttctcaccagtcaccatacagaaaattctaagagacttgtgtacagatcatacacaggtgacactgttctaaaccaacaagttttgatcatattgtcagcaaaagtctaaccacaataccacaaacactcaccaagccgcattcagctgcagaagaactggatattctcatataacattgacaacggaatctgggagatcaatcgatcatcacattacaggtacaagtgaccctttggacactagagaagccaaaggcttgtccaccaatacaaagtagcactaagtaataggtccctaaagtgttagatttggaagataattggtaccataagtggttactcgtcagtgtcagacagtcgatcagtatgttccaggggtttcttttgctgcccaccgtatctctgaaaagtttatagcagatcaactgcagctaagaaaaggaaaaattccagctctataacctaggaaagaattagaaaaggccccaccactaacaggttttacttcatttctccaccaggtaaaagtgattgcacataactaaaaagttagaatgaaaaagaatgcatgaatggattttacaattctaaacagagagagtatatgatccagttatgtcatagaaatactgcagaaaagaaagagtcaactctacaaacaaatggaactctattccaaaaagaaggaataatttctttaggcaaaagtcacccagataaattctaggagaaagaatattatcatctgcagccagtatgaaggtttaaagaagagaatcaaataaaaatgaaccaaagatgcatgtagacaagtctagtctagaagaaacattcgcttgcattagttaaggtgtaaggtttgcagagaatcaaactgaatatggttcttgtcaatgctctaatgaattaattccacttagttggatcaccattttcttctcttttcaattctatatgagtatcataaaggtattgctgtcaagttaggaattaggcattaggcaaattgcctggataatgaataatcctcttgttcaaaaccattttaagtttctcttcttccagtcagtacaatagcctatattttgtagcacttgagttatgaaatgtaatatgtacaaacacctagtatcatcatggggccaccggcaaagttatttctcacttttgtagaaaatattccatccaagggtaaatccatgcaactgagtttcatccatatccacgatgtgacacattgtgtgtattggaccatagacccacatgacagtgagacatcattggcgcatcgtacacattggattaagaatctttcaaatcccaaatgatgaatctttggtaagtccgaatcacccaaaaacagatgcaaatataggtttaaaaaatgtctaaaggaattaaatggaggccccatattcaccagagatcgagaactggtatgcaattttttgcaaattacaacacgtatacacaaaatatatatatatcagaacctcaagaagattccatgaaatgaatatcaagcagtatggaagtaggagagcgataacgcagctcatatttggtttagcacaactaacagcatgcaatcatgatgaagttttacatctgtaacaaagactactgtcttaatgataaagagttgtgcctgcatgcaacagctgaatgcgcatgtgtatgaagttttattaaggaaatgggatgaatgtcggaaggttcgaagcaaagcacagattttaaacgaaatgtgaggacaattcgaaactgcaggtgatcccaatccggaatagttctttgggttttgcatgcttgcagccaagggggccaatagaaaagaaatactgcatagcagtaaattcaccatgatagagtatataaagctaccacaatagcataatgtgaacaaactacaaaactatgagatcattgaatgagttacaacaagtggcctatcctacatttggatccattgactgattcaataagataaaggttaccacagtgttcatcccaaaacccccataggccatacggctaaatatttcaggggatcagcatgtgaacatatcacattacttgagaatgatcaaaatgtacctacttaatcaagcacaattgaagcaacacaatcttattcctgcgcaatgctcttgccgacgacgcccttcatcggcaaatgttccatctccgcctcggcagacgccaccgtgggcattgcatcgtacgacccaccgacgccattatgcctcctccctgtccccatccccgccccggcgccgccgtccaccccgcaccaccaagccaccccgaggtgcactcccacggccaccgccgcgacgaccacgcagtgcacggacagcgcgaggtccatgagcgccacggcgcggagcctggcctcctcgacgtcgcaccgcgtggcgggcgtggccacggcggcgtccatgaggcggtggcacccggcggggacgcaggcgtcgacgtagaggacgaggccgctctgccccacccagaggccacccacggcgccggcgcaggcgagcgcggtctcggcgaggagcccgcggttcgggggggagatcgcggcgagcagcgaggcgacggccgcggcgaggaggagggccgcggcgacgtggagcgcgtgggactggaggtcggagggcgggaaggaggcggcgacgagggaggcggcgcgggcgatgaggaggagggggagggagaggaggaggggg

SEQ ID NO: 8923 - DNA, 10290 bp, Oryza sativa
aacagaatcacttcaatcctttgctgttacttttctatatagtaaatcaaacaaagagtatgtgaaagcatgcagggtactaagagcctttagaagggcatccgcatcaccccaagctaggttcgaggtaaggctttgggacaaaccaaccccaagaccgtcattcttttcatgtctgcctccgtaatgtggaaggatgatgttcaaacttgcagctgttcagagtctagatctatgtggctgtcgttgtacaaacatcttagaaatccttcttgaggcagagtgaatgactacgaagttgttctgagatgaagtatcccacaaaagatggtaccaatattgtctccatggaacgctatgattagggtactgtctgatttatcattatttttaaaatgcatcatgattctcattgaggctactgcagtcaaagatgttgtcaacatgcctggctattattttctgctttttccgttgatcactaagtttctaattatttcttgagctcaaagaggaagttcaatatatatcttatcatgtttaaacttttgattttaaatgaattgatgaagtcaattttacccccttaaatatttaagttgtaaatgtttaaactattttctagagcacttaacccctttaaaatttatgtaccttagccccttaactgttaaatgcagtactttactcctgctgacatttttccattttgtttatgtttgtccaaataattttttattgaaacctttataggtgtaaatcaccgtgacagctaatacacgcgcctttttctctctttttttcacaagctaccgcgcgccgtttctttacgtccgcattttttccatttctttttttttcacaagctaccgcgcgccgtttctttacgtacgcattttttccatttctttttgccatatttttcgcgtttttttatttgagaagttgaatctttcatcttcaattttatttgaaagttttgaatttgagttgaaatttttaagatttgagttgaattgttgaattttgagatgaaagttttcaaatttgagttaaatgttttaaattttcagatgaaagtttttaaatctaagttgaaagttttcaaatatctggttaaaagtttttaaatccgagttgaatattttcaaatctcgagttgaaaattttcaaatttgagtaaaaagttttcaaacctgggttgaaagtttttaaatctggagtgaaagattttaaatctgggttgaaagtttcaaatctgaattgaaagtttttcaaatctgagttaaaaattctatttatgtattatttttctaaaaactaatactaaccattatcattaacgctaatgaatgtcatcaacgctaattagcgttattagcggagaggccgagagagggcgcgtgcgcagctgcgccagttagcctgatagcgcgcgcacccattaggaatccatgtaaatcacatcatacgttatgcccaaagtagggccatgtttggatcctaggcatttgaattgttggagttaggccctgtttagttcccaaacaaaaactttttaccttgtcacatcgaatgtttggccacatgtatgtagtattaaatatagacaaaaaaaaaaactaacaaaaactttttaccttgtcacatcgaatgtttggccacatgtatgcagtattaaatatagacaaaaaaaaaactaactacacagatagcgtgtaaaattgtgagacaaatcttttaagcctaattgcaccataatttgataatatggtgctacagtaaatatttgctaattatggattaattaggcttaataaattcgtctcacagtttacaggtgtaatttttgttattagactacgtttaatacttcaaatatgtgtccgtatatccgatgtgacacgtaaaaacttttcacccctgaattaaaccaggctttaatcgcataattttattcaagtccaatgttttcgttcgggacagaaattaatctagaatttgattcaagggtgtgtctgcctgtctgggtcaatgccatagtctcaaccatgccccccaaaaataatactccctccgtcccaaaataagtgcagttttgcactgttcatgttcaacgtttgaccgttcgtcttatttaaaattttttttatgattagtatttttattgctattagatgataaaacatgaataatattttgtgtgactaaatatttttaaattttttataaatttttcaaataagacggatggtcaaacgttagtcacggatatccaccgctgtacttattttgagatggaggtagtaataggttcatttgcttcgttgctaaaagaattggcatatgccaatcttttgcaagtagaactgtgtttgtttccaagagttggtaacacagctgctgcgcacggaaaatggagcggtccattagcgcagcattaattaagtattagctattttttcaaaaatgaatcaatatgaatttttttaaataacgttcgcatagaaactttttgcaaaaaatgtaccatttagcagtttgaaaagcgtgctcgtggaatacgagagggatgagttgggaacccatagaaacgaactcagactttgaaccaactttgccaaaattttggcatcaaaccaaacaatcaactttaccaaaatcttttgtatggttgagaacggctaaaatccaaacaataccaaatcattagcaaaacaaagggtagatttcaatttgattaatcctaagatgcagacttcaccttatgagcatccttgcacattgtgctctagcttttcgatggataaagtgtgttgacttgcttagaccatgcttcattatctgttttaatgtcttttgaaattcgagaaggattctaaggcctagtttagatccctccataaaatttttcaccctatcacatcgaacgtttgaacacctgtatgctaaaaaaataaataattgcaaaggttgtgactaatttacgagacgaatctttaagcctaattactccatgatttgataatatggtgctacagtaaacatttgctaatgatggatttgttaggcttaataaatttgtctcttagtttataggcggaatctgtattattttgttattagactacgtttaatactccaaatgtatgtccatatatctgctgtgatacaccaaaatttttcacccctacaaataaacagagcctaagatgaactttaaattatgtttagcattgcatcgctccctcgagaattgggtagtgatttgagatagtaggaattaaagagatccgttctaactgttggacgggattaaaccgttattctagttttatccagtatgatgaggctgcctctgcacaccggaacaaaatagggaaattgctttgcgttacgatgaaatttgtacgattttagtacgatcctaccatgaatgatttttgattgggtgggaacaggttggatcccatattttcagcacacaccagagactacgaaggtccagttcttttctccaaaagagttgaagaatattaagattttcgtggcatactttttaaactgctaaacggtgtgtttcgcacgaaaactttctatctaaaagttactctaaaatatcatattaatctatttttcaagtttataataattaaaactcaatcaatcatacgttaataccacctcgttttgtgtaaaaaaattaatattcattttcatcttcaggagaaaagaacaccatcaaagtattgtactctgatcgtatgaagttttattgtacgtatagcaattaatatagcaattaatgctcactcttagcttttcatgatgcagcaactggaacttttgtactacctccgtcccaaaatacttgtcatttaaatttgttttataatattaaattgtttgtcttattaaaaaattatgaaattattacttattttgtttgtgattttatttattatcaaaagtattttaagtatgacttatattttttttatatttacattaatttttttaaataagacgaatgatcaaatgttgcatgcaaaaagtcaaagtgatcactaattttgaatggaggtagtactaaggattagcacacccaaaaaaatccatgcatgattgctcacaatagttcatcatctctatgtaaacctccatcgcagatcatatgtcagtctatgttatattttttccgtctcagaatatagccatctagtatgatatgggacgtatcctagtactacgaatctggataagaagtatccccaaattcataaaactaggatatgtcttatccgattctaggttactatgttatgggacggagggagtattgattttcagtttaacaaaagaaaaaaaatccactggagacgcgtgatttcatcgaaatttgtgaatcagagggagctgaagatgaagatgaaggtcacataattaattaatcgtgcgacagttcataagctataaagaatatgaaagatgttcatctcgccttcatcgattcgaatgtaattcatcatcaattcctctagcaaatatatccctccgatccatccatccatccctttcgcccatgttcatggattagtagttcacgggagcagttgagcgagtgctcgcatatgcctatatagtatgtgcacatatgcgattatgcgtgccctactaccatcctctccgcaaccaaacaacacaacacatgcatagattactccctacgtctgtccagacgtttttcttagtcaatttttttaagtttaatgtaagttatagaaaaaacatatactccattcgtttcaaaatatttgacaccgttgactttttagcacatgattgatcgttcgttttatttaaaaaaatttgtcaaatatgtaaaactatatgtgtatatgaaagtatatttatcaatgaatcaaatgacatgaaaagaataaataatcacttaaatttttttgaataagacgaatggtcaaacacgtactaaaaagtgaacggtgtcaaacattttaaaatggagggagtatatagaaacatttttagccctaaaacaaacatattattaaaatatatttaatgttagctaggtttaattaaaccagtttgatattataagatttactgtatttttctataaacttggttaaacttaatgaagtttaatttagaaaacaagttaaagcgaagagagaaatgctgctactactactgctctctcactctcgtgcatgcatgctcgtgattgcaaataattcgcaacgctacagtaatctcgtgtgccctatctcgttcgtatcaggcgtgcatccaaagcaggtgcagagactatctcagtcgtctgcttgttccctagctacccttgcaggtgccctcacccctcaggaataatctctctctctctttctctctctctctgcacaactaaaactatatatcccaatccatgatccagccattcatcatctgcatatatataatcgtcttcgtcgtcatgtagcaagcagcaggtagcttcacattctcttgtctcttgtactcaccgcatcctgcttggtcgctagctagctagcttagctaaccttagctacgaactaggagtacctttcagttcagatcagcttcttacctctcatcttgcattgctgcctaagagtaagagccagagatctgtactgactactgctacggcatcgagatcagatcattggcaatggatggccgccatcttctcctcctccatgtcctcgcgcttcttcttcttgcggtggtggtcgccgccggcggaggcgccgtcgtcggcagggacagcgcagtgcttcagctgcgcgagctgcaatggggctcgtccggccaggtccggtattcccaatcaaagcgctttgagaagaagatgacaggtaattacaagttactactccctccatttcatattataaatcgtttgtttttttcttggtcaaaattcttttgatttgagtaagtttatagtaaaattagtaacatttacaacaccaaattaattttattaaatttaatattgaatatattttgataatttgtttgttttatactggaaatgttagtatatttttttctacatattaacttagttaaatttaaacaagtttgattaagaaaaaaatcatacgacttgtaatatattacaaacggaataagtagttgctaaataatgtctgagcagcagttgaattatttgtggggtttggcttttaaggttagcttcagagagaagcccaaaattacagtgataatattctcattattttatgaacctgcaggcatctcatgtaatgctaggtactgagagttgagagagttagctgatccatctttctcattcactggagaattgtgtctcccctgttatcaacatcaatattacagtgttcaccgcagtcctaatttttttagagcgatagatatatcactgtagtgtgtattgtcaattcttttcaaaaattttcataaccatatttccgatgcatttgagagaaaattgtataagggaaagcagcatcctctcgggcgatataatccatcttgttttgagggctatattttactctgctttcttggtagccctgttacctaccaaaccttctccaattatgtattcgaattgtcccatacaagttaaagctacacacacttttttctgtaaattggcaagttgtaactttgccccctccctaatacaaggatatgcaagacttatgcgtattctcgaaaataatagtgtaagttaatttcgaattttatgtgttttcacaagaagttccattcggattcagtgtaccacatcttcgctccaaatttatttgggctgtacaaattccacctgaatttggcgttccctacaaaatatatttcatgttccgagtttttctaaagtagcttcaatttcatctttttataaatccatatgcagtacagtacgttcggttatggttaattttacaaccccaaaataaagaccatcaccaatccaccatgatcaatctagatcgtgtagagcccttcttttttatatatatattagacactaatattagttgcaaaaatataaaccaatattaaattacattactctgctttatactctatcctttttcaatgtatgatattgttgactttttaaaatacgtttaaccattcaacattaaaacattttatataattattatttattttattgtaacttgatttatcattgaatgttcttttagcatgatttaaatattttatatttgttcaaaaattttaaataagacaaatggtcaaacgttgtttaaaaaattaacggcatcaaattttttctacaatttcaaatattttcaataactctgcttcattttcttaaatcaggggaacacaagaaagcagcagcagcagcaagaacgaggactaggagcaccaccgtcctagagctgaagcaccactccctcaccgccatccccgaccaccccgccgcccaagaaacctacctccgccgcctcctcgccgccgacgaggcgcgtgccaactcgttgcagctccgcaacaaggcagcgttcacgcagtccggcaagaaggcgacggcggccgccgccgccgccgctggcgccgaggtccccctgacctccggcatccgcttccagacgctcaactacgtcaccaccatcgctctcggcggcggcggatcctcccgcgccggcgccggcaacctcaccgtcatcgtcgacaccggcagcgacctcacctgggtgcagtgcaagccgtgctccgtctgctacgcgcagcgcgacccgctgttcgacccgtccggctccgcctcctacgccgccgtcccctgcaatgcctccgcctgcgaagcctccctcaaggcggccaccggcgtgccgggatcctgcgccaccgtcggcggcggcggcggcggcgggaagagcgagaggtgctactactcgctggcctacggcgacgggtcgttcagccgcggcgtgctcgccacggacacggtcgcgctcggcggcgccagcgtcgacggcttcgtgttcggctgcgggctcagcaaccgcggcctgttcggcggcacggcggggctcatgggcctcggccggacggagctctcgctggtctcccagacggcgccccggttcggcggcgtcttctcctactgcctccccgccgccacctccggcgacgccgcgggctccctctccctcggcggcgacacctcctcctaccgcaacgccacgccggtgtcctacacccgcatgatcgccgacccggcgcagccgccgttctacttcatgaacgtgaccggcgcgtccgtcggcggcgccgcggtggccgcggcggggctcggtgccgccaacgtcctcctcgactccggcacggtgatcacgcgcctcgcgccgtcggtgtaccgcgccgtgcgcgccgagttcgcgcggcagttcggggcggagcgctacccggcggcgccgcccttctcgctgctcgacgcgtgctacaacctgaccgggcacgacgaggtgaaggtgccattgctgacgctgcgcctcgagggcggcgccgacatgaccgtcgacgctgccgggatgctgttcatggcgaggaaggatgggtcgcaggtgtgcttggccatggcgagcctctcattcgaagaccagacgcccattattggcaactaccagcagaagaacaagagggtagtgtatgacactgtgggctcaaggctaggctttgctgatgaggattgtagctatgcataattagtactattccctaactagaatttgaactgcaaatcaactgttgagtaaaaaacaagaaaaaactttgaaatggagatgatgagaaaatggtttgtttctctagtctgttaggctttgtaacgtaaactcttttatttttgggatgttagaaaaaagttgcacaggtgcggaacaagcggtcaccacaactctgctatgtaccataatgtaactccatgtctacctataaccaattaggacttacatattcgacacatatttttaatatgaaatgtggtaattttcttgatatgtgtgggaatttaattgattccttcaaaaatccttatgaaatttctgctttacaaagatctaaatctgttccagaaattcagcagctcctgaatttcatattggaacatgattttttttttgttggcataaggtataaaccacatctgccttatctaccgcagtctaagtatactaaatcacacacattcaggcatgtctactaacaaatttcagaaatctaaaacaccataatttggttcaggtgttacatctaaagcaatctgacagtaagtcacaaacatgagtatcagagacacctctcaaggaaaaacaaaaggcaaacaatggtttgtgcaacaacatccatctctacagccaacacagtttgcaagtccagagaaggtgttcttccgtttattccggaaaatatttggactcccaaattaagagccgatgtcgaatgtgtccatgccatgctccactataaacttcacctgggtagatgactcctttttgtatgtcgtgaaaagaagacacgcatccgaaacgggcattatatgatgccagaacatcatgactttaagtgattcaagggatgctgccttggatagaagaagcttgataaagctcatctcccctgggaagcacttgataaaagacagggtcacacgcttgagacttctaaccaaatcttcactcatatatgcttctagaatcccttcatgaatctcatcatctccctgtgcttctttcagatcaacctacaaaacatatataggtcaagtaaatgaaatgccaattataattttacaataggccaatctacaagaaaaaaaagcagtgttctatgctgtgaaggtattttaaaagtgacttgaagagatgcatccagtgttacctcaatattcagttgttcaatctgtggagcacaacgcagtaaagaaaagattgacatgatacttgagattttgccaaaatcaacgctcaagtttgaagtccttaagttccggaacttccatgtaattctctccaatggattttcatcgacctgaaaatcatgacaaatttaagttagactgatatatgatcatcaatgcaacttgatctacttgcttgcaaacagtgtatgagtaattggagtatcatactcctatagctgagctgaaattgaatctgcctacaggtaggatagaggacacacactcacacacacactcacacacacacacacaca

SEQ ID NO: 8924 - DNA, 30063 bp, Oryza sativa
aagtggagttatgaactagctggatggaggtgcttgcagcggcacagttggacaggagtaactcttaggagaaatgtgcattttctttggtttttggttcataggaaattagtaatggcatggcatcaaacttaaccattaatcaggtttttgcatattgttgcacctgaaatgtaacataatctatttatggatgctagtattatatggtgaatgggcatggtctataatgattacatggtgaagagacccctatcatatggtaaacacaaggatgcaagtactatgccatataagtacttatttatatcatgtagcattcactaagctatattagataaccattttctaatttacatccggtttcatcatggtgtggttccagcggtgaagggtttgctgtggaaatgaaatggcgatgggggtggaaacagggaaggacatggcgataggagcggaaaacggtggaggaaacaacgcacagaaggagaggaacggaatatgggtgcgatgaaacaatattcctcaaagggtggggtttagtgtcaatcttcttcccttccttcttgagtttcttcatgagcttgtagcctccactcttcttcttggatgacttgtctccatcatcatccttggaagggcacttggaagcaaagtgtcccttctcaccacactcaaagcacctcaagttggagatagtcttgttgggtcttttatttcttctcttattggagttggagccccttcctctctcctttcttcttcccaagagatcattgaaccttctagcaagaagggcaatctcttcctccaagatcatcaaaatagtcctcgatattggtatttttaaactcggaatcattgtcacttctaatttttacaagagtgcaactaaattcattttgggccctttttgtaaactttttgaaaagctcggcaacaatagacttatcatgcaaaaagaacacccaagtatagcgagaataatcatcaacaatcacaagacaatgactattaccaccaatgttcttataggttgttgggccaaacaaatccatatgcaagagctccaatggtctagatgtggacatgatatacttagtaggatgagagcatgcaacttgcttgacggcttgacgagcactacaaagtttatccttctcaaactccacatctttcaagcccacaactagatcacgttttgaatgtttgctcaattgattcatgccaacatgggctagcctcctatgccaaaaccaacccaatgaagtttttgtaactaaacaagttttcaaatttgctttactagaactgaaatcaaccaaataaagatttccatatctaaaacctttgaacacacaagacttgtcatggagactagaaagaataacctcttgcggaaagaaagcacatgacaaggcaatatcacaaatttgagcaaccaaaagcgaattgaaatttagagattcaacaagagagacattttcaattgacaaatcattggagatagcaatttaacctaacccaatcacctttcctttactattgtctctaaatgtcactttctcttgttcttttcctcctacttcaaatatggtgaacatagccctatcaccggtcatgtgttgaatgcatccactattaagcacccaatggctcccaccgatgcggtagttcacctacaagagaaaatcaagctcttttaggtacccaaacttgtttgggtccttggaggttagagaccaaagctttgggcacccaaatggcattctttttaccaccaagtataggggaacccacatatctagcaacaatactaccatcatgagccttcttaagcatataatgagaatcaaacatgcatgtcttggaaggcttactaccggggcaatcattcaccaaatgcccaacctcatgacacttggagcaatacttaccgttgctcttgacaaaacgagtgacacggtgagaaggtttcttacccttctttggaatgtatccaagtcccttattgttaaggatgcaccgttgctcactgaaaatcttgtcaagagtgttcttacccttgaagcacctctccaaactcttgttgagcttggccacttgctccttaagctcattgttctcaacaacaagtgaggcatcacaaatagaaacacaagagctatagctagagctaggcatatccataagatcatcacaagaggtagaaatgctagatgatgcaacatgaggaatatgactagaagcactatcatcaagcaagtcacaagatatgccaacatcaatgtgagctccatgttgagtagtggaaaggaggttatcatgagcttccttaatcttctcataagaaatggtgagtctctcatgagaagtctttagctcctcatacaagacctccaaagaagcatgatccttctctagggccttaaacttgacaatctccttttcactatacgcatggagcttctcaaacatactcacaagctcatcataggaaacatcatcacaatcatcgtcactctcactatcactaagagatgctaccttagaagagcccttagccatgagacaaagtggagcgaagagtgatggagcctccttgatggctacaacggccatcttcttcttcttggagcttgcatcatcaccaccttcttcttcggacccggatgaggcggagctctcctcatttgagttccattccccgatgaaggcctcaatcttcttcccttccttcttgagcttcttcatgagcttgtaacctccactcttctttttggatgacttgtctccatcattatccttggaagggcacttggaagcaaagtatcccttctcaccacactcaaagcacctcaagttagagagagtcttgttgggtcttttatttcttctcttattggagttggagccccttcctctctcctttcttcttcctaagagattattgaaccttctagcaagaagggcaatctcttcctccaagtcatcattgacttcattcaccttgctcttgcccttgtcttcaacttcggcttggagagcaatgcacttcttggatggtgaggcttcctccatctccttcttggatggtgaggcttcctccatctccatcggtgtaggttgccccaagccccttgagatcatccacgatgacattgagcctcccatacatgtcattcacactctcataaggcaacatggagaatgtctcatattggatcttgaggaaatgaagcttggcatccttgtactcacttgtgccctcatggatctccgccaacttgttccaaatctcatatgcggtctcaaggttgctcactctatcgaactcctcttggctcaaagagttgaacaaagcattcatggcttgagcattgagttggagattgcggtgatcaatctctgtcaagggcgtgccagtgatagcaaagcctacatccacaaaactccaaatatggaagctcatagctttgaggtgagtagacattttaattttccaagtagagtagttagtgctatggagcatgggtgtcttccctacatgtttcacctcgttcgacatcttctctctaggcggtgaagcccaaacaagagagaccaagctctgatatcacttgtaggatcgagatgtcgactagacggggggtgaataggcgatttaaaaactaattgacacctaatcaaaactaacctaagttgctaggctcggtgagggtcaagtctaactaagcaactaagttatgttttgcaaacctagggtgatagaggctcaattatatctctaggaaagtaaatcacactcctatgtcattgtttagcaaacctagggtgacatgatctcaagtatgtctctaggaatgtaaattgcacaaatgtaaatgcgacaatcaaatgagacaaggagacaagagatttttcaccgaggtttggaaactcgccggtttcctactccccgttgaggcgagcccaactccaccgctcaaccacaaagccaccgcacgcccccttcgtcaaggggtgggcaagacgggagccggcccacgaagaggactacccaagcctcgatcactcagggtagttcttccttcacttcgaaggtggtgaactccaaaccactcacaactggcgccgggcctcctccacaatcttctcggagaggtcaccgggcaactccttcacaaaccgtctaggaggaggcaatctccaagagtaacaagcgatgacctggctcggagatgatcaagtgccacactagctctacaatggaagcaatgcacttgactcttggctagaacaatctcaaccactacaacggatgaacactaagctcaaatgtgtgtgagagaggtgcaaggggtgtatgcaattgaattgggtgccaagagagcccccttgctgctagtgggggagtatttatactcccaccaaccaaaactagccgttgggggggtgaaatcccccaattttgtgtactcctctggtcagaccatgcgactctgcaacggctagaaaactagtcgttgtagccctgtcagagggccccatcggcctggccggtcagaccgacattgagtgtccggtcagaccggccttggctcggttagaccgcccttagctcggtttgaccgaatacggctccgtcggctctatatcggccaaccccgaggacaccatcccggcctccagggggccggtcagaccacccaagtgccgccggtcagaccggccttgtgcaccggtcagaccactcgcttggggccagtcagaccggccagggcacgccggtcagaccaccactatgtggccggtctgaccgcccctagtcaggccgaacacagtgaatgcaagtgtgtgttgaaaagtgagcacaagtctaaatgcaatgacctaatgtggcaattaaaatcatttctttgctaggtcattacccctcttaatagtacgacgaagctaagaataaactagcaaatttgatcgccctacacctcgatcaatttaaaactaaagcactagttttaccatcttcttttcttcgcttcacgccatcaattttaatccatcaataatcatccatgcgcactcatgatgtgaacctaactcaatataaatatctcaaagacaacggttagtccacaattagtgtttgtcattaattaccaaaattaacaacgggggcctagatgcttcagtctccctccacctccacgaattagcacttaatcctatatatatattcctctataaatttctatgtacaccctctagaacaattgggttttgtttagttgaattttgccaagtgctattcaccttgtctctagtcctcgctcaattagtcatgatcgactatagattcagagcccccaatagttggtgtgttgatttgccgggtcgattagatctaccacttcaatcgcaactattccttgtgcttattcacctattcgcaatatttagattgcatcttatattgttcttgcagtgttctcttgtctgcattgcaggggtcatcaaccgcacgtcacggttggtacgacatcgtttgtggtgtagcgattgcacggcgtcctggacttgttctggttggtagccacgccgcaaatgtcgcactcgatcaaagcgagagttatccccttaccagaagatcgggccatgagagagagcgtcatcagggtaagtcctacgttccctcggccctggcaatcttatcggctacattggtgttgttcaaggctgcatcgcttcgacctcttgaatcactctggttcagttgatatttttgcctacctatttatcatatatcttagttaatctaagtagatttttcaatttacttgtatcggtcagatctttttctagggttttgccgatatcagtgttggcggctgttaaatgtcgattctataccaccaacatctgcataaagttcaataataaaacatccaacatagtgatacgtgcttaatctcacatattccacaagtgttggtgtatatttgtatgtagatgataaatcctgaagttgggaggaaaatcagactaaagtgaggagaaacgtgtatccatacaaggatgggtggtgaacttcatagaaataccagagaatcagcccaaaacaccaaagaatggatataggaggaccaggagaggagccaggccaaaggccaggccaggccaggggggcctagcccaagttcggccgaaccccctggttcggccgaaccctggtgagcaccgttggatccaagttttggcatggacgctccagatcactccctgatggcggttgcggggcagttcggatatttccccttcgccaaccgtcatacctacctctatataaagacttcacttcactcacttcaacacacactttcaagcttgagctgaattataagaggctcaattgtactatattgtatactataataggaagagagtagagtagaagaagtcgaaagaattctggagttgtcggtaatcttctcttatttcttttattctgtttattactctgaaatattcttcctgaaaatcagtcaaaggcttgatgcttagtgctgcatcaattgggattgaccggggaaaaaacgtggaaacctcttgagagctctcgcgacctcctgggcgaaaaaagtcttcctctttccttccctctcagatccctctccctcctcgtctccagtggtttgccgccagtgacaagggggagggggtcgaaggccctctattctttgtagatccacagttaggttcatcctatagattgagttctctcgtagtagtatttcttttggttgtcgaggaggttgccggcaccaaccatcgtcgtcctagcgttatggtggtcgttgccggtggtttcatcggttctcgactagcatgctgctgggtttctcattatcgtcgccaactgggttgcagccagacccagtcaagacctggtatcgccggtcaccttggctatctccggcgtgcaagcaaagaagcgggcggcctcctgcttcttctccagcgatgtaaatttgtcaagcaactgtgttcgacaagacaaaccgatgaagcttcaacctcccctcattggaggccccatctttgtcccaatttttgggctagtctgggtatgcttcttggtttccttttgtagatgtttgtgttttatcctccatcgctggcaagattgagaagacttaattccagtcggtgttgttatgaggtgaagctgtgtttctctttgaggccccatttgggattgtgcagaggctccatcagttgcaactcgctgtggtcatgcttgtcaccgtcgacatcaactcctacagggcagctatgaaggtctatggaagaagaaggacttgattgcttttcttatcctagcttttgtccttctttgcaaaaacatgacttttatgtaaattatattttcccaaggggacatcctgtaaatctggcattgtatccagccttttaaagtaatatatcggaggctttagcctctttgtctcaaaaaaaaattgggtttgatctactaagtcatgcttagaaccatgatctctagtctgctttttgattgccaataaaggtttcatcggggttttagccgatgagttatctagacgttgcatcggcttataaggattacatacaagttagatttagccgatcgcaacaaatgttttactgtttatctaatcgtttggatttaacaacattggatctctagccgatgtatgcttcaaccttcagattaatgttttttcctttatatcattattagtcgattgatttctattggattatattattgttttattacattatcattagccaattgtctttatattgttatttacatcaagtatcattatatgcattggacatatagccgattgctcaaaaccctatcgacatcggctagtaccagcatcggttgaaattactccatcggattgtcagccgatcggctctttggtgttcaacatatttatccatcttgttaggtgcaagatcaaactgactagcacgctcgcatctcatcaatattttgaacctgtactggcgctaagcggatctcctaagctgttgtgttcatccacttagttcgcaccaagcatcatcggccgagagcggatttttcgtcaacacgttcctgagctcggccgggggcaccttacaggtggcagttggttggtaggggtggcacacacccgggcatagcacaggcgtgccaaggcgtgggtgcgcgagagtagcggcacgccaatttcggacgtgccaacactgttgtaggctgcgacatccaggcaaagcggcgagcgaggaagaagggaaggaaaggcgaccggattctcaccgagcagtagccgaggagtggcacaccgggcagcgacggagggaaaatgatggctgaagaagtttcggttggggactactgagctcgcgaatcgtccacactcccgcggcaaaacaacgatgaggtttgattggccgcagttcgtccgttgtcccatgcggctacggaatcatcgtaatcgtcgtgcgtgagcgattcatccacgtgatgctatttcttgcttgctccgactttagtgttgccatggagaggcaacccgaagtggcaattaaggatggctaggcaaaacggagtggtacgcgggtttgggtggcacggctccaagcatgtgcgaagtgttcgatcgggtgccatgagtagctgggtagactggcatgatggtgaaggtgatcgatgcaaaaggaggacaaaaaagagcttgcggtggcttttatagccctagcgcagggggggagtggtgatggcttctagttctaggcgaagggaagaggtggggtggtacaactgtacaagggagtgaggatggtgggtggtgcgacgtggatgagccccgctctcatgcgaacgcacaatgtcgcactgcaccaggcatggccaaggctacaaggtggtgtgcgggcatgtggcagcggtagggccacgatgctatgcgaaactgtggttgacgcgcgtgggcgtagtggaaaaaactggaccggaccggcgattcaactggaaccagagtttggcacggttcggtcgaatagaaagaccggacatgcaattgaaccgcttcagacaatcagaccgcttgaaccggccagttttgttatgaaccggacaataaaccgccttcggtcggactgggtcagtgaatgaatgggccgcacgacggcccatttatttgggccatacttgtctgctgttggcgattgttaaatgccaattctataccaccaacatccgcataaagttcggataataaaacatccaacataattataggtgcttaatctcacatattccacaagtgttggtatatatttgtatgcagatgataaaccctaagttgagaggaaaatcagactaaagtgaggagaaatgtgtatccctacaaggatgtgttgtgaacttcatcaaaataccagtgaatcagcccaaaactccgagaaatgaacataggagggtccagggagtccaccgaccgaaggccaggccaggagggcccaacccaggttcggccaaacccccctaatcaccgttgatcctggggtttggcatggacgctccagatgctctcctaatgacggttgcatggcagttcggacttttctccttctcacaaccgtcataactgccctataaatagacctcacttcactcaattcaacacacacttccaagcttgagctgaattataagaggctctatgtcacagcttgatttttttcattttaggatttataaattatttaataaattattaatagaatttatattaaatgttcattaatttacaagtgaagttaaatgtgggaaataaaatttcctaaatttaaagcatgaatggatttaaattttaataaattctccatgattaattatactctctgaaattttctcggatttttcagagctcaattcctaaatgatacaaagaacagttcagtaattagttaatcaattaatgagctaattataattatgttaagtgcttttcttgtttaaaaatccttaaattataaattgttgtttaaaaggaattattagaaatgatcttaaaagcctaaaagagaagatctaattttaatttgttaaatctcaatataaaagtgggctagataaaattttgttaaatacttctcttgtttctatagttcctagatatttctgggatttatttgagccaaggaagtatttttaatcaatggaatatcatttcatgaataatttaaatagaaaaaggttttaaaatctcccttttggctttgggccgaaagtcggcccaagtctctctctctccctctcctcggcctgcttgcgtccggcccagccggcccagtccgccgtccctccctcctctctctctcggtgccgacctgtcagtcgtcttcaacctccggccgctcctagccgcgccacaagccgccgatctccttccaaatccggccgcctccttccttctgcggccaaatcaattgaggggaaataatctccttgatctcccattccttttctctttaggaaacccgagctaattcgtttggaaatcgtcggattcaatgccgatttggttagtttctctttcgaaaccctaaaaccttccgtctcgccgccggtcgccgtgggcctccgtcgccgcctcctagcccctataaaaggatccccgggacctcctctatccgctgccaccttcgccctagcttgccgccttctctagcgccgcctccgcgtggttctttgcgtcgtcgccgccggcgggtgtccagtcgggcgccgccgtcgcttcggtcgtcgccgtcgatcgccgtctccttcttcagcatcgtgaggaggagcagcacctcgtccacccctccgttgccgccgtttcccgctagagcaccgccgtcaccgccgccccgaagaccgccgccgcttcaacctcaccgccgtcgtcatccgtcgtcgtttgccgtcgtccaagccgctggtaagttcgccgagccgagctctacgcgttggtgccctccgtttgcgccgcctcgccgccgttcgctgtcgagcatggggtgccgaagccgccgccggtgatgacgtcatcgtcgacgtcagcgcttcgtcagccgtagacccgtggtggaccggatcgatctcggctgtccgtttggcttagattagatctcggccgttggtttcgtagaccgtctctgtgaacccggtttaccgtggatcgtctttgatgacgcaataaatctcttttccttttcaaaaataattccttattgcgtcataattcaattaaaatccatataaatgctttaatccggtttaatctttaaaaattcataattaattcatatgaagtcagaatgaggccgttcaagtctcataattcatctaaaattatgatctgcatgtttgtttactttatatgtattgtttatctggtttattttagtctttttcctcattttgcgtgttagcttgtcgtttccgtcgtttcgaaggttcgcgagtgcgccggaagtgttcaagaagattaattgaagaccgaatattgcaaggcaagtcacacagatcccaaacacaattcctttgagcatgttgatcctatatttaaattctctatttatttcaactgtgcatttattttcgaatgtcaccgggtggtgtgaattattccttagtatggccaatttgcattgattactctattccttgataccttgggttattataatttgactagttggatttatatattggttcaactagatatattagatataattgcttagccatgcttagaaacattagcacacaattaggataactaatgttttactattacttaatgatggatatttaatgatagctcacgatggctaatcgtgattggttaattaattaatttgccaactaaaacttgataaaggtgggttgtgagcacatggttttgatggtcgtgctcatgacaattaaggaccggttcacgagtttcggttgtgaaacattaaccatgccaaccacaagccagaatggacaacggctggacactttgtataacaaggctcattgcggagcaccagactgagaagtggcggaaataagcccacggtgatcgctggggaatccatgccttgttttataagggggtgattatgatccaggaacggtgcactgctttgagttgagttatgcgaggggtcttgtcacaatcactcgccatggtgacgtgtctgcacggacatggtgacatgacggtgggttgtgtcttgtgggtacagtggtacacctctggccagagtaaaactattcgaatagccgtgcccgcggttatgggcgggtcgaacaatgtctttcgtgattagtcccacactactcattaataataatgtggtaattgatggtaattaatttagctcctggtttggaatggtacattcctggtttggagatagatctgtgcagccgggtacggttgttcaggatggttgggcctgtgcagcatgagtgtgcttttaaatgattgattaatattgatgattaattactctatcgttttagaattctcaaattgtttgctaaatgctgcttttgcaaatgagccctatattatgccatcctttggtattcttgtgcacttgcatatttgctgtatggcttgctgagtatgtcatatgctcaccttgcaataatcaatcaaatctcagttgaagacaagttgcgaaggagaaggcgtttggcttatagcccagttgagctgcctgtgagagtggagccggagcttcgctagaccgtaattccgttgcagttttcttttcttttgtaagtatgtaacgtattatattgatgaatctgtatattaaattgtcagtttgtgtacctcggctgattcctggacgaggatttaatgcacaaataagttcggaaattactagtgaatttctgggcgtgacactctattgtactatattgtttactagaataggaagagagtagagtagaagaagtcggaagaattccggagttgttggtaatcttcttctgtttcttttattctgtttattactctgaattcaatataacattctacctgagtaatttagatttatcttgtgagaattatctcttggttagttcctaagtagcatatgggattattgttcactataattaactaaaatatagtgattgctttggtgagttataaacactaaagtagatattaattgcttagacgtggtgtttaggtaattgttatccagtaattgttgcgtatcccacagtacgtttgaggtaggtgtagaggtggtgacagccctcaagatcacttaagtccttcctgtccggtacgtagtagagcgacatctgggaacagggggttgctagtgcctaaagtattgcattaggattacagttaagatttccctagacactgtttctcactagaaaattatctctatcctggcctatcatttgcttggtgtccttagatgaaccggaggaagatctgaccacacacgttcccttggattcgatacccttggaagtgctacatcggtatatccgtgcgcttgcggattttatctgtgatcgtaataaatgccaacatctgcaagcttaggcttgattttacccctggtcgattggttggaaggcaactcccatagccattctatcagccgaatgtatgagtcaatatggaaatacttatgttacatgtacttaatgaaccgcggttcaactggccggttcacattcggaccgtcagatcggtgaaccaggaggggtgaccgggtcatctaccggtccgggtttttccactatgagcgtgggtacgggaggttgggacaggcgacgtgatggtcggtgtccactggtcgcacgaatcccgtgcgagaacgactcggagatgagggcgggtgcggtgtgttgaacgagattgaccactgcgtcggctctttgtcgtctagcgcgcaacacatgggaggcggtgcgtgatgcgttggcaaccgagcctcgtacgtccatcgcgtcacggcactgttgtgcgcaggcctatgtcatatggcacgacatgcggggagaacaagggaggggcacggcgcgcggagctaggggtagtgacggctcggcgatacggctacgtttagggcgcggctcggcattttctgacggtgtcgaggtgcagtggatggggcggactctagcggcgagctcgctggcgatatgatggcaatgggctccatctggtacggcgacagtagcgagcgatagcgtcagggcttcggagggagagaggaatgagccgcggtgtcggctcggcttggtcgctagctaggtaagaggggcagtgctggtaggctgcgccggcctgggctgggcaaggtagggaagaaataaagagacgaggaaaaggaagtgttaagggaccaaacttttaagaaaaggcacattttgctataggacattgcaacttcgtggttttagctgtagaacaccgtgtgaagtgacttttggggaagacactctcaaatgttggatatttgctggtggacaccgcgctcattaaaaataataatttctggttgaataggagagagaaatcgcgtgaaatgtgaaaaatatccttgggcccaatgtcagctctcctatctctcttcttttctctctatattcctccttccagcgtcgcgcacgcctccacgactcgcacgcctccacgacatccaccgcttctccctcgcgggcttccacaggctttgcgtcgcccgcgccggaggtgcgacgagagtcgtagccgaacacactccgcacagcgtcgccgcgagccatcgtgccccgcctcgcctcgcagtgcgacactggacggaggaagatagagagagaaaagaagagagatatgagagtaggcccatgggtatttttgatatttcacgcgatttctctctccttttcaaccaaaaattataattttaatgagtgcggtgtccaccagcaaatatcaaacatttgagagtgtcttcccccaaaagtcacctcacgtggtatgctacagctaaaaccacgaagtcgtgatgtcctgtaactaaatttgccttaagaaaactgctaggctaggcccactagggagcaaagttagactttagctttaaaaacgtgaaattgattttctcaaataattttagtttacaaaggtttaaattaatatgttcatttatttgtaaaataattccttaaatgatattaattcatagaaatggctcttagtaaagtaattaatatttgcttttatttgcaaaatactttcttaaatggtattaatttataatctggctctttaaaaaaatattatttgaattccataaatagatttagaatttgaaatttaatttcttatttgattcaatttggcattggcataacatgaaaaaaaaatccaaagaataccagcactatggactttcaaatttttttattattccaaatttttgtttccatattttaaatcaaaaatgttcaaggtgttagagatattcatcttgtattcacaatatatttagattgcatcttctactcgtttgcttgtgtacttaatttgtttgcaacagatagctttattggggaggtcaatcgcgttttggcttggttgataacggataagtggtgtagtgattgggagaggtttgatcaatctggttggagcctttggattatcaacatcagtctccaaaatcgaccaatccaatacctattgtaagattaggacctaattcctcgtcataaagtatacttgcgtcgttacgcatgttagccgcggcctgtggtgcggcgcaccaacgcaataatgcaaaaatagctcaagagtctgctctctctttacaaaatgcgtacacagtcagtcctattaacatacaccctacatcaataagcaaatattcaactttcaacgagacatatttttttttaatatttgatatgttgatttttttcaggtgtttgaccattcaccttatttaaaaattacacaattaccttttattttatagtgacttgtttaatcattaaatatattatgagcatgacttatatttttgctttaaattttgaataagaaaaatcaatggcgtcaaacgttagaatcaggagggagcatattttattgtggcttttgatatctacatagaagtatgaaccttgagcatatatatatctcaacccatagacgtttcctgttgccacacgatctcaaaaaagctcaccatatttgtaaactacggacggtgacaacatgaaaaatgctcctgttagtatatactactagaaaaagtatttttcccggcgtaggggtcttttttcgcaggtggacatgacccttagaaccaaataaccatctacaaaaatataaatcagggtgaagttcgctctccgcctgcgagacgaatcttatgtggtcagcctacaaaaatcgtacctagcaaaaaaaaaaaatctttactccttatctcctcctcccaccctctccccatcactcatttctctatctccctcaacacttctcctcccggcctcccctccacacctctcctctcaccggcctctcccctcccctcacctctcctgctctccccggccgccggccggaggcggcggcggctaccggcggtggcggcgtgtgctcccagtggcagcggctgcgggcggtggcggtggagggcggcagcggcaaggagggttgaggcggcgcggctcccggcccctccctcccagatctggccggaggagggcggggggagagcagtggccggcgggccggcccctccctcccaaatctggccggaggggggcgggagagggcggtagccggcggagctcccctccctctatcgtcagacatggcggcggcggcggcgaggagggttgaggtgcggcggcggcagcggcggatgacggcagggcgcggcagcgggcgaaggccccagcccctctctccctcctggcggcgatggggcggacgacggcggggcgcggccgtgaggcgacggtggcggacgatggctcccggcccctccctccctcccgttgatgtgagagtttttgctgatgaagatggatgagctatatgtataaagtgattttaggaatgattttacatgtgattttgttttctttctttgcttgaattgattcttgtgaaactgaaatatggctggtgcatgtgaaactgaattttggatgaactggtgacttctctgttgcttctctgttggatttggattcactggattagatggggaatgggtaggaactgtattaggaacggatagggaatgggtgggaactgtattaggaacgggaagctaccaccagaaacggcaatagctgcccatatttttttagcgttggaagctatttttgcaggcggatcagttacacgtctgcgaaaatcaaatatttttacagtcgttaagttgcaggccgcttgcccgcctgcgaaatggtgattggcccgcctggaaaaacactttttccagtagtgctcctgttagcatctagcatcgcagcatcttttatactctagaacattgacaacagatatatccattaataagactctatagctaggttaacatgacaaggtaaaaagagagaaatttgtagcctgcatatccacaactcccttgatcgagtatcgtaccaaatcagcctgccattcaaaaataccaccacatgctatatcagtgtaaacatctagaaaatcgtagtgtcccacaaacaaagtctgatactccatcgactagcttctttatgtacaactctctgccttctcgagaaggaaaacaagcagctggttgcacaagaacagcctcatctagaatctagacagtatagcaagttccgaagtatttcttccataatacgaaggcagcatcaacagcaggatgtgtctgacttatcagtagtctattatcagttttgatgtcaacacaacttgggagtgaagccttttggcactccattaattctccccatgcatttccataccattcgttgctttcatcgtcacagacgaaagtgacatcaaatgtttgaagagatcttgctttggatagtaaatgcttcataaagcacatttgatttgagttgtccttcaccttgacttcagtcagggaaacatatttgaggcttgcaaacaagtagctgcttatctcagaattcaggaagtattcataaatctcatcttcagaactcagggagtcttcatcaatctcatcttctgaattcagggggtcttcgtcaatctcatcttcggaattcagagggtcttcatcaatctcatcttcatcccattctgaataagcaatctacaaaacaagggtaaaattttaattaactcacttgaccaagagatgtctttaaattgtaacatatcagttgaaggtgtgaatctaatattaccgaaatgcaaaggtgttcaatgtgcggagcaaacttcagtaaagaagctaacgatagaacatttgagcgttggccaaaatctatggtcaggcgggcttcccttatgttctcaaacttgcaagtaattccctccagcatattaatgttgaactgaaaatcataagaacatagttaggcctgacatatgtccatggtgcaagtttgcatcgacctactaatctaagcaaacattcaaatattacaccatgatcctgtagttagaaaggttcttgaagcttcattttcagaacctaagagccatattgtcagcaatgttgggatttgtataggagtacatgtcttcaattcacatttgccaaaacacgacataccatctctacaatctccgagtttcacattgaccaattcagtcaaactgtaattaagttgtcaaaatactactttctatccaaaaacaagttagatcatcccaacagccttactctgagcaatcaaggtgaactagaagcagtaaaagaattgtcctccgacaactatcacaaccaaaatttaggagagagatcagtccttctcagaaaatgatgatgaatacaccttttgttctgagaaggagtattcatcatcatcaaggccatgacgcaaggtacttcacgccagtctgaaaatagtcagttcagggaaatgactcgtgagctactatagcagtcaggtgcggatccaagaacaaaaaattaggggggctcaattacacaatttcttcaacctacagcaatctagagatctttagtttatcattcatggtgaaaaaattgaaggggtgctccagggggtattcatgagtcttgtgggtgtagggggcacacgagtcccccctgcacccacgttggatccgcccctgatagcagttgcagtgttactgtgttagtgagtgaaactcagtggaaatgcagaacatactacatatatacaagacataaatgagatcagcagtgcccccaatcaagtctgcaaattacctgtgtaaatgaggtaactaaaattcataaatgtggatgaacatgtacatgggattcacaagcagacaatgaggcaagcaaagataggcgtgtaatgaaaattgggatccaacgaggtattcaaatggtttgacgtcgtaacttatcactgatgaaacagagcttattgacagtagaaatattctggaaagcatcgaggaagtcttgggttccgaagaggcgatcgaatgagatggtcgcctcctccagcatggggagcggcattggtattcggcagccgttgtcgtcacccatcgccatggtgatgaagagttcccggagtttgggcgctctgatggcccacgtgtccacgccgccgccggtggtggtgatcacgagtgacaacttgagcacggcgagtttctccgccgcgacgatgaggtgttcgagctgcgtgccggcaccggcgaacgggagggtgacatacacgaggtcgaggcgctcgaggttggggaagcccggaaagcccggcggcgccgccggcatgtcgcattgctcgaggtcgaggcggacgagtgcggcgcaggagaagagggcgggtccgggaaggcggcacggcttacggcctaacgagaactccaggctgagatcctggacgcccttccgcgccatggcgcggagccagcgggcggctcggaagacgtcgcggcgggcgacgcgggcgcggaagccgcggacgggccgcgcgcaccgccacagggcgcggccgccgccggagtaggcacggggcagctcgatctcgaggttcttgatcgactcccagcggcggcgctacgcgcgggagaggcaggaggtgcggaccagcttgtggaaggggagcagcacgaggatgcggtcgtcgaggatgtccgacgggagcgccatcagcatgtccgtcctgggcggcggcggcggcggtggcgcctgggccggcagtcgctggcgcttgggggaggacggggaggaggaggagcccgaggtcgccattgttttggaggtggaggtggaggtggaggtggcttgctgacgacgctatgatccaacggccttcttcttgaaccttccccaagatattttatagggtcagccaacgagttggaggataaaatcgagctagccatgtttagttaccaaaaacttttcacaaaaatatcacatcgaatctttaaacacatatataaagtattaaatatagataaaacgagaaactaattgcacagtctacaaatcttttgagtctaattagtccataattagctataagtgctacagtaacctacatgtgctaatgacagcttaattaggcttaaaagattcgtctcgcagtttccaagcgagttatgaaattagtttttttcattcgtgttcgaaaaccccttccgacatctggtcaaacgtccgatgtgacacaagaaattttcatttcaccaactaaataggccctatgttgtgttttactattgcgttttacttcccacgaaaggaagctacgaaatgtgaatgtaccccgctgaaatggttctcttcttttcctttgattatgtaagtgtagctatttgcgatgtgagtgtagctcaactgattagaatacttgtggtggaatcaacccacccaagttcaagtcctatactttacacgggtgctcacattatggctaatattcttttggtggtagacgatatgacacgggtgctagctcacatttatggctaatattctttatgaggtgtctgtgatgattacgggcagatcgagcgcacggcgtggtgcttgcttgccgacgtcgacgctgtggcggcggagcgagacggtgatgtgggcgctgtcgtagagcacaaagagaccgcgcacggctgcacacaaatcaccatttcggacttgcctccctactgcctcgggaggtcttggtatcctgaatcttgaaaagttcgcaagggctatttgattgcgatggctcttgcacgaatagaagtcgccggaaaaggctttggtggggtcagaaacaccttgtaatgaaactgacaagctactgtttgcagtggcaacaacaatacaaattggagatggagcgaaagtgaagttctaggagttggcttggcttcaagggagaagattgaaggatgtcgcaccactagtccacgcgacctctaggaaaaagagcaggaccctcaaacatgccgctttagcagatcaatggctgcacgaccttgctctaccaacaaacgaaggatggacaatggatctgattgaccagctcatcaccgtttggagtgccgttcggaatgtacacttcatggaacatgaagaccagatcacctggaagctcaacaaccatggcgaatacacggccacctcagcctataaggcgcagctcctaggtacaacaacatcgtcgaattttgacacattgatatggaggccttgggcaccgcgcaagtgcaagacctttgcctggctgaaactccaaaacatagtgtggacattagacagactagcaaccagaggctggcccaacggatccacatgccttttatgtcgccagactcaagagacagctctccacctgctagcggaatgtagatacacaagaagaatccagaatgaaatcgtgcaatggacaggcaatgaccatctaagaccttctagctggcaaatatctttgacggtacatgagtggtgggaggccaccgtaagcatacgggaaacacctaagaaggcactacgcacgttaaccttgcttgttaattgggagatatggaacgaaaggaactggaggactttccagcataaagagttgccggcgccaactctgctagccaagataaaggaggaagcaaaaacatggggttggtgggcacagaaaatctcaccacttagttgacaacgtaactacctataattggtttttgtttttttttcgtacattatcctttcttacagttttcgtctcctctatccaatgaaattgggggcctcattgattcgttaaaaaaatggaggacttgattagttggttaggattaagtacatcacgggaaggatcgagaataaaggaggcgatcgatggactgatctggagacgacggtgaggggcgaagaagcggaggtagacgaggtaggcgacgatgatatcgaggggaaggccgacgacgaagccgaggaggtttcacgcccagaaattcccgaatagaattccaagcagaatgtgcattaaaacccccgtccaggaccggccagggtacacaaacgacaaagttgacatacagatccacgtcttacaaacatcataaaagtcttacataaatgcagcggaaaattaaaagataactggagctaagccttgacttggactgcagtgggaacaccactccacaggaatcctcgatggcacggacgaagcctactcctcggagaacccaccatctgacacgtactcaaactctgggggttttggggaaaatagagtaagactgagtacaactaccgtactcagcaagtcataccggaatagagggtatgatgtagggtataatcaaagaatagctagagcggttcatttgcataaagcgagcatttaaagacggtagttgaaagcagtaaaacagttgtaataattactcaatattaaccatccactgtccagcgctacaccacgttgtaacaggcccaaccatccacctgaactaatcaattccattagactagactagggtgagactaatcacagtgaatctggttgaccgcccataaccgcgggtacggctattcgaatagttttactctgatcagaggtgtacaactgtacccacaagacacagccccacgacacgtttccgtgcgccgacatgccaccacgacataccggaaagaggccgtgacaggacccttcgcataaccacctctagccaagcacaccacacctcaggtttcacccccgtccccagcgggcaacgggcagtcccctctcgtgcctaggtgaatccggaagcgacagaggccgtcaaagggcccgccccacttcatcacgcccacccttgcctggatgcgtcaactagaggaaaactacactacaagcccagccgttgcccacgctggcttgtggtaagtacgaggaattcttccagggtttcccgcgaaccggtccttaagtgccatgggcgcgaccatcacaaccatgcacccatatcccaccatatggtatattttaattgactaacaccagaacggtggctttaatccaacaccaacactagaacctgaagtctatgcattaatgtgatttcccccatggtgcgctagttgaactaagcatggccaagcaatccctagtccaatctctagtcatgttatatcctaggctaacaaaggagcatggtacaaaagtagcatggctgtaacagtaggtaaacatcccatagtatcattataaagcaatgcagtatttaagggaaaacggtagagcatttgtaatataggatcaacatgttcaagtgacaagcatgacttgccttgctctgctgctggaggaacctcggcgactatttcaaagtacaccagagcgttgggagagccggaatctaagtgacatataaagaaaacaatacaaacaggctataagactactgaaacagataacaaaaccatttttaatggattctatgcatttttcttgatttactgagacttgaatgggctcaaacggagctcggatgaattagatatgaattttagaagattcattgtgtttttactataaacagaaaaatccttaattgatttattgcgcaataattaaaatcccggggagagatagggcggcgccgacatgcgggccccacatggcagtgactcgggggggggggggtctgcggtggaacgggtccacggactggggaaggagcggcgcaccacgtggtgcatacgtggcggccacgtggcagccacgcgggcggcggggttggacggcctcgatctaccctcgggtagatcaggcgggtagatcggacggcggcaggagcgcgtggccggcgcgcacgggcggctcaagccggcccggcagccatggcgcacggcggcgcggctcaacgcagcggcggcgcaaggcagcgaccggcggcgaccggccggcggcggagggcagcggtggcgcggacggcgacagtggctgctaagcggcgcgggagagagggaggaaggggaggaggtggctcaccgacggcgattgacgacggcgagcgacggagcgcgacgacggtagcgggacgagctccggaatcacctagcgaacacgaagaaaggggttagagagagaggaagatggaagagggcgaggacgccggccaaaggtggtggccagggcggagctcaccggcgcgcggtgtgaacggggttcccgcggctgaaagcggcggcggaaaggcggacggcgtggccctcgggcttgcgaacccgatggcggtgtcggcgcggctcggcgcggtggctagcggctaccggagcggcggcggtggcagcggcggagaggagggcgaaggcgctagggcgatagaaggcacgagagagctcggcgaaatggagaaaaagagagaggggagagcggggatgcttaaataggggagagggggctcggacgtggccgggagcggcccgatttcgtcggagtagtggggagggggtgagagggcatggccggcgggattaaaattgaattcccggccgtttcggcgcgggcgcggccggggaagagagggagtgggcgcagggaaggcgggcgcaggtggcgacgtgggcgacgacgtgggcaacgtggcccggaaggcacgggagcgagggggcggcggcggttgcgggacgcgcggcaacggctggaggttgggggaggacccgacaggtgggccccacctgtcggcgacctcgggagagaggagggggggctcgggcggccggctgggccgttgtcccgcccagaaattctcgaaccagaatttctaagctgaatgtgcattaaatccctgtccaggaccagccagggtacacaaacgacaattgttgacataccgacccacgtcttacaaaaaaaaataaaagattacaaatgcagcgggaaagattaaagcgagctaaaccgggaagcttgacttcagcagcgggcgactacactccacaggcaaaccttgacggcagcaacgacaccaacctctctgagacggctccaactgagaagaacttcaactctggggtgggggaaaagagagcaagactgagtactacccactgtacttagcaagtcatatcggaagaggagatatgatgcaggatataaccaaaggaagctaggggttcttttgcataaagcaggcatttcaaagcagtagttgaaagcagtaaaacagctgtagtaattaatcaatattaaccaatcactgtccaacgctacaccacgttgcaacaggcccaaccaaccacctgaactacactagttcattaagctaaactagggatgagactaatcacggtgaatctggttgatcgcccataaccgcgggcacggctattcgaatagttttactctggccagaggtgtacaactgtacccacaagacatgattccacacatgtcgccatgccccgaagtatcaccatgatactgcaaagggggaaatcgtgacaagaccctccacataaccctcccctaaccatccacaccacgctaaggtttcacccccacccctcaaaaggcagtgggcggtcccctcttgcgccgcggtgaatccggcagctggacaaccgaacacctcggccgacccaactccatcacgcccaccctcgccaccggtgcctaggaaagggtcgagctatacttcagatcaagcagttacccactcccgcttgtggtgagcacggtaagtctcccagggtttcccgtgaaccggtccttaactgccatgggtgcgaccagcaaaaccatgcactcacagcccgccattcagaatattttaattaactgacacccttgcggtggcaccaatcttaagctatgccaatagtcagagtctacgtaataatgtgatccccatttgtgtactagttgaactaagcatggctaagcatttcctaagccaacatctagtcattttgatacccaagttatcaatggcataaggtaaccaatatgtggctgaggaataggacccatcccacattacattgtaaaagaatgcaacatttaatagaaatgcgggatatttgtaaattgggtacaatatgatcaaacgtattgcatgacttgccttcctctcgaactgatgagacctcagcaacgtcttcgagaaaccgcggatcgacgaaacggccgaaacctacgcgacaaacaaagcacacaagcaaaacatgctataagactactgaaacaggaaacaaaaccatttttaatggattctttgcatttttcttgatttactgagacttggatggacttaaacggagctcggatgaattacttatgaattttagaagataaactgtgtttttactaataaagaaaaagtccttaattaattattgcgcaataatacccaggactgacgtcagcgaaggggggggggcggcgccgacaggcggggcccacgggtcagcggctcaaaggggagaggaagggggtgccggcaagcggggcccgcatgtcagcggctcaaggcggccggtccacgggaccaagggtctggatcggcccaagccgatcggacggtgcagggagcagccaccgggctcggcctcggcttcaagccggccggcaagcatggcgaacggcggcggcatgcggtcgccggcgacggcaaccggcggcgtgggaggcggcggcgggcggcgcgaaaagcggcggcagcggccgaaggcgacggcgcacgcgcgaaggacggcggcgcacacgggagagagggaaaaaggggagcagaggggagcctcaccggcgagcacggcgaccagagcggaggatgaaaggcggcggtgacccggcgacgaggaggggcggacgggcggaggcgacacctataggaaaggaggagagggattaggggtggagaggacgaccgcaacgaccaaagtggccggccggagatggatgaaaaaggagagctcaccggcgagcgagggaaatggggcttcgggggtgattggcggcaaccaagcggcggccgaggagcggacggcacccgcgagcgcgacgacggcggcttcacggcgcggcagcggctctagcggcggtggcgcgcggccgaagacggcggtaggcggcggcgcaaggggcgagcggcgcggcgacgataggaagcacgggagggcgcggcgagtgcgaacaacgagagagggggacgtggggagtgatttataggtgcgggagggggcggacatggccggggtggtggccgatttggccggcgacgtgggggtggagagagagagagaatgggggggattcaaattcgaatcccgccccttgcgagcgcgcgcgagggccgggagatgcgggggagaggacggcgacgtggggaggacgcgggagcggcgcggcgtgggcgcgggaggagcgaagaagccggcggcgcggacggtttcggcggcggttgccgtcgtggggcgggcggctggaggaaggggaagacctgacaggtgggccccacctgtcagcgtcccggagagaggggagggagggaggacttcggggaggggaaaggggaacgggccggcccagaggaaggaggccgagcgcgggaagagagatgggccgacggcccatctagagaaaaaggaaggaaaagaaaaagaaaaagaagaaaggatttttcctgggatttaaaattgcactttggtgatttttaattggttaaaattatttccaaggctctgataattccactaaaaatcttgttaatgcattagagcatggggaactcaagaaaaattccaccacgctatttccgattattaattgcatttattaactagggatttagctctaggttaattaagataatttcttcgggcaatttatttatccaatttttaaagcaagaaaaaggggaaacttctgggcgtgacagccgtggccttcggctggcccagtggggaggggaggaaaatgggctggcggccaattaggaaaaaggagggaaaaaggaaaaagaaaagggaaatgaattttcagggattaaatattgcttgtgctcaattttaattggttaaaattatttctagagctctgaaaattccactaaaaatcttgttagcatatttcgacatgtagaactcacgaaaaattccatatgccaattccgattattatttgtattaatttattaggatttctctcatgcttttacaccgatatttttttagttgatttataaatctaatttaggcttgggaaaagaactttcagggtgtgacaggaggccaccgacgagccccatcccgcccactcgcacgaatgcagaagcgtccgcggataaagaaatggccggccagcgagctcgagctcctcttcctcagagacatcgcgcgaggcgggagctagcaatgcgccaaagcttagtttattgggaggtagcggagaaccagacacggcagagacaacggcatgggcggcttagcttatatgggtcgtggttgcggccgcgcaccgccgtggcaaaaatccgcggaaatatttgcgtttccagcctcgccacggcgttgcccatctttggccgccgcggggctgccgccgtgcttccccgctacagccgctgctgcctgctttcgcggcgccaccctcctcctctcccgcctcgccccgttgatcggcctacggcagagaagactgaaagagagaggaaggaagagagatgacgtggcatcctgatatgttgggtctacgtggatcctatgctaactcagccgccacgtcggacaaaacccatgtcaaaaccaccaaaaaacctattatgatcggttttgattagttaagagatgcccagatacgattttgataaattgagggatgtttggtgtactttttcctcctactaatgtcccaaatcttcgcgttgtccccactccccacgcgagaacttcccggcgcgccaagttaccgtcattgcactccgactcccgatttttggtttcgatctggtcgcatcgcaccgcctcgccctacataaaaggccgcgcccctctcgatcccctctcccatttcccaccccgccgcgcctcgctcgatctaccgcctccgatccgcttcttcttcttcttctcccccgcgatctcgtgctctgatggcgatggcgatggcggcgtcctcctgcgcgtcctgctccgccgccgcggattctttctcctcatcggcgtcctcctgctgctgctgcggctcctcgcggattcaggtacgtggtgatgcccctttcttgttcttcttgcaggagctaggtgtcggtagcggcggcgaggggtgcttctgctgtgcttcgtctccggggtacacgccgtcga

SEQ ID NO: 8925 - DNA, 17224 bp, Oryza sativa
atatttgtgcttcaagaaataaggccaaacttttcacgaataatcatcaacgatagtcatcatgtactgagcacctctaaaagatgtcttacgagcaggcccccataaatcagaatgcacataatcaagaataccttcagtagtatgtgtagatgtattgaacttcaccctcttatgcttgcaaaagatgcaatgctcacaaaatttgagcttcgtgatgctttgtccatctagcaatcctcgcttgctcaattttgccaaaccaatttcactcatatgcccaagacgcatatgccaaagattagtagcatcggaattagataatgaatcagaaactgtagcaacattacctaatatagttgtacctcgcagatggtacaggttggcagatttaatatcagctttcatcacaacaagagagcctttaattaccttcaaaattccgtctccaccggaatatttgtaccctttgcaatcaagagtacataaagagatgagacttctcttcaaatttggaatatgtcgcacatctgacaatgttctgatacagccatcaaacatcttgatctgaactgttccaatacctgcaacctcacatggtgtatcatcacccatcaaaacagtaccaccttgaacaacttcataagtggcaaaccaatccctattcgggcacatgtgataggtgcatgcagtatcaagaatccactggtcactagtttgtgcacaaccagcataagcaacaagtaattctacatcagacttctcatcagtaacaactgcggctttaccttcctcttctttcttaccttttggtacatattttccggttctcttgtctttgtcctgcagcttccaacactcagagatatcatgtccatctctcttgcagtatttgcatgacttatacctgtctctggattttgatctcccacggtagctacttgagcttttatctcttgattggttctttgtgttcttctcctgttgcatgccccgaacaaccaagccttctgcttgtgaatttgaaccttcagagggtaccatcttcttcatcttttctttggcatgcagagcatcataaacttctttcaaagttagagtatcacggctataaagaatagtatccctgaagtttgcatatgagctaggcaatgaacacaatagaataaggcctaaatcctcttcatcatactttacctcatagactcaaggtcaacaacaatttctttgaaagcggagagatagtccatcatagacccatcatcttgtaacttgtgcaaaaataatttttgcttcaggtgcatcttactggtcagatccttagtcatgcatatctgttccagcttcaaccacagcccagcggctgtctcctccttaagcacctcctgcaaaatattgttagatagatgaagatgaatatatgacatagccttacgatcccttttcttctcatcgttggaccaatcctgtgtcctcttgtcaaatccagaaagcgcatcatcgaggtcttgttgtgcaagaacggctcgcatcttcacttgccaaagtgagaatcttgtgtctcgatccaggagcggtagatcatacttcaaactcgccatgggaattaatcctgaaatttgctagaaagaaattagggtaaacctagcaaaaacgcgaaacctgggtgcacttcctgtgtgcacttcctgtgtgcacaaagcgaagtatgtagatttcctggtacacaagctttggtgcgcttagcaaaaaaaaatcgccaagaaattccttctcaacaggaacgatgtagtccctgacttcctcgggtcgcgtgccctacagttgcagtaggccggccctttttcctcctcacggctgtgcggttgctgcagcttctgcttttctcgcgcgggtgtgtgaggacggcgcgactcggactcgacggggtactgcaccgaacagattgattcggcgacgacgaaagcgaaacaggcggcggcggcggtgtggtgtagattgatctccaatgctctgataccacttgttatgaaaatagatgtataacggagacacgaattttacgtggaaaacccttgcggaaaaaaaccacgggcgctgaccggcaatgatcactgtagagtaaatgattacaaacatagggaaataacaatgggaacgtcaccccttcccgtacggcttacaagagtatatatagaggataatagaaagacacctaataggatatacatgaagtcttactaggaaactaatccgaatatattgtgggcccaaaattcggatcacatatttaacacctcgcgtggtggcgatggcttcctgaggagtgaggacgctacgcgacagtggccaccttcttctggaagctttggaccgcgggataaatgggctgaatttcactatgtgggctgctacgtcaccggtagattcaacatctgacccattcattttttgtattgtgcagccaacacaaacagtaagttgagtctacagttgcagcagcaacggctgcatacagtggctgtaccagccagccgaacaggtccattatcgattggaaatcaggacagaattcccatagcatatatactacgaggtgtctaggtgtataactaattttttgcgtgggtttgaaagtcaaattcgtgagaatcacgtagaatctctatattccaaaagatcccttcatgggtgacgaaatgccaatttactcccttcccttaatattacaagtcattttgtcttttcttaagtcaaaattgttgaaaatttgatcaagtttacataaacatataacgacacttataacactaaattactaaatcagtttataccccgcacatgattagtttaggccacgctgcccaaccacccaaaaaaaacatgattcagcttgagcttaaaaaaaagaagatttggagagagagacaatatattttaaaaaaaatgatatcgcgttggggattgaagacgggacctcgggcttaaaataacacaccccttaccacttcaaatgctaatacagtctccgatcaaatatacattggtgccaaccgtgcacaaatcatttgaacgaagccttttgattcatacataagaatctgaaccttgaggtgccccgtaagctgatctaaaatagcaccctggcatctgttgcaacacgattttcagaaaaacctcagaaaattttgaaccctgattgtcgacaacattcagttatgtcacttcaaatgctgttttatactcgttccgtttctaaatatttgatgccgttgatttttttaaatatgtttgaccgttcgtcttatgcaaaaaaaatttaagtaattattaattttttttcctatcatttgattcattgttaaatatacttatatgtatacatatagttttacatattttacaaaagtttttgaataagatgaaaatatcaaacgtgctaaaaagtcaacggtgtcaaatatttagaaacggagcgagtatatattttgaaccaaatcgtcaaacgtgaaaagtgctcctgctagtacccagtattaattgcaacatccttcaaaactctaggatacattgacagcatttgaagatcaaggaaaaaaagagacgcaaacatttctagcaaggcatattcacagctctctttcatcatgctaaatcagcctgtcattcaaaaataccaaaatgctaaatcagtgtcagcctgtcaccaaattatagtgttcaactcaaaaaaccgtccactgatacagtgaaattctatgcattctgccaacagaaggaaaagtagcagctgtatgtacaacagccacatctagaatgtaacagatcaaagttcaaaagctatgcttccataacagaaaggtggacatggcaaggacaagaggtacaacactctgtaattcctcaagaaggaaaacaagcagctggttgcacaagaacagcctcatctagaatctaaacagtagcaagttccgaagtatttcttccataatgcgaaggcagcatcaaaaaggacaggatgtctaacttacgatccgtcttgtgtcacttttgctgtcaacaaaagttggggtgaagccttttggcactcgattaactctttgcatttattttcaaaccattcgctctttccatcatcatcaaacataaaagtgacagcaaatgtttgaagagagcctgctttggacagtaaaaacttcataaagcacatttgattttcgcggtgcttggcaccagtcagggacacatgtttgaggcttgcaaacaagtcactgcttatctctgaatttagggagtcttcatcaatcttttctttatccaattctgtatcaagagtctacaaaacaaggccaagtttcaattaactcaattgaccaagagatgtctttaaattgaacatagcagttgaaggtgtgaatctaacattacctgaatttcaaggtgctcaatatgcggagcaaacttcagtaaagaatctattgatagaacacttgagagttggccaaaatctatgttcaggctggcttccctcagattctcaaacttgcatgtaattccctccagcatattaatgctgaactgaaagtcataagaacattgttaggcctgacatatgtccatgacgcaagtttacattgagccactaaccaaagaaatatgcaaatattaggacaccatgatcttgtagttacgaaggttcttcttggaccttcattttcagaacctaagaagccatattgtcataaatgttggcatttgcatcagagtacatgtgtttaaatcacatctgccaaaacacgacataccatctctacaagctaactagtttcacattcatcaattcagtcaaattgtaattaagttgctcgcaatgaccaatctattatctatctatctattatatactaaaagtccattaaactccctataaacgctctcaagctgccacgtggctccctcaaaacgctctcatattgccacgtggcactctaatataatagagaaatctgaccatcgattttcatttaaatcggtggacccattattttacatcgttagatctattttaaaaaccaaaaacctcccaccggccccaccacctctgtgcagtacgcacgtactgctccatctgtttagtactttttttttcgtttgttcctttcttttctttttccaatcctaattaaaattgaacctatctttatagaaaagaatacccccacaaatagacatcaaatgcgttaaaatccattaaatatcatataaatgtttctaaccgttgtgtgccactcttaaattagagaaacgtccaaccattggttttcactagaatcgatggacacattattttacgtcgttattagatctgtatattaactaaaagtccataaaactttctatgaacactcctaagtcgccacgtggcatcctagaaacgctcttaagccgccacatgccactccaatatataaccgttgatttcattatatttgatggacccattatttacaaccattaaatttatcttatagaaaaagttaaccacccaaacctaaccccacccagcgtacgtacttatatctcatatacaactacctactatatatgaaaataataataatatacctcatgtattattattattattacaccaccctcttcctagattaactcttccttctcatattttttacgctttattagttagaaagaaaaatcttctattatatactaaaagttcattaaacttcctacgaacgctcctaaattaccatgtggcatcctacaaaacgtttctaaaccgctacgtggcgttctaataaatcggtggatccgctatttgtttaataaattgctagactcactattttcaactattatatttatctttataaaaaaaatatcccacaacccaccccttctctcctcagtacgtatgtatgtacgtaatacaatgccatgctttctcccctcttccaatccttctcttcctatttctagatgaaaattttaacatgaaaaaatattataataaaacatctaacctttgcttttcacttaaatcgatcggtgaaccaactattttaaccattgtccctaaaaaaatattttaacgattatttaaaccggtgaacccattaatctatatataaaagaaacacttccctaaattttaccatagaacattgtgctttgcatgaaaaccaaatataaacaaacattaaaaccattagatttaggtatatagatggtttaaaccggtgaacctatcaaatctatatataagaaaaacgctttcctaactttgaatatatactatttttctttgcaatgcaaccaaataaaaacaaaatattaaaaatggaaatatatattatggagtaaatttcacaaacccacgtagatatatctatctattatataaaagtccattaaacatcctaaaaagctcctaaactgccacgtgagattccaagaaacagtgcaaagatgacacctaacgctctaattaattcctagaaaatctatggaaaaaggagaacatctaaccattggttttatttaatctgatggacctaatattttttttaccatcagataccattagatttatctttagtaaaaaacttaagatcaatctggcggtacgagtccgcccaacacatatacatgcttccatccatacgcatgataagagtctgtgtgattttttccttgctcgcctcccttttttcgatggtaattaagttaaggcttaagggtatataatatcttctatattagtaagttaattttatcatactttcaaagattgcatacacttgcaaatataggtatagataatatatctcatacatattgatcttggtatgttttataaataaataaagaatcttcaatagctgtaaatcttaaattatatattcaatttatgatctgtttgaaccattgtgtttttttaattaaatcaatagtttaatatctataccaaccatatttaattccattgtgtttttttaattaaatcaatagtttaatatctataccaaccatatttaattgctaataaaattattatattttggacccacatccatacgcaaaaaatcctaaaagttctcattacaaatcaaaatatccaacttagttttttaataaaatcaaaataacttataaaccgctaaccttaaccttaattatagcatcaatggacctattgactcacaaccaacttaattatatctctcgacatatatgtggatgctatttacttaattccaatgccctgataaaatatatgatcttcttttaaggataaatgtacgatcttatgctgtgttcggtgctgagggttgggaaaccttaatcctttggaagttggacattaacttatatcccaaaatacctatatcacgttgcttaaatccaactaatacaccaagaaaagaagaagaacagagggtgtctacagatcagtccttatggatattttactaataaaaattgatttcaaatacttatttgtacttattaaattatctaatcactagaacaaaggaacataccgtccatggagtgaacaaattggagggctaaccggtgcatcccggtgtgcatgcatgggtatagaactttttttctttaatgaaaagaggggcatgaggtagttacatgtatatacatgaagggcacttttttttcttctaagtatgatgatgtgagcatgctgccggagacacgaattaacatgtctaccatccatggtgagggaagacgaataatttgcttagttggactctacacaatatgttagatcttctacatatccaatggttacaaataatggtctaaactcgagggtcatatattatgtttaataaattaattaccaatttttctatataaatcagtagagccattaattatatatggtttgtgtatgtaatgtcttttataacttaagttttttctctttcactatggaatcacaatttcctatgaggaattatccatagctatgaccaatcaatgtttgccgtcaaataataaattaattatcatttttttctaaaaaatgggtagagccattaattatatatggttgtatatgtaatgtcttttataacttaagttttctctctttccctgtggaacctcaagagtcatatatatcttaggtaccattttttataccgtaagataccaatcctaatctccaatagataattttataaataacaattaaattcgtcatgcaattctaacgaagaaaattcatgggaaaaaaacataattttaaaacattgcagatattaattcgctggtataccgcctttataagtttctcaaatttatcctacgtacggtgcatgcccgcgcgtatgcgcgggctaccttcctagttacttttaaaactattaacaagagataggtatattttccccaatgatttctagttccaactcagagactacttaactgactgaaacatcttagtagccacaggaaaagaaagttcggaacaaaaaatacagactaccaaaggggttgagccatgttcttctgtagcgatgcatgcaaaatgaacaggcctaaagatgagtttgtgtaaagcatgaggatgtgtgccaactacacctaaaccactcaatcaccttacaggtcgttttatcacaaacaagtaagcgcatctctactatttatttgtaaatattttaattcttgtaatattttgtgcacacagtttctctaccgtctctcaatgagctctgtctcaactctcaaacaaaattaaaaggtggggcccaaaagttccgagggaatgagctttcgaataaaggagctgtcttgaaataccaggaaataatcaaggccattgtgccccactgctccatcactaagtggaatatcatgaggtagggagggagataaagagctagtggctatactgtgtgaaggaggttgggttggggaatggtaaacaagggaaaatattcctacaaattggagaatgctaacaacagaaaatatccctacacacacaatataggagatcttgggtttgtgttgcatggtggtattcggttgaacacatatgatgctgtatttattggttagttgttattacttcctggttttgttgaacttgatgaagctttgagatttcaaacttttatattattgagaaatttccttgtgcacccaaaaaattttgatcaaactctttcatatatatcctttggtctcaatctctttcatatccttcggtttttgtctcattccctagtagtccttatatttttatcctctacacaataattctattatgtgattgtgtattgaccatttgtttcagaaataaccatattcccttcacttgtttttttttctttttggactggattacccttgatttgtaaatgtcagtgctagcttatacagttaaatcataatcctcatgatgaaatagaatcacttatgaaataatttacaggaaataataatttgaataaatttcactcaaatttgaataaattttaatatttttacctcaaatttgaataaattttaattttttagtcaaattcataaaaaaaatggatatatattgaaggagggtggtgaaattactaaaaaaattaggtaaattattaaatttaagtgaaatacaaataatttactcccttcaaatatgactaaaattttgtgattctaatttacaaatttggtgaaaatttaaaaatttaatgatttagtttattttccctccttgaaaatgatatagctaaaacattttcttgtgagggatttatttttagtgcggaggcatattgattattgttatgagtgatggcaatatagtcatttcataaaaatattacgatcaactcaataacaacataaccgaacaattatatgaggaataaaattgaaaaatatgggtcatgaggcacgtaggtatcggggcaaaactcattggtatagaaggaatcgagcgaaatcttgagagcatatagtgaaatttagcatgtagtaagaactcttatgtggactatttgggacccaacttatggcaattaatttcaactgacgggcaaaataggaatttatttgtccgtattatgtgtgttacggaaggtctcggaccaaccatagcatgcgtcagtgtgatttgttcatacaaatagcaccgtggttttgtctacaatagaaggttccttgcgaagtggctaacatgatgacaacctattgcaccatcatctatggacatgggtccacagttcggcccgaaatggaaggtttcgggcttgggtggcaaacaaggcaccatagcatatggtgtcttaccacatagcccctagcatttcttaccacatagcccctagcatttctagacatggtgtcgtggatctgctaggaaaacaaggttccttgcatgggtagaaaccaagtgttgttgtttctgctgagtatgataggctccgcaccatatataggatatggtgttgcacgtagcaccgttgaatccaacactgttagcaatggagtcatgctttcgtaattccttgaaagcatcatggaattacaaaggggcaatccttctttgccatttggaatttcatgcgatcatttatttgccccgatgtctcactaacacgtggcccttggaccaacatgacattattgattaagtacatgcatagagacatatagtgcgagcaaatacatcagccatgtaccatatgacaccacaagtattattactaataccgagcatataaaacacatcacaagtgtcaatacaaatttcgatgtgtacaacacaaagttgacacatgatttcttcatcattagcctctttcccctccgcaaggaatttgtaccaaggatacatcacttggttgatcatgattgttgtgcaaggaggaagatgtatatattcacatcacttggttgatcatgattcgctaaagcatagtatatattcacatttcaagttcatgcaacaacatgtaccttctacggatccattcaatatgaaattacaattgttaatcctactaatactttgaatacggcatactgctaattaattaagtcactgccacctcaaattcaagccgatactaaaccagggactcgagatctctcattacgggatgaggaaggaaaggggagatatggactctgcaggatgcagtacctttttaagtcccctctaatatatatgttgctagggatcacgtgatcacactatatatagaacaaaacggtaaaggttgtcgtggtaacttgattcacgttgtctgtgaccacctccacattaagggctcattcggatcacgggatagaaaaaacgtaggataggaaaagtataataaaggaatccaaatgtaaaatagagggttggaaatcaaaggaatatagaagatgggatcattgggagtagaggatgggattcataggaaaggaacagtaattaatccaactccgtttttcccacactcttttgtttcccgttgattcttcacgagccgaggagcagcagccctccatcccgtcgccatcgcctccgtgtgcaggcagccctccatcccccaactccatgccattggccgtgcggcccgtcttaattcttccccagcctggcctcctccaggaccacttcgtgctctaccccttctcttcgactccgacaccgagctcgctggctgccgcgccatcactgaccttctcatgcggtattcgctccacgccggacgccaccctcgatacccatcgcgtcggcctccgttcgccattgacctccgctcgcaacctccacgccaacgacctggcctctcctccatgctcatcgttctcctatgagatgtgcttctttgtttctttgttcttcactgatggcatcagttattagtgtttgattgtctcctttggatgcgaaggaaacgggaaaatgaggttggagtggatgatttctttcatgtgttttcccatggaatgaggaaacgcgaagcaacaatttttttgcatcgaattcaagcaacacttaaagtagtaactgatggaaaatttctataaactatggtgaagagatcagtttaatgtatcttgttttgtcttgccagcgagtttacagtccagttaaagaaaaatgtttcctagagatccgtttgcaaatattcgaattgaaataatttcactctcctgcgcaaggcctcatttatttatttatttattgccggaacagggcctcgtttgttgatcaatattgcatttaatcaattaataaactctcttattcattagtacctatgtttttgtatcatatgttgctttgacttttattctaatcaaacttctttaggtttgatcaagtttatataaacatttagcaacatctataacaccaaattagtttcattaactataacattgaatatattttgataatatgtttgttttgtgttggaaatatttctttcctttttttataaatttggtcaaacttaaaaaagtttgacaaaaataagttaaaatggcttatattatgaaacagaggaagttataagtttatctgattgaggagtagttttttttagagcgagtggttttctctttattatctcccaatacacaataaatgatttctggtttattcataggtttgaaaacatgtacctaaaaatattcaaaaattgaactattaaccaactaaaattagctaattagtacttgattaacattagataaactggtctatggattaattcaagtaatgttaaaattggtgtaaattatggtggagaggaccagtttaatgcgtcatatttgtttttgcaagaatccaaattgaaataggcctcatttatttacttatttattttggcctgaacaaggcctcatttattgttcaattttttgtatttaataaattagattaataaactcttctccattaacaaatctctacaaagatcctcctcatcatctccaatatacatagtccaaaaactactactaaatcatactccttccggttctataataattaacgttttagaacaaggttgaggtcaaacttttataactttgatcatcaataacattaaaaatatttagtttaaagaaactagaacagcatatgtagatttgtctttcaaagcactataataaaagttaaaatgtatttatttattgtatatattataatagaaaataaggtcaaaagtatattttgtagaccgtgtcattgtctgaaatgtcaattaaaatgaaatcggagggagtagaaacttattaatcggagtaaaatgattccaattgattcaccaatttaaaattaagtgttgcacctaaaaattctcccaaatcaaactatgtgtttttttatggttaacacactcctcaaaccggagatttaaaacctcgttaattgcacgattaaaatcgatcaaacagattcatggaataattcaagcaaagctaataaataacttatgaaacatttcgtgtaaattattggtgaagaggatgatcatgcgtacgtacctccctgtctctgacagagaacttgagcaccttcacacgcgaaaccagccagagagtgtcgagaaaatcttcagttccgaggaaggcgtcgacggagatgttcgccgcgttcagcagcgggagctcgccggcgacgcggcagccgttgtcgacggccggcgtccagagcgtcagcgagtggagcttgggcgcccggatcgcccacgcctccggctcctcctcctccaccttcttctcgcccccggcgacgacgccggtgatcacgtccaccaggagcaggtcggcgaggtcgggcgcgccggcgatcacgcgctcgagcagcgcgccggcgccggcgaacgggagcttgacgctgttgagcgccagcctggtgaggcgcgggaacccggcgaacaacgacccctggcccggctgcggcggcggcgggcgcgggagctcgcagtagcggaggtagaggttggagagctcggcgcgggcgtagatggcgcggccgacgccggggaagacgccgggctcgtcggcgcgggaggagccgaaggcgagctggagcgagcggacgcgcttctccgccagcgcgcggagccagtaggcggcgcgcgggcggagccgcgggcggacctcgatgtcgaagctcgccacgggcgcggcgcaccgggcgagcacgccggcaacggcgccggcggagtagaacccgcggaaccggacgtcgaggcccgacgccgactcccaccgccgcgcccacccgcgcgacaggcagcacgtgcggaccacctccttcagcggcagccgcgtcaggatgtcgtccaggatctccggcagcagggacagcagaatgtccgtcccggcgacgtccgacgccgccgccggcggtggcagcggcggcgacggcggcgaggaggatgacatcgacatggccatctctagtgacgcgggtgcgagtgtgctgcgagtgacccccaccgcctacttgtattgtatctgcaccgaatgaactgcaccttttgcgtttacgtcctttgataaaagaagtattcagtttcacgccgtttagggggctatttgtgattctgggaaggaagagagaactgttcaagggaatactgaaatttgggacgtacatccttgcaaagttgctcccccgttcgagcgtgagttgtttggaaggaagcgttacattttgaattgaatgtagtggtgacgtggaattttcttgctgaggcacaaagtgccaaagggaccaactgatcgattgtaagccttgtaggcgaggaacttgcacgctgagtacgaatttgtgactgtgaacgatttcaccatggcattgagtcgtggatcgatttcggagatcgatggtatgaatatctttctcgactaatatctaatatacgaatgaactattttaccaactaggaaggtagcccgcgcatacgcgcgggcatgcaccgtacgtaggataaatttgagaaacttataaaggcggtataccagcgaattaatatctgcaatgttttaaaattatgttttttcccatgaattttcttcgttagaattgcatgacgaatttaattgttatttataaaattatctattggagattaggattggtatcttacggtataaaaaatggtacctaagacatatgactcttgaggttccacagggaaagagagaaaacttaagttataaaagacattacatatacaaccatatataattaatggctctacccattttttagaaaaaaaatgataattaatttattatttgacggcaaacattgattggtcatagctatggataattcctcataggaaattgtgattccatagtgaaagagaaaaaacttaagttataaaagacattacatacacaaaccatatataattaatggctctactgatttatatagaaaaattggtaattaatttattaaacataatatatgaccctcgagtttagaccattatttgtaaccattggatatgtagaagatctaacatattgtgtagagtccaactaagcaaattattcgtcttccctcaccatggatggtagacatgttaattcgtgtctccggcagcatgctcacatcatcatacttagaagaaaaaaaagtgcccttgatgtatatacatgtaactacctcatgcccctcttttcattaaagaaaaaaagttctatacccatgcatgcacatcgggatgcaccgtttagccctccaatttgttcactccatggacggtatgttcctttgttctagtgattagataatttaataagtacaaataagtatttgaaatcaatttttattagtaaaatatccataaggactgatctgtagacaccctctgttcttcttcttttcttggtgtattagttggatttaagcaacgtgatataggtattttgggatataagttaatgtccaacttccaaaggattaaggtttcccaaccctcagcaccgaacacagcataagatcgtacatttatccttaaaagaagatcatatattttatcagggcattggaattaagtaaatagcatccacatatatgtcgagagatataattaagttggttgtgagtcaataggtccattgatgctataattaaggttaaggttagcggtttataagttattttgattttattaaaaaactaagttggatattttgatttgtaatgagaacttttaggattttttgcgtatggatgtgggtccaaaatataataattttattagcaattaaatatggttggtatagatattaaactattgatttaattaaaaaaacacaatggaattaaatatggttggtatagatattaaactattgatttaattaaaaaaacacaatggttcaaacagatcataaattgaatatataatttaagatttacagctattgaagattctttatttatttataaaacataccaagatcaatatgtatgagatatattatctatacctatatttgcaagtgtatgcaatctttgaaagtatgataaaattaacttactaatatagaagatattatatacccttaagccttaacttaattaccatcgaaaaaagggaggcgagcaaggaaaaaatcacacagactcttatcatgcgtatggatggaagcatgtatatgtgttgggcggactcgtaccgccagattgatcttaagttttttactaaagataaatctaatggtatctgatggtaaaaaaaatattaggtccatcagattaaataaaaccaatggttagatgttctcctttttccatagattttctaggaattaattagagtgttaggtgtcatctttgcactgtttcttggaatctcacgtggcagtttaggagctttttaggatgtttaatggacttttatataatagatagatatatctacgtgggtttgtgaaatttactccataatatatatttccatttttaatattttgtttttatttggttgcattgcaaagaaaaatagtatatattcaaagttaggaaagcgtttttcttatatatagatttgataggttcaccggtttaaaccatctatatacctaaatctaatggttttaatgtttgtttatatttggttttcatgcaaagcacaatgttctatggtaaaatttagggaagtgtttcttttatatatagattaatggg

SEQ ID NO: 8926 - DNA, 20514 bp, Oryza sativa
ggtcgatgacccagtacggcggggtgtcggggtggccgcggcgcaccccgtcgcactcgatggcgagctcccggacgcccttgctcgccagggcggggaaccaggtgggcaggtggtggaagtggcgggcgtggacgcaggcgcggaagccgacgacgggcgccgcgcaccgccacaggtcgcgggcggagggcgcgccgcggcagccccagccgaggcggatgtcgaggtagcgcacggactcccaccggcgccgccacgcgtgggagaggcagcacgtgcggaccagcaggtcgaaggggatccgcgcgaggatgatgtcgaggacgtccgtggggagcgacatcagctcgtcctccctcgccgccgccgccatattccggcggttcggattcgccgttgcttcttcgcctcgtgttatgaaaatagatgcacaacggagaaacgaattttacgtagaaaacccttgcggaaaaaaactatgggcgccgaccggcaatgatcactatagagtagatgattacaaacgtaggggaataacaatgagaacgtcaacccttcccgtacagcttacaagagtatatatagaggataatagaaagacacctaataggatagacatgactagaaaactaatccgaatatattgtgggcccaaaattcggatcacatatttaacaatctccaccttgagacgaatttcctcttgtagcataaaaacatcaatcaccaaaaaatacctcatgtaggtaaaatcaccgcgcgccaaatagtctctaggactatgctgtcacacccaccaagcttgagcaaagcttaaacttagtagcaggaactggctttgtcatcatacttatcttgcataccttgacatcaccttcagcaatcacacctcgaataaagtgatatctcacatcaatgtgctttgttctctcatggaacatttgatcctttgtaaggcatattgcaccttgactatcacaaaatatattaatgcaagacgtaactccacaaagctcagtgtacaaacctctaagccaaatagcttctttacaagcttcagaaatagccatatactctgcttcagtagtagacaaggcaacagttgcttgcaaacttgccttccaactaacagcacatcctccaatagtgaaaacataacctgtgagcgatcttctcctatccaaatctccagcaaaatctgaatccacataaccaacaagtccatctttagatctcccaaactgcaaacaagcactagatgtaccacgtaggtatctgaaaatctattgaacagctttacaatgctctttgccaggattagccatgtatctactgacatcacttaatgcatgtgataagtcaggacgagaacataccatggcatacataagtgaaccaactgcacttgaataaggaactctagacatgtactcaatatcataatctgactgtggacataaatctgaagataatctgaaatgtgcagctaaaggaatactcactggttttgcatcatgcatattgaaacgatgaagaactttttcaatataacctttctgactaagatataacttgccagaatgtctttctctagtaatttccataacgagaattttcttcgctgcacccaaatccttcatctcaaattcactactcaattgtgccttcaactttgctatctctgatttatcttttacagcaatcaacatatcatcgacataaagaagcaaatatatagttggaccatcaacaactttgagataaacacagccatcataattggatcttctaaacttctgagaaagcatgaaagagtcaaatctcttataccactgtctaggtgactgcttcaacccataaagagatttcttcaacctacagactaggttctcttttccaggaacaacaaaaccttcaggttgctccatacaaatgtcctcttctaactccccatgtaaaaatgcagtcttaacatctatttgctctagttcataatcatgcattgcaacaatactaagtaaagtgcgaattgaactatgcttcacaacaggggaaaagacatcattgaaatcaatacctggaatctggctataacctttagcaactagccttgctttgtatcttgcctcatcacttggagacataccttcctttcttttgaagatccacttgcaacggataggtttcttctcctttggcaacttcaccaattcccaagtataattcttttcaagtgattccatttcatcatgcatagcagttatccatgtattgcaatcatcagaaacaatagcctcagaatatgtagaaggttcggcattaccttcaatttcttctgtcacactcaaagcataagcaactatgttcgcttcttcaatatatcttcgaggaggtttaatatttcttttgggcttatcttttgcaatagaatgttttggagactgctgaacaatagaagaatctgaatcttcaataacaggtgcatcttggttaatagcaacatcttctttttctggtgcatgccctgaactgatcaagtgctccacctgcacacttgctttctcatgattctcaacaggaacattagtagaaggtttgtcatgtaacataactgattcatggaagacaacatttctactaatcacaacctttttggtttcaggacaccataactgatagcctttcacaccagacggataaccaagaaaaatgcacttaatagctctaggctccaatttaccattatcaacatgagcataagcagtacaaccaaatacttttaagtctgaataatttgctggggaaccagaccatacctcaattggagtcttcttatcaatggcataactgggtgatcgattgataacaagcagtggaaacggcttccgcccaaaactatttaggcaaacctgcattagacaacatacaacgggcctttgatataattgtcctgttcatacgctcagctacgccgtttttgttgaggtgtgtgaggaacggtgtagtgacgcacaatgccttcagacttgcaatatgatttaaatatcttagaacagaactccatcccattgtcagtacggaggattttcaccttcctttcagtttgtctttcaaccatagttttccactctttaaacacattaaaagcttgatatttgtgcttcaagaaataaggccaaacttttcacgaataatcatcaacgatagtcatcatgtaacgagcacctctaaaagatgtcttacgagcaggcccccataaatcagaatgcacataatcaagaataccttcagtagtatgtgtagatgtattgaacttcaccctcttatgcttgccaaagatgcaatgctcacaaaatttgagcttcctgatgctttgtccatctagcaatcctcgcttgctcaattttgccaaaccaatttcactcatatgcccaagacgcatatgccaaagattagtagcatcggaattagataatgaatcagaaactgtagcaacattacctaatatagttgtacctcgcagatggtacaggttggcagatttaatatcagctttcatcacaacaagagagcctttaattaccttcaaaattccgtctccaccggaatatttgtaccctttgcaatcaagagtacataaagagatgagacttctcttcaaatttggaatatgtcgcacatctgacaatgttctgatacagccatcaaacatcttgatctgaactgttccaatacctgcaacctcacatggtgtatcatcacccatcaaaacagtaccaccttgaacaacttcataagtggcaaaccaatccctattcgggcacatgtgataggtgcatgcagtatcaagaatccactggtcactagtttgtgcacaaccagcataagcaacaagtaattctacatcagacttctcatcagtaacaactgcggctttaccttcctcttctttcttaccttctggtacatattttccggttctcttgtctttgtcctgcagcttccaacactcagagatatcatgtccatctctcttgcagtatttgcatgacttatacctgtctctggattttgatctcccacggtagctacttgagcttttatctcttgattggttctttgtgttcttctcctgttgcatgccccgaacaaccaagccttctgcttgtgaatttgaaccttcagagggtaccatcttcttcatcttttctttggcatgcagagcatcataaacttctttcaaagttagagtatcacggctataaagaatagtatccctgaagtttgcatatgagctaggcaatgaacacaatagaataaggcctaaatcctcttcatcatactttacctcatagactcaaggtcaacaacaatttctttgaaagcggagagatagtccatcatagacccatcatcttgtaacttgtgcaaaaataatttttgcttcaggtgcatcttactggtcagatccttagtcatgcatatctgttccagcttcaaccacagcccagcggctgtctcctccttaagcacctcctgcaaaatattgttagatagatgaagatgaatatatgacatagccttacgatcccttttcttctcatcgttggaccaatcctgtgtcctcttgtcaaatccagaaagcgcatcatcgaggtcttgttgtgcaagaacggctcgcatcttcacttgccaaagtgagaatcttgtgtctcgatccaggagcggtagatcatacttcaaactcgccatgggaattaatcctgaaatttgctagaaagaaattagggtaaacctagcaaaaacgcgaaacctgggtgcacttcctgtgtgcacttcctgtgtgcacaaagcgaagtatgtagatttcctggtacacaagctttggtgcgcttagcaaaaaaaaatcgccaagaaattccttctcaacaggaacgatgtagtccctgacttcctcgggtcgcgtgccctacagttgcagtaggccggccctttttcctcctcacggctgtgcggttgctgcagcttctgcttttctcgcgcgggtgtgtgaggacggcgcgactcggactcgacggggtactgcaccgaacagattgattcggcgacgacgaaagcgaaacaggcggcggcggcggtgtggtgtagattgatctccaatgctctgataccacttgttatgaaaatagatgtataacggagacacgaattttacgtggaaaacccttgcggaaaaaaaccacgggcgctgaccggcaatgatcactgtagagtaaatgattacaaacatagggaaataacaatgggaacgtcaccccttcccgtacggcttacaagagtatatatagaggataatagaaagacacctaataggatatacatgaagtcttactaggaaactaatccgaatatattgtgggcccaaaattcggatcacatatttaacacctcgcgtggtggcgatggcttcctgaggagtgaggacgctacgcgacagtggccaccttcttctggaagctttggaccgcgggataaatgggctgaatttcactatgtgggctgctacgtcaccggtagattcaacatctgacccattcattttttgtattgtgcagccaacacaaacagtaagttgagtctacagttgcagcagcaacggctgcatacagtggctgtaccagccagccgaacaggtccattatcgattggaaatcaggacagaattcccatagcatatatactacgaggtgtctaggtgtataactaattttttgcgtgggtttgaaagtcaaattcgtgagaatcacgtagaatctctatattccaaaagatcccttcatgggtgacgaaatgccaatttactcccttcccttaatattacaagtcattttgtcttttcttaagtcaaaattgttgaaaatttgatcaagtttacataaacatataacgacacttataacactaaattactaaatcagtttataccccgcacatgattagtttaggccacgctgcccaaccacccaaaaaaaacatgattcagcttgagcttaaaaaaaagaagatttggagagagagacaatatatttaaaaaaaatgatatcgcgttggggattgaagacgggtcctcgggcttaaaataacacaccccttaccacttcaaatgctaatacagtctccgatcaaatatacattggtgccaaccgtgcacaaatcatttgaacgaagccttttgattcatacataagaatctgaaccttgaggtgccccgtaagctgatctaaaatagcaccctggcatctgttgcaacacgattttcagaaaaacctcagaaaattttgaaccctgattgtcgacaacattcagttatgtcacttcaaatgctgttttatactcgttccgtttctaaatatttgatgccgttgatttttttaaatatgtttgaccgttcgtcttatgcaaaaaaaatttaagtaattattaattttttttcctatcatttgattcattgttaaatatacttatatgtatacatatagttttacatattttacaaaagtttttgaataagatgaaaatatcaaacgtgctaaaaagtcaacggtgtcaaatatttagaaacggagcgagtatatattttgaaccaaatcgtcaaacgtgaaaagtgctcctgctagtacccagtattaattgcaacatccttcaaaactctaggatacattgacagcatttgaagatcaaggaaaaaaagagacgcaaacatttctagcaaggcatattcacagctctctttcatcatgctaaatcagcctgtcattcaaaaataccaaaatgctaaatcagtgtcagcctgtcaccaaattatagtgttcaactcaaaaaaccgtccactgatacagtgaaattctatgcattctgccaacagaaggaaaagtagcagctgtatgtacaacagccacatctagaatgtaacagatcaaagttcaaaagctatgcttccataacagaaaggtggacatggcaaggacaagaggtacaacactctgtaattcctcaagaaggaaaacaagcagctggttgcacaagaacagcctcatctagaatctaaacagtagcaagttccgaagtatttcttccataatgcgaaggcagcatcaaaaaggacaggatgtctaacttacgatccgtcttgtgtcacttttgctgtcaacaaaagttggggtgaagccttttggcactcgattaactctttgcatttattttcaaaccattcgctctttccatcatcatcaaacataaaagtgacagcaaatgtttgaagagagcctgctttggacagtaaaaacttcataaagcacatttgattttcgcggtgcttggcaccagtcagggacacatgtttgaggcttgcaaacaagtcactgcttatctctgaatttagggagtcttcatcaatcttttctttatccaattctgtatcaagagtctacaaaacaaggccaagtttcaattaactcaattgaccaagagatgtctttaaattgaacatagcagttgaaggtgtgaatctaacattacctgaatttcaaggtgctcaatatgcggagcaaacttcagtaaagaatctattgatagaacacttgagagttggccaaaatctatgttcaggctggcttccctcagattctcaaacttgcatgtaattccctccagcatattaatgctgaactgaaagtcataagaacattgttaggcctgacatatgtccatgacgcaagtttacattgagccactaaccaaagaaatatgcaaatattaggacaccatgatcttgtagttacgaaggttcttcttggaccttcattttcagaacctaagaagccatattgtcataaatgttggcatttgcatcagagtacatgtgtttaaatcacatctgccaaaacacgacataccatctctacaagctaactagtttcacattcatcaattcagtcaaattgtaattaagttgctcgcaatgaccaatctattatctatctatctattatatactaaaagtccattaaactccctataaacgctctcaagctgccacgtggctccctcaaaacgctctcatattgccacgtggcactctaatataatagagaaatctgaccatcgattttcatttaaatcggtggacccattattttacatcgttagatctattttaaaaaccaaaaacctcccaccggccccaccacctctgtgcagtacgcacgtactgctccatctgtttagtactttttttttcgtttgttcctttcttttctttttccaatcctaattaaaattgaacctatctttatagaaaagaatacccccacaaatagacatcaaatgcgttaaaatccattaaatatcatataaatgtttctaaccgttgtgtgccactcttaaattagagaaacgtccaaccattggttttcactagaatcgatggacacattattttacgtcgttattagatctgtatattaactaaaagtccataaaactttctatgaacactcctaagtcgccacgtggcatcctagaaacgctcttaagccgccacatgccactccaatatataaccgttgatttcattatatttgatggacccattatttacaaccattaaatttatcttatagaaaaagttaaccacccaaacctaaccccacccagcgtacgtacttatatctcatatacaactacctactatatatgaaaataataataatatacctcatgtattattattattattacaccaccctcttcctagattaactcttccttctcatattttttacgctttattagttagaaagaaaaatcttctattatatactaaaagttcattaaacttcctacgaacgctcctaaattaccatgtggcatcctacaaaacgtttctaaaccgctacgtggcgttctaataaatcggtggatccgctatttgtttaataaattgctagactcactattttcaactattatatttatctttataaaaaaaatatcccacaacccaccccttctctcctcagtacgtatgtatgtacataatacaatgccatgctttctcccctcttccaatccttctcttcctatttctagatgaaaattttaacatgaaaaaatattataataaaacatctaacctttgcttttcacttaaatcgatcagtgaaccaactattttaaccattgtccctaaaaaaatattttaacgattatttaaaccggtgaacccattaatctatatataaaagaaacacttccctaaattttaccatagaacattgtgctttgcatgaaaaccaaatataaacaaacattaaaaccattagatttaggtatatagatggtttaaaccggtgaacctatcaaatctatatataagaaaaacgctttcctaactttgaatatatactatttttctttgcaatgcaaccaaataaaaacaaaatattaaaaatggaaatatatattatggagtaaatttcacaaacccacgtagatatatctatctattatataaaagtccattaaacatcctaaaaagctcctaaactgccacgtgagattccaagaaacagtgcaaagatgacacctaacgctctaattaattcctagaaaatctatggaaaaaggagaacatctaaccattggttttatttaatctgatggacctaatattttttttaccatcagataccattagatttatctttagtaaaaaacttaagatcaatctggcggtacgagtccgcccaacacatatacatgcttccatccatacgcatgataagagtctgtgtgattttttccttgctcgcctcccttttttcgatggtaattaagttaaggcttaagggtatataatatcttctatattagtaagttaattttatcatactttcaaagattgcatacacttgcaaatataggtatagataatatatctcatacatattgatcttggtatgttttataaataaataaagaatcttcaatagctgtaaatcttaaattatatattcaatttatgatctgtttgaaccattgtgtttttttaattaaatcaatagtttaatatctataccaaccatatttaattccattgtgtttttttaattaaatcaatagtttaatatctataccaaccatatttaattgctaataaaattattatattttggacccacatccatacgcaaaaaatcctaaaagttctcattacaaatcaaaatatccaacttagttttttaataaaatcaaaataacttataaaccgctaaccttaaccttaattatagcatcaatggacctattgactcacaaccaacttaattatatctctcgacatatatgtggatgctatttacttaattccaatgccctgataaaatatatgatcttcttttaaggataaatgtacgatcttatgctgtgttcggtgctgagggttgggaaaccttaatcctttggaagttggacattaacttatatcccaaaatacctatatcacgttgcttaaatccaactaatacaccaagaaaagaagaagaacagagggtgtctacagatcagtccttatggatattttactaataaaaattgatttcaaatacttatttgtacttattaaattatctaatcactagaacaaaggaacataccgtccatggagtgaacaaattggagggctaaccggtgcatcccggtgtgcgtgcatgggtatagaactttttttctttaatgaaaagaggggcatgaggtagttacatgtatatacatgaagggcacttttttttcttctaagtatgatgatgtgagcatgctgccggagacacgaattaacatgtctaccatccatggtgagggaagacgaataatttgcttagttggactctacacaatatgttagatcttctacatatccaatggttacaaataatggtctaaactcgagggtcatatattatgtttaataaattaattaccaatttttctatataaatcagtagagccattaattatatatggtttgtgtatgtaatgtcttttataacttaagttttttctctttcactatggaatcacaatttcctatgaggaattatccatagctatgaccaatcaatgtttgccgtcaaataataaattaattatcattttttttctaaaaaatgggtagagccattaattatatatggttgtatatgtaatgtcttttataacttaagttttctctctttccctgtggaacctcaagagtcatatgtcttaggtaccattttttataccgtaagataccaatcctaatctccaatagataattttataaataacaattaaattcgtcatgcaattctaacgaagaaaattcatgggaaaaaacataattttaaaacattgcagatattaattcgctggtataccgcctttataagtttctcaaatttatcctacgtacggtgcatgcccgcgcgtatgcgcgggctaccttcctagtttagttaaatagtgtgaagcttgcaagggcagtaaaaattacttcgaatcgaaacacaagttaggtcattccaacagccttaatctgagcatagaaataccagttgttcttccaattaagggaacttagcagtaaaagaatagtcctctgacaactatcacaaccaaattttaggagagagatcgatcactcctcagaacatgatgacgtatgtatctttatacaagttctgaaaataatcagttcagggaaatgactcatgaacttagtatagcagttgcagtgttagtgattgaaactcagaggaaatgcagaaaataagacataaattgatcagcagtaaataatgtaactaaaaaaattcataactgtggatgagcatgtacatgtgattcaagacaatgtaatggtgattggaattcaacgaggtattcaaatgatcttattctgacgtacctcagcgaccatgaaacagagcttattgacagtagaaatattttggaaagcgtcaaggaattcttgggttccgaagacgcaatcgaatgagatgtacgcatcctcgagcttggggagcgcctctgtgattcggcagccgaagtcgacacccatcggcatggtgacactgagctcccggaggttgggcgctctgatggcccacgggtccaccacgaccgcgccatccatggtacccaggtttgacaactcgagcacggcgaggttctctgacgcgaggatgaggtgttcgagctgcgtgccggcacgggcgtacgggagggtgacacccacgaggtagaggcgctcgaggttggggaagcccggaaagcccggcggcatgtcgcatttctcgaggcggaggctgacgagttcggcgcaggagaagagggcgggtccgggaaggtgcggcagatcgtcaaacgagaacttcaggctgagatcctggacgcccttccgcgccatggcgggcgggcggcgcggtagacgttgcgcgtggcgacgcgggcgcggaagccgcggatgggcgccgcgcaccgccacagggcgcgggaggaggagaccgaggcggggaactcgatgcggaggttggcgacggactcccaccggcggcgccacgcgcgggagaggcaggaggtgcggaccagcttgtcgaaggggagcagcacgaggatgcggtcgttgaggatgtccgacgggagcgccatcagcatgtccgtgcgcgtccccgtcgtcgccggcggcggcggcggaggcggcgcctcggccgctactcgctggcgcttggggggcgacgagtaggcgaagcccgaggtcgccattgttttggcgtggaggtggaggtggaggtggcggtgcgggcggtggcttgctgacgacgatatgacccaacggccttcttctagaacctattccaagatatttatttggttgttgagcacaggagaaagtttatttttgaatcctgaacaattgggttcgcatttataatccgtcaatgtttcatgttcgatagttacatgttttaacgtgatgttttaacgtgtgtctttactgtgtttacctgtcttttctttactatatatagcgtaatatttcaccggtggacaactgaaacatttaaccacccaattattttggaggagatcgggcgtggatttgtagtttctattttatttcagcctctgcttgtttgtgttttagtcattcaattagttctatttatgctttggtagaaaattatgtatccagcaaccttagaaaatacactgaatccccatcatggctgtatcgagcactaccgcaagtgcctggcctctcccctcttccccgcctaagtggcaagcaccgccaccactagcttctcacaacttcctcgctacggcgaggcgacgagtgccaccaccgccgttggctgagagccgcaaggcagagaaagccgagctcggtgttgggcggagcagccccgacgcggtgtcatcgagcttgtctcggagtagagcaatggccggacggggcaacgcagagtggcgacggtgacgacatcctctcacctctccttctcccctcccgcggccacaagaatcgaggcatgaactcggcgccaccatcaatgcctctttcctctagggtgtttaggacaagcaaacggatactaagctcgagctcgaggatgccacaagatctggcaagcgtatttatacttttggagcaaatgaagtatcgaactgaaaactatagattgtaaggatttaaatctccggctatagctgcctctatagctggagatagatgctagaaaaggcagcagctaacaaatgccacttttgccgctacataatatatgacgctaataaccggacttagcgggagatagccagtaatttagccttcagttagctgcagctaagccttggttttgggctgaaattagctacgggccaaggcccatctacttctcatgttaagctgtaaccctaaccctacatcgtctctcttcctcgatctcagtccctcactccctctccttctcctctacaggtgacggcggctgctgcgacctgtagcgtcgacggagatggttgcggctgcgctcagagacggaggcggcggctacagcttcgcccggcggtggcggctgcggctacggcctcgcccggaggcagcggctgcgaccaaaggcgacggttgcgcccggaggctgcgacagtagaatcaataccacaagcacaatcttaaggaaaaagaaagaggcgtatgcgccctaggaagaagaaaatcaggagcatgcagtctttcatgcgtgatatttcagcacagcctggaccttcatcatcagatacagaagatggcgatgatgatgctacaatgcgatcctccgattctgtctcatactgcctctaactgatcaatagaatgcactattctgaatttctgataagtctactgaacttgatgttttgtagttttgttaagtaatggactgttagtcatgttcctatgatgaactgatgatcgatgaactattaagtgtttatgtggacttgtcaagaacttcctatgatgaactgatgattgatgaactttttatgtcaaaaactcatgtgtcatgcactcatgttcatctatgaactatgaagtatatgtatttataatgtcccctgtgatgaaatgtgatgtcaataaaattcagtacaattatcatgtgatgaactatttgctatgatgacctatttatcctgtgaagtcgtgactcatgtcaaattttcgcaaaacagctaaatggcttagctgcagctatagcctgctatagcttatcttagttattgaaagcccaagcagctaaaggccttagctagttatttatattattgataaatcggctataaatgggaacaccttcaaataattttggaattttattgaaaaagattactactcctcttttcaggctataagatgttttgactttggtcaaaatcaaactactttaagtttgaccaagtttataggaaaaagtagtaacattttcaacccaagacaattttattatgaaaatatattcaattattgatttgatgaaactaatttagtattataaatattactatatttgtatataaacttagtaaaacttaaaacagtttgactttgaccaaagtcaaaacgtcttctaacctgaaacagacggagtaatgaattaaccaccacctttaattctaattaaattaactgaacaaataaaactacatacatacttataataatatagtaaagtactcaagtatacccgcgtcgttgcacgtgttagccgtgacttgtggtctggtgcaccaacacaacaatataaaagttgctcaagattccactttccttttcttagaaacacggtataaaacacatacatacccactcctaagcaaacattcaattttcagcgagatattttctcaaaattacacttttgcttgggagaagaatgtttcccaaggacatttgatttacataaactggacaaaagttttatttatattatactacctccgtaccaaaacatataaacttttgtctatattcatagctaaaaatgtttatattttaagacggaaggaatagttggttttctagccaagcaaagttaaatgatatagggagtcaagtgacccaaataatccaataaaattattttcaaatatttatcattcattgaaagataaaaaaaatcctaacggcaaaccaaattttgcaaaagggtttttctatttttcaaaaataatccgaaaatctaatattttaaaattcaattccagtaactcttattctagcacataactgagtccagtgatgctacaatctccaattcaaagtccaatagtgcacacaacagtgccaaacatgcttaaatcttactctctttgctttctaatatttgatatgttgaccttttttagatgttcgaccattcaccttatttttaaaattacataaatatcatttattttatagtgatttgtttaatcattaaatacgtgttaagcatgtcttacatttttgcactaaattttaaataagacaaatgatatgttgaaaaatcaacggcctaacattagaaacaggagggagctcaattttattgagccttttgatttctatatatcaacccatagacgtcctctgttgccggttgccacacgatttcaaaaaagctcaccatatttgtaaactccggttagcgacatgaaaagtgctcctgttagcatctagcatcagaatacattgacaacagatatatccattgataagactctaagagctaggttaacatgtgataaggtaaaaggggagaaatttctagcctgcatatccacagctcccttgattgagtatcatactaaatcagtctgtcattcaataataccgccacatgctatatcagtgtatacatctcgagtaatcgtagtgtttcacaaacaagcctgatactccatcgactagcttctctatgtacaactctctgccttctcaagaaggaaaacaagcagctggttgcccaagaacagcctcatctagaatctgaacagtagcaagttccgaagtatttctcccataatacgaaggcaacatcaacaaggacaggatgtctgtcttacatgccgtgtgttgtcacttttgctgtcaacacaacttggggtgaagccttttggcactccgttaattctctgcatgcatttccatagcgtccattgctttcataactgtagacgaaagtgacgtcaaatgtttgaagagatctcgctttggacagtaaaagcttcataaagcacatttgatttgagttgtacttcatattaatcagggtcacatatttgaggcttgcaagcaagtcgctgcttatctcagaattcagggagtcttcatcaatctcatcttgagaattcagggagtcttcatcaaactcatcttcagaattcagggagtcttcatccatctcatcttcagaactcacggggtccaatatggaatgatcagtctacaaaacaaggccgaaatttcaattaatacaattgaccaagagatgcctttaaactgtaacatatcacttgaaggtgtgaatctaatattaccctaatataaaggtgttcaatgtgcggggcaaacttcagtaaagaaactaacgatagaacacttgagcgctggccaaaatctatgatcaggccgccctccctcagattctcaaacttgcatgtaattccctccagcatattaatgttgaactgaaaatcataagaacatagttaggcctgacatatgtccatgattcaagtttacatagacctactaacctaagcaaatattcaaatattaggacaccatgatcttgtagttagaaaggttcttgaagcttccttttgagaaaagataagagccatattgttaggaaagttagcgtttgtatcagagtacatctctttgaggccgaaacatgacaggttcgcatcatctgcctttgaggccaaaggcagagtttgccattgctttaatccacacccttcatccttcgatcaaccattacatggtttaggcccattccgtgagtaaactactatatagctatttaattgactaaacatgacataccatcggtacaagctcctagtctcacattgaacaattcagtcaaattgtaattaagtttctcacaaggaccaattcagtaaaaaaaaactactatcgatcgaaacacaagtttgatcattccaacagctttaatctgaggaatcaagggaaactagaagcagtaaaagaattatcctccaacaactatcacaaccaaattttaggagagagatcaccctgagtcagatcatgatgaatatctctcttaacaagttctggaaataatcagttcaggttaatgactcttgagttacaatagcagttgcagtcttagtgattgaaactcagcaaaaatgcagaagatgacacatatatagcagacataaatggatcagcagtactcccaatcaaatctgcaaattatttgtccaaatgagctaactaaaattcataaatgtggatgaacatgctacatgggattcacaagcagacaatgaggcaagcaagataggcatgtaatgaaaattgggatccaacgaggtattcaaatggtttgacgtcgtaccttatcactcttgaaaaagagcttattgacagtagaaatattctggaaagcatcgaggaagtcttgggttccgaagaggcgatcgaatgagatggtcacctcctccagcatggggagcggcattggtattcggcagccgttgtcgtcacccatctccatggtgatgtagagcttccggagtttgggcgctctgatggcccacgtgtccacgccgccgccgttgatggtgatcacgggtgacaaatttagcacggcgagtttctccgccgcgacgatgaggtgttcgagctgcgtgccggcaccggcgaacgggagggtgacatacacgaggtcgaggcgctcaaggttggggaagcccagaaagcccggcggcgccgccggcatgtcgcattgctcgaggtcgagttggacgagtgcggcgcaggagaagagggcgggtccgggaagggggcgctgcttaccggctaacgagaactccagacttagatcctggacgcccttccgcgccaaggcgcggagccagcgggcggcgcggaagacgtcgcggcgggcgacgcgggcgctgaagaagcggacgggccgcgcgcaccgccacagggcgcggccgccgccggagtaggcacggggcagctcgatctcgaggtttctgaccgactcccagcggcggcgccacgcgcgggagagacaggaggtgcggaccagcttgtcgaaggggagcagcgcgaggatgcggtcgtcgaggatgtccggcgggagcgccatcagcatgtccgtgcgccgcggcggcggcggcgccactcgctggcgcttgggggaggacggggaggagggggaggaggaggaacccgaggtcgccattgttttggaggtggaggtggaggtggaggtggcttgctgacgacgctatgatccaacggccttcttctggaaccttctgcaagatatttatagggttgtttggaaagcgaaggagccataccacgccgcctcggcctcgtggggtgcgggtgagcggcggctgcgacgccgtcagtatttctccaccgcgaccggcgtcagctaacgagttggggggtgaaagctgtgcctgtgctgtgttttgttatgtttcttggttcctaatttctgaggatggatagacatagcgactttggaagggaaagacacttttattttttatttcagctgtttttcaacacccaaattttatatggtttttttaatcgaaattgcgatatggcattcgacagaaatttgggatgaaatcttacaaatttattatcacatcggatatacggacacacataaataacaaaataaattacagaattcgctgggaaactgtgagacgaatttattaagtttaattaatccgtcattagcaaatgtttactgtagcaccacattgttaaatcatggcacaattaggcttaaaatattcgtctcgcaatttacacgcaatctatgtaatttttttttcctatatttaatactctatacatatatccaaacatttgatatgataacgtgaaaatttttgtgttgggaactaaacagggcctaagtgttggccgtgtgcttgtcagcagaagccacgaaaaaaagctctgcagcttgcagctagctgtgtttaactgttggtttcagtatcagtattctgagttgactgctaatgcaaatgtttaacattactcctgctgccggtttctagctcatctggaaactaagaaatgggatagtatgcaggagttttgccattttggattatactgtttcagaatcaagccacatcaagtataaattatcgaggcttgactgctgatgcaaatgattttacagggttcgtgcagaggtttgggcttctctgaaaaccggggaatgacaaatatgcaggcgttttggaggtcgatggttcagaatcaaagactgaacaatatggatgcttatgttggtctgctgatgcaaaatttgaagagcctgcttggcactgacagactgaagatacaacaaagcttccagtcttccaggaatcaaggttgtatcaattgaactaaggcagaaaggttgataaattttatgcaatgtgaaatcctgctgctgtgattaacatcatgatacaaggtaaatccactatgtctgatgcaatttacatccaagaccaacagaaactctgttactcctgttcatatcagagcaatatcgaacaaagaacagagcaaagttcataccaagattcacaacgttctcagatttctattgcatttgatatagacatatagttacagcc

SEQ ID NO: 8927 - DNA, 57191 bp, Oryza sativa
gcttgtggttggcacggttaatgtttcacaacagtagctcgcgaaccggtccttaattgccatgagcacgactctcaaaaccatgtgctcacaacccaccattatcaagttttagttggcaagaaattaattaaccaatcacgattgaccatcgtgaactatcattaagccatcattaaataatagtgagtcataagttatcccaatagtatgctaatgtttctaagcatggctaagcaatcatatctaatatctagctgaaccaatatataaagctcaactagtcaaattataataacccaaggtatcaaggaatagagtaggattttcattttcctctatactccttaatcaacatgctgtaaaactttctgtaggtccgaactgcttttatttaacgagtcgtttcccttgtttccttagcatgtgatcccgagtacctttgtcattgtagatatgttgatgtcgaggatgtccagcagcgcgggcagcccgatacgccggtagtcgttccggcgctcacgcttgagccgcatgtgccggaggtggaaatcggtcaaagcccatccacggagacaaatatggcgatgacgtccttaggtttgtgtcttgattttcttcgctcctcgtgtttggattgacttaattagccgtgttctcgaaagagaagagtagcttgacttagtcctttccgtgttgggcagatttcaagaacgcgttggctaactgagatcgttgaatccagtattggaagacaaaactcgaggtggccgaactcgaaaggaccatcgtgggggcgaaggaccaggccgtggaaactctccgaggtcgcgaggtgtggtttaactcgtaccttaagagttgttgcacggccatggtagaagtttgcagggagctccgagttccccgcggagatcccgaggagtccgctgctggttatatctcgtggatgaagggggcctgcgcacagctcgaagggattggcaagcgcatcgacgaggccctgaagcaggagtgtcgtcgagcgagccgctacgccgggggacatgtgctggcttgcatccgagatcaccgcccgcctctgcacctcgagttccttcgcgaagggttctcttgttctcggaggacatccgcggagatcgacggtcttgcgcagtcgatggcgttgcttgccgagaaggttttctgctccatggattggcgttggccgtcctggtagcttttgtatcctgtagaaaaacatctcaagggagcatgtaatatactttgaagtattcatgacttgtaagaaatccttgtaaaataaaaatgaaatctatctaactaagttttcttacttttggtatattgtgtatgagtgttttctcattctacgacttcgatcagtcacttgagccatacactctccctagcccccagccttgtcgtcggagaattgttctcgggggataagactcttggacccttgacctgccttggttgaaaaagtgcagagcctagcccctagccgtgaagttagaaaactcaatttccgattacacggcttagttaatacgcacggtgagaactcttacatgaccagatcttacgtggtgatttgtctctgcataatctgacaaggccttatccgctctgggcgtccccagccgaagttcccttaggttcctcagaggccttgccaggacggcgtaaagggacatgaggatagatttcaactctaggtgtcgtagtggtaagggatcgttgggaaggaacactttgacgatattctttacctgaaatcaactttattgaaatcgtaagatatcttacaaatatggatactattgatttatacataaaatttacataattgatcaatgtttcaggagtttgctaactcgcgaccatcgccgtctgcactcttgaatgcgcccggccgcaagacttgcgtaatcgtgtatggtccttcccacttgggtgagagcttgttgcacccagcttggctttgaacccgtcggaggacgtaatcgctgatcgaaagtgtgcgtgctctgatgtgcttctcatgatatcgacgaagggcctactagtagccggctcctctgacggcaactctttctcgatgttcctcgagtagattcacatcgtcgcttcgctgctcctcctgctcctcgtcggagtacttctgtactcgtgtgctctgatgtcgtagctccgtggggagcatagcctctgagccatacacgaggtagaagggtgtctccttattggatgttgtcggtgtggtacgcacggcccatagaacagagggatgttcttcgacccacttcttgtcgtgtgacatgagtctgtcgtagacgcgggtcttgatcccttgtagcactatgccgtttgcccttttgacttgcccattgctctaggggtgagaaatcgaggcaaagcaaatcttgactcccaatccaatgcagtaatcctggaagtcggcactgatgaactgggagccgttatttgttatgatgcggtgaggcaatccgtatctgtagaatatccctttcataaacttgatggcattatcggccttgatttcccccgtgggcgtcgcttcaatccacttggtgaacttgtcgatggccacgaacaggaacttgtagccgccctgtcctcgtgggaatggtccgagtatatcgagcccccaacacgagaacggccaagtaagagggatagtctggagcacttgcgatggcagtcttgtgtgtttgctatgaaattgataggcttcacaccgctgcaccatgtcgcaggcgtttttgagcgcggtcggccaaaaaaaacccttgtcaaaaagcttttcctaccaacgtccgtccgccggcgtgtgacccgcagatcccttcatgtatgtccaggaggagatgtttgccgtcgtcagacgagatgcatttgagaagtactccgtttggcgcctttttgtacagatcattgccgatcatacaaatagatcttggcttgtcgggttatcttctcagcttctgcatcgtcctcgggcaactcgtcgctactctggaactcggtgagtggggtccgccagtcgtctgtggtctcgatatcggcaacgacgtgttccgcttctgtagcccccgagctgatgtcggggacaaccgtgctaccgtcgtcgcttgcctctttcaccgatggctttgtcaggatgtccagaaaagtgccaggttcgagtggctctcgtcgggacgcgcgccgtgctaggtagggatgaaactggttcggatagtttccgtccgtccggaccaattttcggatacggcaaaattcggtcggaactatccagaatttctcagattcggaaacgaatacgcataatttttctcggatacgaaaacgaataccgtaagggtgatattcaacggaaacggaaaacgatcggaaactatccggtaatttttcccggatatccagagaccttcatcagccattcatcagaatcagcccaaagagcccaacccagcctaactatgtgtgttatgcaaaccctagctcgctagcaacacagccaacaggcaacaggcagccgagccagccgactactcctattcccccgagtccccgacccccacgcatctcggccggcggccgccgccaccgcccacaggcgcctcgccccttcgccgctgctgccaccgcctcaccccttcgccaccgctgcctcacccattcgccgccgccaccgcctcacccctttgccaccgccgccgcctcaccccttcgccacagtcgctgcctcttcgtcggcgtcattgcatcggccctcttcgttggcgtcgtcgcgtcggccctcttcgtcggtgtcgtcgcgtcggccctcttcgccggtgtcgtcgcgtcggccctcttcgccggtgtcgtcgcgtcggccctcttcgccggtgtcgtcgcgtcggccctcttccgcctcttcgctggcgtcgtcacatcgccgtatcaccgccactaccggtctccgcatcatcgtctcgcataggcccgtaagcaggttcgtcggatccacattcattttttgtgctcctcattcactgagccagggagccctatatcagagtttagaccatcgagttgtgctgttgtggtgctccttattcatttgtttttttctttttgcatgtgtggtagatctgtgaatctgtgatgaattcctctcatgcaagtagcagcagcttcagcttgtgcagtgcgtgtgtgacagtcatcttgtgcaagtaatgtgtgtgacagtgtgactttgtcagtacgtgcaagtttgtggatgtttctcgttatggtattattaattattgatctttgcaaatgtaacatgctctattagaaaaaataacaagttatatttcttcgttgatttgtgaaggtcagtttgaggggcttttatgttcggattaatattcgttaccgtattcgtttcgattcgtattcgctccgtatctgtattcgataatattcgattctgttttcgtatccgggtttccgattccgatttcgattccgagaaaaaaaaatatgaaaacgaatatgataaaggtagtttccgaccgtatccggtccgttttcatccctagtaggtcgtctagttcgatgttgttcttacggtatacgtgtcggaccttgatcccatcaaacctcttctctagcttcctgacttctgcgaggtacttagataactcggggctagagcacttgtagtctttgtgcacctggttcgcgactagttctgaatcccctttcacgattagtcgcttgactccaagtgtggctgttgcttttatcccagcaagtagtccttcgtactcggctgtgttgttggtcgccctgaagttgaggtgaattgcatgcttgaactgatctctcgatggtgatgtcaagatgaaccctgccccttctccttggctgttgagtgcgccgttgaacgccattgtccatgtctcgctgtccgtttgactgtctgacctgttctcaggcatagtccagtcgattacaacatcagtgaggacctgggacttaatagctgttcgtggcacaaagtggacatcaaactggcttagctcgactacccatttcgcaatgcggccgacaacgtctttgtttctcacgacttctccaagggggaaggaggaaacaactatgactatgtgggcttgaaagtagtggcgtagctttcttgatgtcataattactgcataaagcagcttttgatctgtgggtatcttgtcttcgcatcgtggagagcttcgctgacgtagtaaaccttctctctcttgacaacaatgacattactcacagaatatggcgtggcagcgatatagaggaataattcttcattaggttggggagcaacaagtacagagggatttgacaggtagcgcttgagcgcgatgaacgcatcttcggcttcctgtgtccacacaaatttgtcttgtttcttcagcaggacaaagaaaggttgtcctcgctctcccatcctagcgacgaacctgctcagtgccgccatgcatccagttagcttctggatttccttgagtcttgtggacgacttcatgttctcgatcgccttgatcttctcgggatttgcttcgatccctctttcggagacgaggaatccgaggagcttgcccgatggtactccgaatgtgcacttctctgggttgagcatgaggcgatatcgtcggaggttgtcgaacgtttcccggaggtcatcgatcaatgagtcgcttgtctttgtcttgacaacaatgtcgtcgacgtaggcctcgacattgtgtccgagctggtcattaagtgccccttgaaccgtgcgctggaaagtgtttcctgcggttattagtccaaacggcatcttgacatagcagaatacacagaacggcgtgatgaatgctgtcttctcctcgtcctcttttgccatgctgatctggtggtagccggagtaagcgtcaagaaagcttaacaactcacagctggccgttaagtccaccaattggtctattcgaggaagagggaagtgatccttgggacacgccttgttgagatcggtgaagtcgacacacatcctccacttcttgttggctttgcgcaccatgactgggttggctaaccactctgggtggagaacttatctgatgaagccagctttgagaagcttgtcgagttcttctcatatggcttgtttccgatccggtgcaaatcaccgcagtttttgttttactggtttggcatcgggtcgcaccatgagtttgtgctcgatcacctccctagggactcccggcatgtcggacggctgctaagcaaacacgtctgcattgtcgcagaggaaggtgatgagcgcgagttcctatttctcatccagtgacgccccgatcttgacggtcttgtcggggttggcactggagagcgggacgatcttgattgcaccgtctggcttcggcgtcttgttggttttgctcactttcttgggcggctcagctatggcaggtgggttgggagtgtgctcgaccatgtcgaggctccgcttgtcgcactgcaccgccagtttcgcgtttccctgaatagtgattgttcccttcggtctaggcatcttgagcacttgatacgcgtagtgagatacggccatgaacttcacaagtgcagtcctcccgatgatggcattatatgctgtgtcaaacttagcgaaatcaaaggtgtgaaagtgcattaattcccctagtggtttttggtgattaatgacaaatgtggttaagggtctaatgagtttattgagctactttcaggtgcattagtccaaggcgtggaagaagatgtcgtcacctagccgttatacatatacaactcgtttccagctcgttgttagcctctcccaagtgtttcttgccttctccactcaatctagagcctaattcttgtgagaaagagagattgagagggagagaagaagatttggagaggtgtgaagactaggaacttgggtgagcacttggaatatctcgtgggctgtcatctcggtgcttattactcttggagatgatctcctagacggttaggtgtcgcccgtgacaattcgttgcatattgtggatgtcccgggtaagtttgtgaaggatctcctctcctccgaaagggaacgaggtaagttaatgaagttcttatgctgagattctagaggttttccaagtagagcaacctacacttgtggtggatttctagaagtaggttgagttggatcttggtggtcactcaattctagaaatttgtctaggagtgtttggggttgaaggctgtggatttcctctggggtttttgcacatgtgaggcaaggggttaatcgagacccagctttttggagctcctcaacggagagtaggatcgcaagatccgaacttcgagaaaaaatcgctcttatctctttctgtgatatttctgtggatgattctgtgatctatcctctgcttaaaatacctgtgcaccttcttgtgaagattggcttagtctcctgttttgaaatttgaatttcatctctgttctgttaccaggaagttcctgtcctagaacaccggaagttccgggcctggctggccggaagttccggagttccttactaggaagttccgggtctatttgaattttaccgccgcgatttgtttttaagttttcagggacagcctattcaccgcccccctctaggcttcatcagcgcgttcaaggtgatctgttcggaagttgtttacttggccgaaagtcatgggtagcgtgatcttgcccaatggcttggacgacgactcaggagtgattccatgaaagggttgatcagtgggtgtcaactcgcttcgtgggatccccatcgcgtccaaggtgctagcgaagagtaagttgatggagctgccgccatcgatgagaacccgtgcgaccttgatatcctgaatagtgggctcaaccacgatcggatatcgccctggagtaacggcagtcttggggtggtctgcttctgagaactcgatcttctgctctgaccacttcatcttggacgcagccccctgccatgtcgaacaaacttcgcgctccactttcttgtactctcgctttgaggagtacgccgtggaacctccgaagatgtgcgaaacatggagaccggagtctgggtacgctgagtctgagtcctgagtagtcgcttcggcggccttctcgactacacgtactcgcttgcatttctccaacgccagttgcttcgtgagtgcctttttaagatgaaataagtctccagagagtgcttgtccgtcttgtatatagggcaccatattttcttcgtgtcgtcgccttgtgggtttgggtgcttgggcgggtcaacgtgttctgctatgagaacctccgtttgcgctttctgtttcccactcctgcgaatctttttcttgcttgactcaggcgtgtccttggctggtttcttctcctctcctgtcttcgacttgtcgttcttgcgtctcagagcgtcgtccgcgtgagcgcatcaattgacaatctcgaataacttgcaagcagttgtgatatgccttgttgccaattcctgggttgtgtagcgatctcggacgctagacttgaaaacgcggattacagaagcatcggtgatctcggggatcgtatttctgcactcattaaatggttgaatatagtccctcaatgattcgcccggattttgcgttagcgcgtgtaggtcgtccttgatcgcgtggcgcttgtatgttccttggaagttagcgacgaactgttgccacagatctgcccacgaagaaattgagtagggcgggaggtgaaccagccatgaacgtgcagatcccttcaacgcaaccggcaaataattcgtcaatgcgttgtcgtctgctccggcagcatagagtactgtagaatagacctgaagaaattcttcagggtcggtgcttccatcgtatttctctattgctcccggtcgaaacttctcaggccatcgaacatctcacaaagtacgagtgaaagccttgcacccaccgccaggggcagtaggttgtcggcgatcatatgctcatcgtggatgtctgtccgatgatgaagatgacgaagatgacaatgatgatgatgagtcacttggttccggggcgcgatttcgagtatgatgctcgggttcttgcaagcctcatcgtcgcccatagttgttgtcccggcgtcgatctccgtcgtcgtcattgtcacggcgtcgacctcaactggtatcgcgcggcacccgctgctcgcgtttagtatgttcgcggcggttgtggcgatcatcacggtctcggttctcgctcggacgtcctccttgttcttcgttctcgcgatgtcgtgaagagacacgatgttgggaacggttttcgttatcttgagtgagtcgcgcttctcggcggccatttagatggtcacggagatcactggtgccgcgaggtggaggggtagcttgacgaggtggcgtccactgatcaggctgttccccattagcgccgccggtcggcggttgttctggtggtgccctggcggcggcctctgcgaacgcgttattgaagttagccactgattcccgtagtcattctgcccattgatcaagatcagtgttcaggacgggatcgaaagggctttcgttcaatatcgcattgagggttctgatatgttgggccggtgtcggtgtaaccgattgatccgccgttcccgtgtggccgcctccagatgtgttggttccatcgatagcatacacgtcgcgtggtgtacttgtcgatgatgaggcctggacttcgagcagatgtaggacagatggctcatagggatcgatatcgattaccctgacgaatcgatctgatgtagtcgccgcaccttgttccttgtcctcatctctaggagagattcgtgaccgctggaccttagggggtgacgtcttaatggcgctgagaaggaccttgcagctggagaggtcgtgagtctttgccttgtggatgggacaatagacatcatgagttggagaagtacgttgaattccacgctctttgcaggcacggacttcagcttgtacgttgaggaaaaccgaacaagcttgcaaggtgtgcttgctagtcctgtggatgggacaccaagcttttgtcgccccggaagttgtccttgtcggctcgtacttcttgtgggaaggataagatttgaccacattaggatctttctcaggcttggatgttgtcgattctccgttctccacttctgcgggaggatcttttgacatggagtcaaccggggtcgtaaccacgccgttctcgctcccgataattgctgggccagtcgagattggcattgtggtgtagagcgggaagacgatttcgccgacttgagtccacaccagcatcgtcgaagttgaagctccttggttgatgccagtgttgacgctatcgtcgagaaggcttgaaatcataatagtagaaccttgagcaccaagttcccctacctgatgcgccactgtcgacaagggatacccgtagaccggatataaagggtattggggtccgttggtacgaggatcgacgtagtacgacatcaagcaaataaaagataaggattatactggttcaggctccttggtaggtaatagccctaatccatttgatatgagattatatgatggaaaccacaaattacaaagggaatagcagaactcgatgataccgacgagaccgtagtcaagttggtccgactagatctcccgacgacttggctcctgcacgctccggctccgtaggctatggtgggtgtattggcggtgatattcgatgtcttaggtcctacccagggggtcccttatataccgcgggtcagttgatctccaagtaggactcagagatatcgtacccctcacgatacagtaaagacccagtcttgtctgagtagaactccttccatccgtagataccatccctatcacgtgatagattttcttaatgtatacggaatctatccgtatacgcgcgggtataccgtatcagtgtacaacgcacatccaatgatagagggtataccttatccgtaaccctgatagtagctcccgacttctgcttaaatgagttcatgttaccgatcgcggcttctgatgtcggaattgttgtcactctcatctagtcgatctcgctttcaaaaatggattaatctgatttttttaagtaactttcgtatagaaattttttacaaaaaaatacaccgtttagcagtttgaaaagcgtgcgcgcggaagacgaggaggaggagttgggaacctgcccaaacgaacagagcattagagagttattctaatatgcaactctgcatggtagacaagttcatatataggagttgctgtgcataattaaatttgcataacgaaacaaacacagctggcaatggtggcatcatcactgacagtaagcaaatgcatgctgcagtttagcaccaagttagtgataaatcgagcttaattagcactagtgtgcgcatcttggtgcaccgaaaggttaggtcactgcagtcgcttgcttccccaaggagtgactgagtgagccagtgacccagtgacccacacgatatatgttggagtcggaccaaaacattcctccagatgtcggtgcttttatagagactcttctcccttttttttatcgcaccacaatttaattaacaccaataaatataattaatatgagtcttttatgacttatgaggtataaaaaaaaaactctgttgagtttttattagcttgataattctcatatctccctctccctatctctctccgaggggtaaaatttacaccgaacttagataatatctctctaaaatggaattaccagcatagtattaaaattaaaaaaacaattattatctaaacatttctaatcatctaaaatgtggtcaacttatcagataattactccctcaacctagcttgaaacagattattggccaaattataagtggattattaactacactattttagaaatagactaaatattttgataaataaatgtaactgatagcttctaagacatctaaataaaacagtggaaggaagttttataaggaaacatggaaaaaataatctgtgacaataatttggtgaagcaggtgaaaataataatgcaatataatgttgacataaacccaatgtttgactactcatcttattaaaaaatcagtgtaaatatgcaaaatatatgagtgataattttagtaataaaagaagtcacaaaaaaataatgtaaataatatttttaacattacaaatagtcaaatggcatgctaaaaatcaacagtaattacaatttttaaaaagaggtagtagcattatgagaaaatcccgtctccaaacaggcaaacatgggttggccacctctttgtcgaccagctagaatttcctttccgtaaaagccataaatcattataaactccgtggcttgcatctttgtgatatgatgcatctcttcttctttatccttttaaaaaaaagggcttagaaaagtttattaagcattattgtctggtatataggggcattcaaattatgtcttggtcagctgtattgtgttgaccacttcaccagaatgtgataaaataaacaatggacttgccaaaaaaaagtttgactggtccaaaataagtacggaatatttgatatataagggcattcaactgcgtacagaccaaacttccccaataaacaactcaaaaagatgcttatagtattagcaattgtctgctctctatgcattttgcagttatacttggtatttgcaattttgtattttgtcccccacttccccagaaattgtaagaagttttaatagcctttgatacgcacatgcgtgatggtactacactcgaatcggtggtcaagggtctcttattccactataaatagtgtagttttattagaattgctagtttaaaaaactatgtggttcaatgctagtcaataataaagggggttggggatatgtctcatcaccttatttctcattttaatttatttttatttttattttttaaaaataaacttatggttgtatgtcttatgacagaaccaacaaggaaaatagacaaaacaagccagcaagaaggctaatcataccaacaagtagcattttagtacttacatatacacaaccctaattcgtgatgtttctcagaattgtctttgacatgttaatggtatagataaaataccctttctatctataaatataagtatttcaagcatttaaaatttaatcataaatacaagaattcttagagaactacttatcctatcaatcagtattatttaatttttttatcttacctcaatcaccttctcatctctaatcatcactcatttaaagtgaggtacaaagttttatcaaccttaatctttattaaataacccaaaaataattatattcatgtagagacagtacgtcacaaaagtgtcatctaattaaacacggttacacgaccacgtatgcccatttgcctacaagaaaccaagccatcaactagcagccttgaagttcatacccaataatttctcaaacattacttttgtctgtttcttaagcattgtttaccaaacaaaataaaggcaaagagaattggcagaaagaaacatgagagaacacaacaacaatcctagaaagggcctatccgtaataaatggttgtttagattcaggctaatttttatccatccgaaatattgctgacctcgaatatttggttcgatacgaattttcgctcaaagtagttcaaattgaataatactaattttggttatacaaaagcttactaatctctactattataaaaattgaagatatttttgccggtactttagtatgtcatccgtgtatgagttggttttaacttcgtttacattttgaaaatacatatccgtatttgagtttgtttttaagtttattcgcttttgtaaatacacaaggagtcgtataagatctctttaaaaaaacttgcatgctaacttgaggctatcgaactcctagttgcagctcatgattttctaaaaaaaatatgggtctaagagaattctcacagtgaaatttcaactcaactaaatcataaaatatagtaagattaaaataactttccccgttgcaatgtatttgttttttttctaatatttaaaaaatataactggctcgaaaccaaataagctctcgctaaataggaagaaaccaattgcaataaataaattagtccaatgcaataccaccttcgtctccatttttaacccaccctctctctctctcctctcatttttctctcccacaaaggcacaaaccgcgtctccctctccctctctccgcccatccatcctcctagagagggagcgcgcgcaaggaggaggaacaagggctcctcggatcgggaccagctgaggtgagcgctcgatcatctcccgttttctctcctcggatctgaccatctttcttgcctttgttttctttcttttttcttttcttcttcttcttttcccctacctgttcttggtcgatcggggatttcgctgccgtgaggctgacccttcttgtggtgcggtggtggcagtgggtaggatggctgcttgatccccttgattttagtattttattttatttttcagattagatgcgtagtgtagctcgtacctcgcattgcccgcccaatgcgtgttcttcgttttctttaatttggataatatatggcactgaatttatcaagtttaaaaaaatgtcatcgtattttgcttaactttgtcaccatcaagtacacctagaacgaaaatttccaaaattagacggaacattccgaaatatcgtattatagaagttgccctcgcgtatcttccccctttcccttggcgtaaaagaaaatctccggtgtcgtctcctccgctccttgttcccaagacgagtcgcggctgaacaggggaggggaggggatcctggtgagcatccacatcctctttctgattcatctctgtcccaccgggagtacttttgtctagaatttgcttgcgttccttctcttctagatctggaagaagctcttctcttgttaattttacagagagccttaaccttaataccagtaacagtttgtttgttcccccaaaaagtttggggattcaacgagttgtgagtttctggaattggagggacagaggattggcatgttgattcttggtccgagcatgtttaccaattggcaggaaccggcatgcggttcagcactgaactgtagcaggagatgagtttcttgcctggatctggagccatcatcagtgaagaaaaggaagatttcttcaagaattcaatcacaagtgaggtttatgcggttccactgttgacagggatagggataatgccgcatgatgggtcgttttcagtacagagtgcacactgatgaacgctgtgggttccattgttccacctatggaaattccacggtcgaggcagagagaaaatggctcatgtgtggtgactggtggttctgttccactatgttttttgttctgactttttcccctcatctgaagctcgtgttaaggtcatatatggtttggtagtcctaattgtcatgtattaatggccagatggattggtagagtagtatgtttgaatttcctatgttctaatagctgaatttgttaacttggacttagatgtagctacaaattatggcctagaacagctatatcattatttcccgacctgacagaggaatctagagcttggctgcagatttagttgaatagtgtgatagtatctctgtgttttttgttcattgcagtgatgtatttagtgtttcagtatgagctatcattgattacaaatttacaatataacatatttgaagcgtttggacaatgtgatgacgaggatatatttgacaaatttacaatatgctgatgtacttgtgtttcagtatgtgctggtaacagaaaaggcataatcctatcacttgttcactgccatgggagctgatatacaatgattttttcctattgatggaaaataatatgatgctccagatttatgttagaataagatgcttctctatttattaaaaaaatggaaatataactaggcaaagccatgtaatgaagaagatatggatgtttgtcaatattcatgcacattgtgtttgcataatgaaccaaaccatttttagaataatctcatttaacatatgttattgattggcaggtgcatgcttgaaaaatgtgaatgtgtgtaacattagtgtttttgtatgttttaggttggataggtattttaatgaaccattgtaatagtatgacaggtccatgccctttaatgtcatgtaatattcgtacagtagaggataattgtttgtttccagtattcagaagtgttgattcaactatttgtccattattaaaggtctactgtaatttagaagtggacttatttttgctttcttggtaaaaacttgaatgataatttccttgagtaagatcaagacgtatggagcttgcaactgatgatatctagactaagacggtataatttagtaaacctgtaactgtattattgcgatgtttcagtttagctttaggtaatcaacacatgtgcatatcatatttctttaagatgtatctcgccaagcataatttttcagtggcaacttgcaattgagttcttgttgagttgacctattaatttattatcgcgccatataggcatatgtgtgttgaattgaatgcttgaagccttgaagcatgttattttcataatgcaatctttctagctagtatgtactatgtagtactagtttgagaatatatgtgtttcctcatcttttttattttatttttctattggacaggatttgaacaagtcagcttgtcgccaccatggttcttgattcattatcatctcctcacaggaggtcacagaacacattttttctatcatccccaaagaagcttcaatcatcgaaggatgatgttggcagttggtctgcactggttgagcggcatcgcttcctcttgacaacactagtggttctggtctttctgtgcaccatctatctgtactttgcagttaccttgggggcacctgatgcttgctctggattagcgggcactgaaaaggctgtatgtcgggcaaaatctgctcttcgacatggaaaattgaaatttttctagcgctgtcgtgcatactctcgaagaccaagttactgaggcttacaatgcgctcttcaggtcacccacagcttattcttcatacattgaatctgtatattttgtggtggatgtattgctttgtattcatgttgtactttgttgagagacctgctattcaatagttgcaacaaatctgctagtgatagagagaatttatatgttgtgtaaacggtacaaggtaggtcatcatattattttttgtcatggtgtactaaaaacaccatgccattactaatccatccaggagaccctgatactgtctccatcctggcatactgtaattcatttgaaactgcatgatactatcaagtgttagtagtgattaccaagaaatttcacaatcttagcttgttctttggttcatttttgggtttctatctcttttcttgagatgctgcggatgttcgcctcgtcatcgtcaggctgtatatctactgtaaaatttggggcatttgcaaatttgcctccggtttttccaattttgcaaggatgccactcgaatgacagttctagtggtattttgcaattttctagtggtggttttgtaataacgattcaaagtagtggtgcttgtgttcagtcttctgccgtacagcagcaaaagtggttctatcaaaaggtactattcccctgttccataatactcagttccacaatgtaaaactttttagcattactcatatttatatacattgtgaaacggaggaagtataagcaatccaagcatttaaaatttatcttaaaatataaaaaaatttgtgcctcatacccgtaataagggacgtcttattttactctccttggtaatctctgaaaacccatgggacagggtttaatgagggatgccagtccttttacttactctctcgtcctaaaatatactacctcctacttactctctcgtcctaaaatatactccctctgtcttataatataagagattttgggtggatgtgatatatggtataatagatctggacagacggtctatctagatccgttgtactagaatgtgtcatatcaacccaaaatcccttatattataagacgggggaagtagtaatctagtaattgtttcatttcaagatatatacaattgaaagatagcagaagtggctcaaatctattgacagatagtagtgcagacagtggagggccaactgaaacaagatgcttctgtcgtcttgccatgtcagacactaagcaagatgcataatcttgtgaccactgcaaccaccgatgatagatgctgtttggatttgctgtcaccagggacttaattatggggttaggctttgtttggatgctaagaagatccatgacactccactggagctccagatccatcacacatcccctgcttaaccactgacattgatagtgatagctcactggtttagggtttaggttttgattattcaataatggatatggtctattcagtttcaccccttcggtttgcaatttattttacctttctcagctttcttaaagtccccaattggcccaattcggcattcgggtgttttgattaaatttatgttttgcaagctttcttccggttttgttcgtgtaactttagccatgtttacgtgaaactttagctgtaaattcataaatgagccaaattagtgaccagaaatctcacgaatctccgctttttctatggttttgtagcacctccaactcttttaaaacagggcctttaatattgcttggattcgtaacgaaatttggatgggcttcaaacacaacaaattacagcccagcccaacaacacatagcacagaagaaggaaaaagtacaccgaaggtccctcaacttgtcaccgagataaaaaaacgtcctcaaactgcaaaaccagatatcgagggtcccttaatttactaaaaccagtcacaagtggtcccaaggcagtatttcacatggttttatcctacgtggcgctggttttgtccaccgtggcgctttgaccttggtcttcgttgctgagtcaccatcgccacgcgaagctggtgggacggagtggggcagcgatgagcggacacgcgggcggagtggcggcacccgaagccggcggggcggcggagccaagcggaggacgccagcctcatcgtcgtcatcttccggcgtagggcggaggacgccagcctcatcgtcgtcatcttccggcgtagggaggaggcgcgggagctggagccggaggcggaggaggggctccgctagaagccgctgctgtagaaccgggagcgcatcatctcgagctccagctccgacgccgcctcggccgcgtcagtttagccgcgcccccactccgccgccgacgccgccttgtcgtccatcatatcgaacgttgacgcggccgcggtcatcgccttggcactccccgacagcgactcgtccggggcggccctcctgcagccccaccgccccctgcggcggcctcggctcttgcgccgccgcttcatgacccgccgcatgacgccggcggggaacctgacggtgacgagcagcaggatcgccgctcccttcctcctcctcctcctcctcctctctctctcagggcggccagcagcggtccacttcgtcctcgacctcgccggcggcggcgagctgttctccttgccagcggtggcaggggcatgggcgagagaggatgagctcgaggaggatggagaaggcagtggagcggcaccgcacgggccgctgcttcccccgccgccagcgcccgcccgcacgccgctcctcccccgccgcttgcgcccgccggccgtcccccgtgcaattgcttcccccgcctgcgcgcgcccgcaaccacctccgcctccggtactgaagccgccattgtcgtcgtctacttgtcttcatccacccccaaaccgttgttgcgcctagatgtgcgccgccgtgtagccacccctttcccctcgggcgccgatcgccgcgccgcgccgatgcgctcggccattgcccaagcggagccgacgccgccgctggcgccccctccaatcggcgccctgaccttctcctcccggcgccactcccttccctccctccctcctctgcccggcgccgccccgattcctcccctctgcgccgcctcccggccgccctaccaagccgccgcaccgcgcagcctctctcctcctacgcgtggctcctgcgcgcaaccgcgccgccaccaggctctctctccctgccgccaagctctcccccttccacgctgtcggccccctcttccccaccgccgccggccatcacctgcgtcgccggcgcccatcctttgctgcgcgcgcgtgacagcgtgcgtgaggaggaaaaaaaggcagagagagaaagagaacggcaaagagaagaaaccgtgagaaagagacaaaattaaaagagaaaggaaagaaaaaggaagtgggacccccctgactcctcctccctgtgaagccatgaagggagagagatgtgacgtggcaacttgacacgtggggcccacgctgactcagctgtcacgtaggctaaaaccgggctcaaaaccatcgaaggacctattatcaccggttttggtaagttaagggaccttcgatatctggttttgcggttcgaggacgttttttaatctcggtgataagttgagggaccttcagtgtactttttccacagaagaaagtggaacgaaagcccaaccaaattattatccaggcccagccaacggcgaccacaaaccgagcagataagcccatccacagatcgggtggctcccgtttgccgcctaacggcaacctccccacccaaaaccaaacgccgtcacctctcaaccccgccccaactcaaagcctcttccaaatggccctcacagccgccgtctccgtccccttcgccgtcacccctctccgccgcctctcctcctcgacgacgacgagggctttcagcttcagggtgtccgcggcggcgatggcggcggccgcgaagacggcggtgcagccggccgtggtggtgggcggggggcgggtggggcaggcgctgctctccatgggcccgccgggagcggacgtgctcgtcggccgcggcgagaaggtgccggaggacgcgcccggcccgatccttgtctgcacccgcaacgacgacctcgacgccgtgctcgacgccaccccgaggtcgcggtggcgcggtacgttcgtccctctcccggctctcctctcctctcctctccgtctcccgcctggcagccgcgccgtctcctgctctgcattgcttctgcttgttagctgctctgcgattcaggtcgttcgtcagtaactcagtatgcgtttgattggtgcctgtggtgcatcgcttcgttttcacccgaaaatgcggacggcttggacgaatttaaccaagttgtgccgtgaattggagtattgttgttgaacccaatttctcaaacttgcttagcagttgagttcagttcagttcttctttttgtttagtatagagtttgctattaactgatgcccgatagtccaatggaaaaaaagtccggatctatttctcgaatgggtggtcttgggaaagctggtcatagttgatgtattatgaacgcgattgtaaagcaaattcgtttggtgactttcagattggatcagctaactgacaagaatgctcagtaggtttcaaaaaaaaaaaaaaaaacaagaatgctcagaattccggatattggatattagacaaacagacatatagtgcttcagaagtttaatccttagcacagttgtcaatacatttctacgaacgtcatccttcctaaatagtataagtgttcactttcttcttatgtatgagctgatgtagcatgagcccatttccctcccagtattggtgtgtgcagtgtgctggtactttctgagctaacactagagcagatttggtgtttttccagaatggaatgttggacccttggtttgagagcaagggactagtggatgcgaaccaggtgttggcctactttgccgtgtcgaagcttggtgagccaccagtggatgggattactgacactaatcccgaggggctgactgctgcatttggaaactgggctccagccgtggctactcgcctgcaaaatggcgggcttacctgcaaggtgggtttacacagttacattagttgtacttctagctgatgctcataaattgcaattctgcatgccttcatcacagattaccatcatttctactaagatttgactgtaaatgcacagtaaggtgaaggaccattgataacaaagtgcgtagcaaaaatgcactcacatctttgtttgtgcttacagcacattgtaatggacagtgcgtgcacgtcataaaatactcaattgattaacaatatattcttgtcatgtcatgtgtaagattttaaataaaacgaacaaaattccaacggtcaacaaaaaataatgaaccctgtgctgttatatactgacaagcatatccattagttgtaagtaatcctgttgtgattgcccactggaaaatcaggtacttgaaaaagaagcatttcagaagcaaatgctagagaaactgatctggatttcagcattcatgcttgttggtgcccgtcatccaggagctactgttggtgcggtcgagaaagaataccaatctgaggtaacccttattccttaaactttaatatatattctgtgtttctttctctccattaatttgaagcttagaaggcagtaagttcccaacacaacaaatttgtgaggaatcccttcttgtcataacacagaatcttcgagatcctctgcaatatgctggtttctaccaaggcatatattaattgcaagcaaaaagaaaaatgaaatcattatttcctgattgtacttcctgcataaaattgtctattgtcttccatactttattcgtccacttaagataatagctatttatgatttagtttactttggtaattttgatgggagtgcctgaagatagagacacagttttacgtgcaagacaggatttgtcaagagcaggaatagtgttcacacgtgaccaatagtaaccagtgaggtgtttgttatcttagagataagattatatctactcttgttaactatgtccttagttttatagataaatttcttgtgaatcaagtcatctcatctataaaaggaaggactaaatctcttctcattgaccagacatgagtaaacaaacaagtcccctgtctctaaactctaggttattcttgacctacgtccccaaccggtgtgctactttgcctagccgccatttttactttaagttgccaccatctaatctctcttcgatgaatactatcccaattgtgtgaatcaaggttcacaacataaaaaaaaaacatattcatttatattttgttctcacaggttgccagcctgatagcagaattagcatctgctgcagctgaagaaagggggcttacatttgatgcaggcatagaagagagactttgcgcatactccagagctgttgcacacttcccaactgctgtaaaagaggcaagtcctgcctatcataagctatctatataacaattaaacattgcctattctagtgccttttaaattaaaatgtaagctttccatggagcagttcaagtggaggaatggatggttttactctctcaccgaaaaggcgcttgcacaaggaaagccggatccatgcccactccacacagcttggctcaaggagattaaggtcatataaagaacttttatgtacagaagatgtgtggtttcgagtcatgttgatgttatccatatagagaaaatcgcataatctgataaactacgttaggtgcctgtttgatttgagtttagttagcctgttatattagtaatttacatgtcacctgtgtcacaataaacctttctatgtgaaaaattgagtgctcaagctggtcgttataaacttataatggtcaaagttcgtgataggcaccatatacatataatgtttgctgttactagtatctgctggctatattaacagtaaatgctacgctacgtactactgttatgcttctgtactgaatagtaactatgcaatatctagaccatccaatcaggatccaactgtggctacagcaactgctacagtgtttggcttattcgtggaataagccaaacggcatatttgcaaacaagaagtaatttgtgaattaaacttttatatacgtgttcttagcgacctaaaagcaaaagctgaaaaataaacttcgatgaaaaaccccaaaatcagcttcaaatttaaggtcgaaaattcaaattttggcttataagcataagtataaacgaaaagatgaggctgcactggatgccaaattgattattaccgagacacaacttatgatgcttgaataacttacaaccacttttatccttttccaatagtctcctcacacagtaataatcaatggttccctattattctctcctcatcctcttttaacttttgaggtgacgcctcgtgtaggttattttccccagtagcattatacagctaaactcaaaccttctccacctctgcatcttcagctaaagaactattgcaattatttcacgccagaatgacaagagcacatttcctttacttctcctgatgatcacacctccacagagttacatgaatagttggtaattattcagattttgcatacatgcaacaaatcttttgcataatcttcttttgtagatgatcaacttggccaaaaaaggcaaatctccaaggctcaaacaaaagcagtaccccgaaccacagccaaaatccgaagaccagcccagctaatacggagtaaaaccagcttaggatttcaagttcctggctgtctgtacttccccctatcaatgctgatgtagaatttgaaccatctgaacatgaaatgttcaatgggaagccacataacccaaagttgttgctataaattgatggatctgcaagcgtccggagttgataaccagatggtatctcacctgataaatgattgttggacaaatttagtgaactaagagacatcaaatttgagatgcttgaaggaatagagccggagagttcattccaagaaaaatcaagagactcgaggatcttcaaattgccaatctctttaggaataatgccagatagatgatttctcgacaagtttaggaacctcatgctttcaagattgcacaactccgaaggaatctcattggagagatagttgcttgatagatcaatacctgccatgagtgcaaccgttccttggaaagtttggttttgcctcttccagtttatgccaattcggtctgtgtatgtgtaatcaacacgcccatccaaaatgtggtgttggactttccaaggcaagttcagttcagtttttggttgtatcatggatgtaaaatttccaaaacttctcggtatcgaacctactaaattgttcatagctaggtccaacaattgaagatgggagagttgtgatagttccttcgggatactcccattgaacacattagatcgcagaatgagaaacctcagtaagggattgcaagttccaatccatgagggaattgtgccagtaaaatggttgccaccaagatctagaattattagccacttgcatccctttaggaccattggatatcccccagtgaggttgttgttagcaagatgcaccgattccaatgatgaattagggtaagccgacatcggaggaacctccccagaaaaggagttgtatgacaaatccatgaataccaggtcctgcaagtgccataggcaactagggatctctccatggagatgattgtttgacaggtccaagatttccagagaatccagctgacaaaatgtcaaaggaaattctcccgagaagctgttgctggccaacacaatggtcacaaattgcctactgccaaaatcacttggtatagtgccactgaacctgttattgctgagatcaaggccatagagattcctgagggatgatatggatgcaggaacctcaccctccaatcgattcgtgccgacgtcgatggttcgcaacgctgtcaggttgaagatttccggtggtatcacgcctgtgaagccgttggagaagagatccattaccaacaggtctgtcaggttccccacggaatttggaatcggccctgtcaagaaattatccgctagctccagtgcctgcaagcttgccagccttccgatctccgccgggatctcgccggtgagcttgttcttcgccaggcgcaaatacttcagctttgtcgtgttgcagatcgtcggcgggatgctgccggtgatcgagttgttctgaacacggaattgtgtgagttctacccagttcgtgaacaattctgaagggatgtcactgttaagcctgtttcttgacacgtcgaacacggtcatcttccccatggcggagagcgacctcaggataggaccgtacagtccattggaggacaggttgaggtagctcagctgttgcagcgtcgccggcgacaatggcaagacgtccagtatgtggccggcgaaggcgttgtcggaaaggtcaaggtacgtcaggttgctggccctggtggagacgttcgctgccacgacgccggcggtgatgttgttgcggcggaggtcgagcttcgcgagcgccgggaacgcggcgaggtcgagcgcgcggagctcgccgtggagccctgcgccggggaggctgagctccgcgacgtggccggcggcgtcgcacgtgacgccgcgccaggacgagcaggcggagctggaggtcgccggtgaccatgtggtcagcggagacgctgacgccgccgccgacaaggtggatttccaccggaggagggattctgcctcgccgtgctggatgatcgtcgagctggaacacggcggcgtcgacagcagcagaagcagaagggagatgcggagggggatgatggattttgatgcgtgtgttcgtgaccggagagccatcagtggcacatcgtgttcttgggattactccctacagtagagtagacggatgatgaactgacagcgggtcaaagatttggaaggagtccatcttgcgagacttgtggtactagacaattcatcctcatagttcctgtgctactgttatttgacatctctatcgaacggataacgcgttagttagagcaggtacaatagcatactgctagctataaacagaagataaaagatgagagagaagactacagatttatagccagctgcagcacatactctaaaatacatgtgtgtatgataggtgagatcgagatatggtgcaattgttactacaactgcaactttagcagttgcagtgcagccgatggatcaaaaatcaacggctcagatgacaggtaaatactgttcataaaatactatagcaaatttgtactgtagcgattactgtagtatcaatggtacaacaggatgacagagtgaatcggagcgttggctccatcgatccaacggttataatgtgctccgactgctaaagttgcagtcgttactactacatcaccagatctcaattcatgatatgtgggactagatattaattgtgtagtatatgtttataggtgattattatatgaattagctattaaattgaccatagatgatttgaagccaacagtttgctatactactccctccatttcataatgtaagactttctagcattgctcatattcatatactctctccatttcaaaatataagtcattttagcatttcttatattcatatatatctagattcattaacatcaacatgaatgtggaaaatgttagagtgacttacattgtgaaacggagggagtagatgttaatgaatctagacatatatgtgtgtgtctagatttattaacaactatataaatatggataatgttagaaagttttagtattaaacttgctcttatgcctctctcgttgttgtgctccaataaactctgtttaagacagcacatgaatcctcttcgctccaatcctaacccccgtcacattctcccccatctaatcctaaccccaaatcaaagtcagatccatcaccatcgtcatgacggccgcccaaaaagagaggtagatggtgctgaccatatctaacttctcctcggattggtaaggggctgtttccccgaaaacttttcccaaaaacatcacatcgaaactttggacccatgtatggagcattaaatacagataaaaagaaaaactaattgcatagtttgtatgtaaattgtgagacgaatcttttgagcctaattagtctatgattaatcatactacagtaacccatatatgctaatgacggattaatcatgaaattaattttttcattcgtgcccgaaaacttcttccgatatccggtccaacgtccgatgcgacaccttaaaattttcatttttcaactaaacaggccgtaagtatctgagattgtacacgttcctggcagatgaccatgtgattagaggagacactctgcgtccgccaccaaccagccgacttttgacacgcaattcacaggacaacacaataaccattgtactttcgtaacgacgaacggattcttttcaagcaaagcaacaaagatttatcctctttcgtggaagaatcctgattgttgaaatggcaaagataaacaacacctcggatcgacggaagaatgctgaaaattaccccaagtaccaactatatgataaaaaaaaaataacccacatgtagcggacgagagcctagcaatcaactgattgggtccaagaacatcagtgtctatcagtgtttatcagtgtctaatcgacaggcatgcgaaattttctgagcatgaagcccgcgtacagtagcaacgatggcaaggtaaagcaagtaacaacgccgcgggaaggtgattttaaagcaatgggactacctatttcagcaggatggtcagcggacgaagaaagaggcaacagctgtaatatctttccacgagagatgcagcagttgtgtccaccagatcttgggcgtacacaaaagggacagatacccaagttgcagtcacgagaacttaagacacagaaagaagaggaggagcatgaaatgtgatttaatcaaatcaaaccgatgatacccacaaataagacattaaaggagaagtgcattaataagggaggatatgtcaattgtggtcttgaagatacactcgatgtgcttatggatgtgaatatcgtgtttgagctccccctaattttttttcaacacctgatatagaggtcacaaagctcgttcttggttcaaataacactttgtctgagaagctaaaaaaactaagtgagcgcctaaattaaaggctctaattaacatattggttttatagtggttgatggaggttaatatttgtcacttccattctattctaaattaggccgaaaggagagtgaattaatgaaaactagcatagggcttagtggtttttatgggagttggctaaggctaagggtgtttatgtctatagagattattgttggaagtaaaaaaccatgcctactacttttttgtgttgttgatgttaagtgtagtgtaatgttttattaggtcgtgattggattcatgataattgttgcatcacatatactttacatcaatgtttgatgcaatggattaatgctaacatggaggtggttaagaccgataactcagcttgtatcaccttgatagacacaccggttgattagcggaacaacaacatgcaatacttgataggcagatattatcagactatgattaatatagtactaaggatggttttgtgccgatacaagctaaaccggttattttagctcgacttaataatctgtctttgtaagtgataagtaaaaaagatagtatttagtggttgccaatgcgtactgagtattatttagaaaagaaccatatgcatgaaacttcataaccaccatccaaagcggattctccgcacatcaccaaactcctcaattgtttcatgcatattattctttgcagaatgatactccgcagtacgcttttgcaaacactttatactatcttttttactcattatttattaagtcgagctacactagctggctaagcatgtatttgtacaaaaccatccttaccaatactaacataatcgtaggccagcaaatctctaccaatcaatcattgcagtcgtattgtcaatcaaccgccatgtctatcaaggcaatgcaagatgatttgtcggcctcaaccatctccacatcgacatccaactattgtatcaaacattgatgtatagtagaggagatacaatagtttgcatgaattcaatcctgacctaataaaatattatacctacccataacatcaagaacataaaaagcagtaggcatatagtatatatatactttcaacagtaagtttcatagacataacacaacaccttagcctcagccaactctcccaaaaaaccattacactccatgttagtttccattaattcactctccttctggcctaatttagaaaggaacgaaagtggcaaaatatcaataccatcacctccatcaaccaacatacagccaataggttaaaacagaggctttaggtgctcaccccatttttctgaattttcaaacatagcattttttggaccaagaatgagctccacgacctccactctcatgtgtttgaaaatcagccggatgctcaaacaccatcttcacatccatgagcacatcctgtgtatcttcaagatgatcgtcgacatttccttcttggtacgcttctccttccatgtcttatttgtgggtgtgtcggtttgatttaatttgaccattcctcacgctcattcttttctctccttctaaagttctcgtgatcgcttattctgcccacattgctttcgtgtacgcctaagatctgggttttggttgcgtccctaatgaaaggatattgttgcctcttgaagaaacatgtttcttcgcccgctaaccatcctgctgaaattaatcattccattactctatactccctccgtccaataaaaaaaaacaatctaggataggatgtgatgtttctatgtccagattcattgtactaacactactatagaaacaatttttctatacaagggccctataaggttgcaggctgaccataactggtcgcgccttcgaaaatcaacctatattttcacatacggctccttaagaggtccgcatgcaaaaatctattttcgtatgcggacctctaagagagtgatatgcaaaaataagtattttcctcggtgggtctcttaaatggtcgcatgaaatgtattttcgcaggcgggcctcttaaatattcgcctagaagtctgacttacttccttttttccctcagcacttcaatttttttttgaagtcatcgttatctcctctcatctctctctctctcacctccttcctcctcatattatacttctctcccatttctcaccttttcttctctctccctcaactcccctcctgggaacggctagtggcgggcacacggtagctagccggccgcccccgccgttgacgcgagggagacggccctaccccgccctcgagagcggcggtagcgggagcgagcaagccggtgatcggatccattgccctcgccctcgggagcaacggcggcaggcagaggcaacacgacgacgacgaccagcggtgttggctgcgacgggcggtagcagctagagttttggaagaatcggggagctagggtttcgggctatattgctttttgatattttttttatttttttttgccgaaactattttcacgtgcggtcagcttagatgaccacatgcgaaaaaaatagcaatctttgtagacacatgggtgcaaaaggaccgaaggcccgcatgcgaaaatctattttgatcctttgaaaaaattcttctttagtagtgtaggaaacatcacattttatcctataagttggttttttatggacggatggagtgttaccttcccatgatgtcattacctgccttgtcattgttgtagccgtactggtaagtgggcattgcgcttagaaatttccatggctccgatgcacacggatcccattggatgattgcatgctgcttcttgcctgcaggcaggggcggatccaaggggtaggcttcatcaggctcaagtttgccttccgatttttgcaaaaaaaattcaagcatatagcatttctcacatgggagcagttggagaaagcggggagaagagaagaggcgaataactgcgtccctgtccacgcgatgaagaagaacaggagtgatagagctgaaccgatatgcactaaacgacccaattaaccaatttagcaaaagcccattaaatggcgagtgattgccggcgcaacggtgacgagcgacaccggagcgaggctacgttatgacctgagctcatgagagatcgaatcatataaactaacaacaaatacactaataactccagatagtttgagaagaaattgggggatcgggtggagaacaagaagggaacaaaggaagaagaacaataggagggaatcagattcaattcatttcatttatccctctcctggtacatgtttcttgcattatcatggtagtaagactgactagtgggaccccaacgctggatacatttgtttagtacgagtatgacattatggccgagggaagtggactgcgccactgcagcccgcaagtgtgggtgtcgatttctaagatcggcaataaaatttatagggtgcgctagatgctagaaagaaatggtgacacagtgatttatactggttcaggccctcgggatgaggtaatacctagtccaattgtttggtggattatctttgtatcgagtgttgaatgaagaacgtgtgtaaccctctaggggtgctgtcgatccccttaatatagcagcagggtgaccggcggcaaggaggatgcaatatcccttacaatccgggctcctgccatccgtcaagatatggcgggatatgtttctatctccttattcctcaccatttatagtaacagattacatgggcttgggcccgtagcatgctagagatctggcctttgagtactgtgatgggctaccccagtacgataactcccacagtgggccgtgcaggcgtgccgggccggacaaaccaggaggcaggagcctaggaagtgctgcttccagcttgcttgctgccataaggccctatttgtttcagctcaaggccctatttatttcagcttagaattattataatctagattattagtagtaatctgaaataaacatgtagattattataatctataagacataatagtataatctggtaatctcctctaagcgtgttttttcatattatttggtggttaaagactcactatccttattctaccataatccagataaacaaccaactcatagcttattctactatagcttattataatccagcttatagtaatctagctcaataatttagattacatataaaacaaacaggcctaacttgcctcgttgcctgctacattgcttcttgcggcatgcggcttgcctcggttgcctgcatccagtgagcgagctctgttcagttctttattgtctagtgaaaaaatgaggctgtgaggggatttatcatttacatttcgtagtatttgatttattggtagatttgcaaattgcaatggagaagaaaatagcatagcttaattactttacaagccattcaactgatacatccccaacagacgagagcacaaatagaccaatccaacaaaacagataccaatagatgattagatgaagtgaggagagcatatttattgaatggtccaaattgagcaccaacatgtttttccaaaaacattggatggtaagatttagagattctttcaacgaaattggctcgataaatttgacattggaatatagtgtaggaaaggatgttgcattttctttttcacatttttccatttgatacttaaactaccggttcatattttctgataatggtatgcatttagccggtgccgtacagcaagtctgcgggatcgcgtggtgccacgtggccggcatgtgggactgacgcagtaccacgcgagcgctgcacgggattgtttcagccatcaatccgcgttttggtgtcgcgtcgaataatcgatcccacattatcatcttgcggtacatgtatatttttacaattcttttaaaaacacgtatataattacagaacgtcagaaatcatgtatattttaattttgttttctagatttcgccatctatcaaagagaaagaagtcttttgcaaggggcatctttcaccaaaaatttcactcacagcttaaaatttcctcctccgcccaaaaaccctctcgacgctccgaaccccagcaatggcggacccgccgtccttccgccgccacccgcaccccttctccatcgacctcatccgctggctcccctgctcctcctcctcctcctccgaccgcctcctcgccgccgccgtccacgacccggcggcgccctcctcctcctcctcccacctccacctcctcccgctccacgacccctcctccccgctcgccgccctccccctcccctcccgcgccgcctccctccgctgctccccctccgtcctcgccgcggccacctcctcggggtccctccacctcctcccctcctccctcgacgccgccggatcggccggggtgtccgtccctgccggcgccgggttccacgtgggccccgtccgcggcctcgactgcggcggcggtggggaggagtgggtgacggccggggaggacggcagggtgcacgtggtgggcggtggcggggatgggagggtggtggcgaggaggctgtgggatgggaaggggatggccgggtacgaggccgccaggtgggcgtcggcggcggagttcgccaccggtggcgccggctgcggcgtgcagtggtgggacaggaggaagggggacgccgtggtggcgcagtgcaagggcgtttggtgagtgtgagaaatggtggatctctcctgttcctggttgttggttgatgtgcttgtaaatgctagtaggagtagtacattattagtggttcaattaggatcaaggaaatcttctttgcttgtgattggtgagtagagactcaatgcgcgcacaatgatttgattggtgctagtacattacatgttgtttgctctgtagatatgtatgttcctgctgttgttatgaacatgctagatgtatatttatggttatggttatgctcattgttgtcatcacgtaattaggtcgactgctacggttatttgcttatgggttgatgaaaattttggcaaggagagcttcctgtaactctttgatgggattctaacatctcaagacatctctgctttcctaaaatttggtgcactcgaatctgatatggatgaaatgtacctgttacacaggaatttgattcaaaaaatttcagggtaacaagcaactcaattcttgaacttctctacattccatttctgaaaggctatagctcaatagttatcgttctatttttagaagctcagcctaagctttactagtgcagattttgattaattgtgtgatcctcaaagttcaaagttctgtggtttttttaattaaattgcagattttgatttgtatgctgataattgcaaaattcaaagttctgtggtttttttaattaaattgtcaagatttaggtttaaaaataatcatgcaacaaatcatatagattcatctctactctccagtcttcctcaaaaagcatatggactcctacgtcataagaaaaaaaagataaaaatgatttaggcttgtgattatttttattatcatggtgatgaatcgagatgtttcatgtttggcggatttatttgctaaaacatcaagatctgatgtcccagaaaataggttttttttttctgaatggctgcacatcttgaactcatgtgctagacgattcaggttcttttatataatggattgttatgttaagtggaatacaaggctggatggctgaaccttatgtgctagtatgctgcagacaatgagtggtttttgtatcactacttgatggaaaagcataaaacttctgaattactgttaatatctaattcatgatcaattgtaaacatgtaaaggtaccaatcttagcaatgtcatgtcatataattatgccagcgtttatattattccagaagttggtaatgtgccatatttgcttgttatgctgacttgatgaccttgtgattttgcaggggccgtggcattgtcactggtatggttcattccattgacattcatccatcaagaaagcatatctgtgtggtaagttcaatgtcttagaaaatttgtgttgacttgcgtgaatagaagaatttaaaaagtgatgagtgtcatgggccaggagtcccaggcccaatgggaacaatatccccgccccacgctacttacgtatctcagttagatagagtcagagtctgttgggattaggttagagtcctcgatctatataaagagggatcttatcccaggtcagagaggcattagattgagttatctcttaggctgtgttcttccccccattttcccaacccacctctcttgttttccacgcgcacacttttcaaactgctaaacggtgtgatttatgcaaaaactttttatatgaaagttgttttaaaaaatcatattaatccatttttcaaaaaaattagttaatacttaattaatcatgcaataatacgagcttagttttgcatgccgggctcctcccgaacacagccttagtgcccaccggccctgcctttcctgcacaatgtgctctagctccgttgcgctgtttaggtccagggccagtcctgttacttcctctattataatccaatttatcccccttcaccccctttcatctcaaataatcctcgccctgacaatgagccaaggtatatagcttaatcaaacagctgaatgttgcgtacacaccaagaagcctctgtttggactttggaccatgaagttggtatgatagggtgtccgctgttcactgagagtgatagtttctgttttctccaaaaatcttataaccaaatagaatacacgtaagaggaaacaaccatatatcagtgtattgacaaaatttcagcacaggtggaaatctggatttgttctcaaagtctttttttcaaaagaaaaagtatatccatgtcggctgttttattgaaataattagaactccttcagagttaatggcaactaattccttgataatatccttaggtcagatgtatttactgatttcttgcagctcttcttagttatgtacaagggtttccatgttattcataccccccccccaaccccccccccccccacacacacacacacacaaaaagggaaatggcaatgtaactaataattcattgtaatgaatgaatgctgtcgagtcattggctacaactcttgcttcttatatttgccaaagatcggaaatttccaatcagaacaatctttgctgtgacaactaaagtcagttatctgtattgcttaacattgatcaagttatcttctaaaattatcttcaaattacatattgacatgttagtatatattgtgaaatcctagtgttgacataaatatgttatatcatagttaactagggatatttggtcaggaagcggttatgttgcacttttgtgcatctgtgctgtacatgccagagaattaagatgtctataatggtggagtggacctagacgactttaggggtacgttctcactgtttacatgatgggggaactgtgggagaatggtgacagttttaaacctgggatactggtctctggactgtctaccaattagtgtcagaccactcatgttctcacaactgccaaatagacctatactggtccatcactgcggaactcagagttgagatgagttgaaaagctgtgtttacaggagagtcataactgcaatttgaaccagctctgatgtttttaggtgggagggtcctcagggacaatatttgcttgggatctgcggtggccgcagcaaccaataccactctctggtttaggccttaatggaacagcacagcctgtgtctgagagtgaggtctgggaggttctttttgacaattacactcagtctactgatatcatctcatctgcctcgacgagaatattacctgtgatgatgtgctcagaggatgggatccttgcagtcgtcgaacaaggtaagcctatatgaagaaacttgtgccattttttttgttggctattattcaaattgctgaaaaagttacctttttgttgcagatgagaggccccttgaattgcttgctgaaccttgcgctatcaactcctttgacatagatcctgagaacccttctgtaagttcaaggtttctccagtttgaatagttttttctttattggaaatgagatattaaaattgttttgctttttgcgcaggatgtggtttgtgccctggaatgggaatcaattggtgtactaacacgtggtagagatacaatggctgaagaatgaaaagttctatttcgttaaaaatttcctgcatggtcttccttaaattgtgtggggcaactatgccaagataaacgtcttctaggaatgacactgattcaagtcgtccaacttatgtctggtgctggagtaaattgtcttgcgactttgggtcgttggttcgttgccttgtcggtgtaattgaagatcgtggaaatttgatgtgaaagattatcgttcctagtttcctacatgtgtaactgcgctttacgggagttgggtgttccattcttgaaatgcaagttggaatggtccaaaactattttggcaagttctttgttgtagacagtattttggtgctcagggatgggtcgactgttgtgagaactttttgttccatgtgctcccaagtcatgctaatgatggctaccatacaaaatttcaaacggaaattgattccggcaccgagatgccattaaacctttatctgttattatcgaaaaatttcatctgctgcttgtagctcaggaaagaacgcaaacctttttctctctctgaaaatattgaaaaatttggcaatgtcggtttcaacattcttggataggatggtaattttttttcctagctgggacagcaaatagctccggttgaactttattaaaaccggggaagagctacaagtgtattatgacgaacaaggctgaaattttattagaatccatttgaaaattttaaattttggttttcaaaattgtggtacattattttattcccttggatttattagatctgaaattgtttttgccttgagaattgcatcttttaagagcaaagtgactgaagcttgactggttaggtttattgtgttgggaataatccactcacgttcgagtcttagatttgacaagtggtagacaatgtatctgttgatagcgagacgcctacggtgacttcgtcaatcttaaaatttgatggcccatttttctgaatgtactcgtatgagtagggtgagcgtgcattgtaagaatctccatttgtaaatatgttttaaaaatatgggcctgtttggtacagctccaacttctaaatttaactccagaagttgagtctggagtggagatgtggagctgcctaaacccagctccacaactctagtacattttgtgagagagctccacccaactccactcccagttttagtggagctgaaactgtttggctgagctcctggagctggagatggagttgtgccaaacaggcctatatagttaaaaaaagaaaattaatggaactcactatcaacaaattaaataaatggatataaaagaggccgacaatgtatctgtcgatagcgagacggctatggtgactttatcaatcttaaggtttgttggcttattctttcaaatgtactcatatgggtaaggtgagtgtacgtgcatttatagtggtgggtatgtgcgttgtgagcgtctccgtttgtaaatatgttttaaatgtatctttatctttactattataaaaattgaagatgtttttgctgatattttggtacgtcaactgtatttgagttgattttttaagtttgttcacttttgaaaatacatatccgtgtttgagttggattttaagattgtttccttttggaagtataaaaggagaaattttttaaaaaaaactcgtatgctaacttgagatgaaatacagactcctaatcgcagctcataattttctaaaaaaaaatctaagcgaattcccacagtgaattttaccctagctaaaccgtgcaacaataataaaattaaaagagcatttacctgttgcaacgcacgggcattttttatagtatagttaaaaaaagaaaattaatggtaaactcattgtcaataaattaaataaatggatattgaatataacaaaataaaaattcgggatgccttatgttaaaactagagcatcaccaaccgtgctttgcttctttcatagtcctgatttttttgggattttagctgaaaaaactgccccaacaattcctcttctctttcttacgagaattgacattcccttctctataagtcacgaatcattatcgctcccaatgttccgtctaaagagcaggaccaccacccgagaaatggggcgagcggaaaggtgattctggatgagcgatcacggagtaagatggtatgaaataaggtttgggtgaagggaggttcatccttttattttagtgagttaaatttagtctatttgttggaagtatatttttaaccttgaatacttattagaaaatctcgaaaagaaagatttagggaagagattattaggcacatgctctaaggcatcaccaacataacacaaggaacataaatcactctccacaacctcctatgtgtgcttcttcccacgtgtattgttctctccacattttgcacgtgctattggaagccgacaccctcccctactagtggagagcgactaggactgaaaagatatttcatgggaagttaattagggaactgtagaagtcaattttttttcttatgaaaaacataaaatttaggcattagaagctatattgggcataagttggtgaagctctatgggatgtacaccgaatttctccttttttttccttaaaaaaatcaatctaacctatgagcaactaatcaatctcacttgtactctctcaatccaaaagcctaagggcatattactttttaaatgggattaatgaaaaattaactcatcttgcatataacaaacactaaggattactcctatgtatgcatataaccaatgagtattaagataattgcttgagttccaataattcagcactacaaaataataagacaacatctttatttaagtctaggatacatgaaggctataaatatgcacatctcattagaaaaaaatatgcttaaaacttttggaacaaaataataagacaacatcttcatttaaatctaggttacatggaggctatagatatgcacatctcgttaggaaaaatatgtttaagacttttggacggaagggtacaaattgcatcttgtttcactgtgaatgaagactcatgcttttatttttcctcttctattgctgttcaggtaagatttttctacgctattagatctacaaagatataaaggcacaagacattaggcgttagaggtgagattaactaatttttttagggaaaaatggtaaaaactaaaatcccgtgtggataataaattataatgtccaaaaacaaaatgaacggtcatcaaacatcgaactatgtgtgatccggcgaacgaaatcatcatagtactagtttattagaaaatagaaagagtaattttctctacagcaatgctgctcaaacaataatatcaaccatctaatttaaatagatggaagttatagaaattctagatatactcacagcatgagacatagtgttagactgttagtaagataaaatttacttcatccgtttcacaatgtaaggctttctagcattacccacattcatttagatgttaatggatctagacatatgtgtttagattcattaacatttatatgtatgtgagcaatgctagaaagtcttacattgtgaaatggagggagtagtatgtatagacttttccttttctcttttgcggggatagctagaaagggtaatttgatgcacgccacagcggtaaaatggggggaaacaaccgcagcaaattcgttcggcatgtaaaagcctcaaattctagtattctacaagcaaaacatccacgaaaataactcccccacattccaaaaccaaccacctgctagggcccacctgtcagccaccctaccaccccgcccgctgctcccgaaatccgcgcgccaaaagactccacatacgaagcggcttcccgcttcactccccttcccaaaaactccttctcatccaaaacttctatttttccccccccaaatctcatctcatctcatccccctcccctccctctccgtgcgccgccaccaccaccgccaccgccgccgccgcaggagcaaccccgaggagacggaggagggaggaggcagccgacgccgccgcgatgttctactcgcacacgatccttgcgcggaagagcccactgggcacggtgtggatcgccgcccacctcgagcgcaagatcaagaagccgcagatcgacggcatcgacatcccctcctacgccggtaagccctcccctcccctctctcccaaagacgcgctctttcttttcccctttgttgttgctgcgcgggtagaaaggcggcgcctttcagcggcggcgggggtagaaaggataagcttttttttttttttggttcctccgtgcaactgggatttgttccggagttgtgagtgaaaaatgttttggggttagcaatggggtcaagtgatggtacagagatttggatcccaatctgcattctgcaatttgggacaggaaggaagaaggtttggatagttttttttagagcattttgctaggggttcgcagtatttatctggttatcagttagaatttcgtgtaaatgattgttctagtggcatgattattcattaatgacaaaagatacaacaaaatttggtcttttagttatgggaggttgtggtggggtgtgcaccggagacttttgggtggatttttgcaggccctatttggatgctaaacatttcaagaatgacagcatttgcatatccagaaggaagaaaaaaaaaagaacgaccaaacccaattttttacctcccagtacagtataatcacttgcggtggaacactgcctacttgagccactctatttgaagagtaattcatatatgtttgttctacttatatgaattacacaaataagtttatatgttatccagtcaaatcatagaacattgacaaataaactggcttgttgtgcttgcattgttcttttagtacattatgtaacagtttttactttattctgtgattaactttacatatttaaccttgcaaactcaagaacaaagtagataagccttatgtttaggaagcttactgatggaattttattagaacaaaacatgttttttgactggaagtaaaacaactggattaatattgcatatttgggcatagatgtctatactctatgggaagttttttttattctctttgggaggaaagtgtgacaattttttttatttcaacttcgaactgtgctttgcaagaacttgtattataatggcatgctgaataggtcacatttttctgcaggtcgcttacccttggcaattagtttgtgtttgcttagtgaggtcatgtgtcgcccttaggtgttgtgcacgtgagcgtgttcttgggtgtgtttgtcagtttaacctcctctttttctatctattttcttcttaaagaaatgaagttcagtcctcccgcatttttgagaaaaataggttacatattttccttagttaagtattgaacaattttctcatatacattgaattttccctatgctttactctgcaacctaatgccatgtcttctaatgcatgagttttattttttcagaatttatcatgttccctgaagttccaattgctctgaggttgtcagggcatcttcttctaggtctagttcgcatttattcatggaaggtaaactacctcttccatgactgtaaccggatgctaagcacaatcagaaccgccttcgcttctgtacaagtagatctgccccttcatgcggatcatgcgccttttgacaccatcacattgcctgatacattccgtcttgatgacataaacctagatgatgcaattcgtctgatagagtgagtacttttcttctcatatattttctccgcgtcatacaacctcaactaatattattgtgttaactttctgacagtacgccagataatcatcggaagagtctggaccagatcaccctggctggtatacgaagttcaattagtcaatatatgtattattatcattccaatgcggatgcttaatgatttcattttggtgctgcagaaggagactatctgatgattgatcttgatgaggtattcctcactgacttgcgctttttgcaggcttgtttagtttgcatgttttttaatatttgtgcttataaattgtgtaggatgctagagtagagctatcagctcctggacaatcttcacacatgggacctgaaccaactgacgaagagtacgtgtcatgttttttttccttctaatttctattttggtggactcatgtccgctttgcttatcaggagattgcctccatttcacatcgattttgggccaagtgacaatatggatgaggaaatttccgtagatccttcccaaggcaacaactcggaggcagtgaacaccagtaacataaatcaggcagataaagcaccagatttacctgaaataatgcgtgaagcaccatttgagggccctgaacttaacttgccagatattgatgaggtaaacaatgatcccatggatgtgactgaggaatcttcaccatttgtgtccaagaatatcacccctccggcactggaacgaactatatcccctggtcaaggtggattatctgggacatccattcccaatgcacgaggaagtacaagcaccacatatgacaatatagaagatgttataccaatggatattggttagtattttgcttgttgactcatcttgttctttccagttttgttttctgccttcattttttcataagacctaatagaaataagactacattgcaattccaccagcattacttatgtgggatgctagaatgttgtgtaaaatgtactttcccttgatgttaaacatgtcttctcatccaagttcttttccttctgtgattttaggaatgcctgattttaggattgaaccatctccacctcgagtacaagatgagatgaatgcacaaccagtacaaggtgagataaacgcacaaccagtacaagatgagatgaacgcacaaccagtacaagatgagatgaatgcacacccagcacaagataagaggagaattagatatgacaatgaaatagtgttctccaatgcgtaagttcgactttacaaattatcttcttaagcaaagttcattggtggaaataacctcaaattaaatattatatgtttaccaggacttcgatgaatttttgaaattcatattgtactatgtcttgcctgggcgttttgtttaaaatctaccaaatgacatcttcatttctaccatgtcctgtctcctctgatcctattactctgtcccctcacctacaccacccttcgaatattgtttttctaaacagcttatctataaatagaataattctatgtgtgctgttatcaaccggtaattaactcgtctaataattttgatatatttgtatgggatttgttctgttcaaaaatacaagtcaggctatgaactttttaccatcgtagtgctaggtgtgatggggattaattgcaacaacagtatgatatctggtggtactatactgtattagttacaaatgataagacctcatactctcttgcacagttatatgaagagacaaattgatggcggtgaactacatcgtctggtcagcaagaggaggaaactgcctcaagcagcggtggatgtgtggaaattcaacaggattcgccaaaaggatggtttcttgcttgatcctttggtccatggtaagctaccatactctctgattccactagtgatggtcctttcacttctgaaacaatgtcagctcaaatttgctcttcctttcagggatgtgcgctaccctacgtcaaacctacgagagaaccttcccccatgtgattgaccctgaagctgagtcaggatctgtcgagcatactcctggggtagctaatgacagtattcaggatacacatgatcatcaactctccccgaagtctcctggaaacacagatgcacaacctgaacatcagttcaatcaacaagctccaagaaattcagatggacaacctgaacctgagcttaacccaaagtctcctgtaaatgcagaggcacaacctgaatctcagattaatccacaatctccaagaaatgcggatggacagcctgaacctgagctcaacccaaagtctccaggcgaagcaggcacgtcacactttgatgatatgcctgagatccctcgattctcgccacaaaatattccatctccaataagagacgacaattctcctttcaaaactcctggtgctggtggaactccgaaatcaagacttggagaaactcctgcctctgggacaccagcagatatgagttacatgtcacctggacaagactctgatcctcaagtttctccttttccatttaatgatgaacttgatggagatttgcccgagattcctagcctcatgagtactcctggagtaatatctaccgcaggtactggcaccacaggattgggaagcatgtctgctaggacaaggtatgggataagttccaatagacgatttcattatatgttaccatttgagtgtgaattctgacatgtttcatactgcattgtagggctgtggcacagtacttcaaagatcaaatggcttcggctacatcagatgaccaacctggtaaatttatcttgaacagaatcttggaagggagacacaggaaacaagctgcacgcatgttttttgaaacactggtaccatttaaactgcaagttacatttcccttttggacataatttgtagtcactttccacactatgtcttgacatatcgtatgtttgttctttctgtaggttctaaagagttatgattatattgatgttgaacaagaagcagcctatggtgatatagcagtttcagttaaaccctcactctcaggagccaaattttgaccaattcagttgcttagaaccacatataatctcatttgatccgcgggaaggagctttggtgggatttgcagaaatggcctgaacaatggattcttatatgcgacatggctggctaatctactgcaatttgctggactccaattactagaacaagtaggcactccatgccatttaggtttatgttgcagaatactgtagttgtaaagctgtagcattagtagttgtcgaaagccaatacatcttgtccagttaggacttcagatggtagtccttgcctatgctttcttggcagaaagcaaagtgaacaaggaatcagatgaagataagaatttttcttacttttgctgtttaattacatggtagtgatatgttaaatacaagtcgaaaaatgttggatgactagcataagacaattttataaatgtcagtgtacatagtctgatatcttcagtgtgccagagcgcagagtctgttcagaaaattttcatgcaatatgtgttctgcaatgcaccattatttgttgtatttgtctgaagtttaccttgcatgattttattacttcaatgagatccaaaattaactgtccttcaatggcaaggatcacccttgcccattatcaatcatacaatggaaccaaacatacatttttctttccattttcatcatttgttttaatttttacttggtaataaattttaaaattaaaatgaaggttttgagaagtttactccttttgggtttaccccagtgcaaacttaaggtcaagccaaatggccccttaataaccttatattatacgtgtcattaatttgcttcggaggttaaagatagatctgattatgagactacatgttaattaaacactctatctttagcttcagtattattttgatatgaatatagaataaacatatttattattcttaattgaatatattcatatgttcttcctccacatacatatggcatttctagctcaacaaattttatatttgtgatttcttagtatctattcaatctcctttttaatgatatatatgatcttccaacaaatccatgatttactgatctatgttcattttgtatcaagattttatcaattgagcatgcacacacacatggatgttgggacctattcctttgcacaactcaaaggaagacattagtcctaataaatcgtttgtcatcctccacttgatgaccaaccggttgcctatgaaagatatgaatgtttattgagtattcattaacaccacaagtatcatatacttgcatgcaagcttaagtgcaaagatccaatataaataataggtgaacaacatgtatctagaacatgcacaataaatgtataagatttgctctccctaaatatattcatacaaagaaatatataagagaggcaagtgtatgcacaagtagagaagaaccaatggggtttatcctatacacatggagaaggtatgtagcaatgataaagacaaacataaacacatacctttatcatctccatgttcttaatgtaaagaacactaaataagaaaatgctcaagtaaacattagtctcgcacttatataacaataacatggaaatcatatatatgaatctatcaaaaagtatgagataagaagtgatacatatcgctttatctccatgcatttcatctttgtcatgattaagatccaccaccaaagaatgcatatctaccacatctcatcatcggggaaaaacttctcatcattttcactttcatatacaaataagacttattgtttttatttccatatcacaatgagactaaaaaaaactcataggaacattagtctctatcggtgatatgggcccgggggtacccagactatgaagaagggcctgcccttggtggccacgtggccttcccccaagggggttcggcccgaggcaaggcggcagccgttcctcacacaccccggggtcgggtcaccccgacccccactgcgcggcgccacgtgtgccgcgccagacgggcgctcctagtgcccacctaaccgcacttaaggcggtctgagcgagcgctccgcacgcagcatttattgcggcgtggtgtgtcaggccggtctgtgaccgatgattgacatggccggggtagtgcgcctgcgcgctggttgcatgtcaggcgtcctgccgcctgacacccaccgtcacgtcgcaattgtgagaggcagatcagcctctaacgtctaccggagacagtttgcctaatccgtttagggcagggttcccatctcccggtacaaatgaggacccaaaagtcctcactctttaaatgccgaatgacggctgtgtctcctgtgtcaggcgagaggatttgatgggccccgcactgcagcaaggcatgcgagtggctttcaaggcaagcaacgagacatgtgcttagtatgattatcctccccagctaggctcggtggtcccctgtggtaaccccttgagatatgaaaggaggtcctggcctactgtgggagggggatgagccattttgactaagatagtctcttgcccctcatcatcaacacattctactccaacaaggagatcttgtaatctctctctcagtgagcatagcacatgagtagggtattacgcttctcagcaccccgaacctgtataaaccaccgttgcctttcccccgaggggttgaaccccctctcttgcacactggacagcgaaaccctcaaaactacaatcaccgcccccggccgaactgaaaaaagggaggggggggggaggggggcctcacggttcactggtggaggagtacaccctccgacagtctcatataaatagattcgtcattaatcaccaaagtccaaaaccaaactaaagcacttgaacttacatctatgctttccacgatagtgagcagttgcagcagcatggcaatggcgtacaagcgaagtgggagagctccaatgcagcagcaccgacgttggaggcgcttgagatagaacggacatgatgcggcgaaactagacctccctgctatgatgcttttgatttgtaggctgctcaagtttgttgtggctgcactatggtaggagaggagagcagagagcatctcagcatgcatgagcaaaagaaaaagacagctgtgacgttcgtatatatagaggaggaaaggagaggtgaatacctagccgggagttgcacagacagtgaaaaatggagctaaatgatgatagtgatgtagttgtttatattgaatggaggaaacgaatcatgatgtggatggggtgcaggtgcttacctgccatcgaagagaagaggaagcaacaatgttctggcaacgagcaggaaggaaaagaaggcaggaatgacttgggcttccggaaacgacgacggtgctggaaacaggacgaccatgacatggcgatgaaactcaacctcgtagtagcagagcagcagtgggaaatagcgtctcgacctgtgcaaacaccaaatggtgaacaaggaggaggaaataatgaagaactagaatgtggtgcatgtgcttactgcgacagaggagtggtggcacgatggtcgcgcaatggtgctttaatgtcccaagacgacgatgggactggaaatggaatggtgacaatgttgcgatgaagctcaccgaacagcggcggctttgatttgtatggcgctcaggattgccaagcgtaagcatgttggtaggagagcgaagtagagaggcgacgacaatagcacatgaaagagcagtggggattcaccaccgatgatgacgttgaggtggtggctgtcttggaaacaagacaacgatgatgtggtttgtgatcaagaccgagaaatggctgcatgatgctcgtgcgatgatggtacaaattcatgagacggtggtgctggcggatggcagctgcagtcagaggagatggaagtggagacgccgacacaggagttgtcgacaccaaggagcagtggcggcttgacggaagatggcactagatctagggaagatgaagccggcctcaaccatggtgctcacaggcagtgggtgaagctcctatggatggcgagatggctcgagctcttggacatagtagaggtggcactctcaacaaggttgcaggagaaaatgatgatcggcctgtgccctctcaggctgcgacggcggtgctggctcaatctccactctccagggtagcgcctcgtgctctccaagcgatgatgagcagtggcagtaacgacatgggcgatggtgtgatcgtcgaacaaaagggagatgaaggaggtgtgtagcaggtatttatagaggagaagaggagagacgaacaaccaggagatggagaggtggcggcagaaattagagaaatggttttggcaaattgaagagcattcaattttttgcattgaagaggagaaattgatggcgaagctagtgatttgtagagaattgtaagaggaggctgcttgagcaggagctcagtgtgcttgacttgtgtgtcaaggtgtagaggtggctggaaaattgaaaaatggatccatctcatcaattttattcagtttttatcatttaaaagagatatattgattagagagaggaagggattaattaatgggagggaggaattggaagagacggcactgcttaatggatgagcatgacgtggtttcttgagggaggaggaaggtgagtagcctggagatgaaaactcacttttttttaagataatggaagttttattaagactctgtcaaatatactaagatgatacattccaactgagcctacccccggcctctgcataaaatgcacacagccaataaaaggataaaattaaaccctcatcacgaaacatagatattagtgactatcaatctgtagactagatcgccacccatgctcctgggtaaaaacatctcgtgccacctggtccaaatgtcgagataccaccgcaatagtatcccgcaatcccggtttgtggaggatagcccaggtacgtagccaccgggtaactagagtaataacctgtaaaggagaagacactaacttgttataaaaaataaccccgtttctgcttaggcaaatggaccaacagagagctgctgcacccatcaaaagcagatttctcatttctttaggaacacataaaagccaacgcccaaacatatgagtaacatttcgaggaggttgaaagttagaggccatatgaataacgaaccataccaaacgagatagatgacattggaagaacaaatgctgaatggtttcatccttatgacaaaagcaacattttttactacctttccaatttcgcttagctaggttatccttggttagaattactccccgacgtaagtatcaaaggaaaacttttacttttaacggtactttaatcttccaaatacgtctattaatattcgggacgcccgtatgaacaagagctatgtaatgtgaattgaccaagaagaccccattgggggtgagattccagtgaaattcatcttgctcttgtgtcaacaccaaatcagctatgcgaggcaataaattatgccaagcagctagttttgctccaattaaatctcgtctccatgaaaagtttggagggtttgtttgaaagatttgtgatattgtcgattgtttatgcctaactatgttatagagacaaggatattgatctctcaacgaggcattacccaactacttatctttccaaaaccttatttgagaaccgtccctaatacgaaaagacccaaaccgaaaaaatcttgtttggccttcataagactagcccaaaaatgtgagtctcctgctttccaataagactgagataaaggttgtgatcctaaatatttattacgtatcaactgttgccacattagcagttaaaaaaattgattcagctcatcaaggtgatttgatttttggtattggtggagaaagaattgatgggggagagaaagtggttagtcaggggaattggaggagaaaacgtctggctaggcacttaagtagagtttgaagaagcagaaatgacgtagccatgcgggggtagacggtggcacatgggaacatgtcggcttggggtggacccaagtgctggacgaggtggagaggagcagtacactaggcttcagcccatgcacggatagagaacgagggagagagacacacacagagaaagagaagcaaggatattaggaggcaacgggcggagccggaaagaaaaggaaaaagaaaggaagatgtgatgaaggaagtaagaaaggatttttctattgagaattaagatttttctaacaaactcaaaatttggagaattttttggatttacgattcttaggatttgggtgaattcatgaaatagagctccacttccaaaactcgaataaaaaccaaataacttcaattaacaaacgataaaataaaaaggtaatgtaattaattaatttagtcaaattaattaattatgtgaatttttgttaagctattttagatgaatataaaatagtgaaagaagtaaagtttcttgcaaagttacagcggccacgtcatcaacaaatcactgtccgtccgatttcccatccacacgatataagccgtcaaatccttatattggtgaaatatctttttggtctttcgagaaacctatttcacaatgaggtcctcctatgtccttatggttttaaagaaaaaaaaaagcatgtgatcccctctctcgtcttctcgtcgtcacaccactgccgcggctcctctcgtcgacgtcccaattcaccacccccggtctgcctcacctcttttcccgcaccgacgcatcctcctcctccctcttccccaccaccagcgcctcccctccctttcccctactatcgcctcttcctgctcaccccgccgcctcctcccatctccacctcctcctcctatagtccccgccactagcgccgctacatcctcttcgcccctactctccaacccaatcccttgtcgccacggttgcttcatctcaatcgcccaactgtcacctcccgcatggttccataatacgaaggcttcggttgtatttgaggaagcagcagcagcagcagcagcagacctccctcactgtgttagctaagtgcccccccccccccacacacacaatgaccgacatcataggtagtcactcacacacagatcaacatcatcaagctaattaacccattgtacatgtagttttgtccaccatcatcacatatttggatgcttcattcagatcttattattatgttttgcatcagcaggcactacatggctgcagaatgcatggtaataagatcatcaacaacggtaatggcagcgggggtagacggagtatgacggagaaataggtgctctatactgatcagcgaacagtgcaaaccatggtgaagtagtaaactttgcagattgctttctgagtttgcccatgaatatagatgtgagtgttggaccactgatttatgaatgaaaaaggcaatcttaactgatctgtaggaactatatgggaagactattccttgcaaattcaacaactaaacacagggctaagtcacactcaattatatataatggatttgtgtgatcaagtaggcagttgaattatttcttgtgatcatttatggtcaattttgcttggacatatgtactagaaactgttcaattagaatcaaagttacaaattcatgcattgcaaagatttgtgttttctatggtatgtgctgaaagaagtctttgcttttcacgcattgtgaaaatgtgaattcattagttcctgaggttgacacagtggattatgttaattagtttgaaagtgtttaactgtcataataattggagttgtgaatcctttgtgactgctctactatcaaatgttgagactagacactgcattgtactaaattcttcgtttgttattccatgatcaacagatgggaggaagcatcaagttgtactggagatttttgagcagctaggagtatttaccttcataaatatgcatattcagaatttctaaactcgtgctctaaagaagcatattttatttggctatcaattatttggtgtattgtattatatatagttaacaaagtttttagccataatgatcatgacaatcatcaaattctattctttcaaaaactgaaacttcctacaacagttgatccactgtttttgtttacacctcttaatgctctttttgctgctataatagataatagaagagattgtggagtagcagatactaaccactccatgagaaatctcaaaattaacttccaatcatatgaactttgaaaaccaaaagcaaggtgttgaacatagtatttgaaccttagttggaaatattgagatttatagttctaatgagtaattgttagccaagttttgtgagtttgcaaaaaaaaaagggcaatatatatatatggaccttttacataggcatccaaagttgtgcaacgcttgactaaatagctagtaaacatgaatgtgaattttcaaaattagacaaatttaagaaagtgacacttggccaataattattacaaagttttagatatctaaaccaatataaaaggaactggttttgaaattgtgcaataactaagggttgatatatctaatcttaaatattgctaccaataatatgggtaggacttgtattttgatatttacccccaaatctctcctaagcatttaacctgtccatttattatcttttctttaaattatcatttcaatattaattctctttcgtatgaattaagtcagattgttcatttccaccttcaagacaagcataccacctacttaatacccacaaatattactcacctaccatgtgacatggaggaggctccgacatgggctactaacgtgtgggcccatgatggtgagccccacctattatggacccatatccctttgattttacgtcagaggagctgcatccatatgacattcagctgaacatcttttcagtcatattaaataaagtagtaaaagccattgatatgtgggcctcacttttctttggactcacatgtcaatgactttaaataccctctacctggcatcgtgttgtcttttcttgatatacgtgtaacacatttacgtatgttgttggtttatttttgtatttttactataagttctatgaacaaaacggcttatcgagaatctatctattatatactaaaagtccattaaactccctataaacgctctcaagctgccacgtggctccctcaaaacgctctcatattgccacgtggcactctaatataatagagaaatctgaccatcgattttcatttaaatcggtggacccattattttacatcgttagatctattttaaaaaccaaaaacctcccaccggccccaccacctctgtgcagtacgcacgtactgctccatctgttagtacttttttttttcgtttgttcctttcttttctttttccaatcctaattaaaattgaac

SEQ ID NO: 8928 - DNA, 11724 bp, Oryza sativa
ttcgaacgaatccgagggagagagagagggaaaagagggggaaacgggagagggaatcacgggggtgattttccccctctttaatgcgcgcggggacggcgggatgcggcggaatccgcggcggcggcggcgctagggcacgggcgagcggcggctgcggcgggaggaaggcgatgacaggtgggccccacccgtcagcgagagtggcgggcgggcccgcctgtcagcggcgcgcgcgcgggggaggagccgatgggccggagggagaggagagagagagggagggaagtgggccgagccggcccaagaaaggaagggggggaaagaagacttcttttagggtttttctttttataaatcctttttaactttgtttatttcttaacaattattatttgtgctctgaaaattccactaaaatttgagggctccttttagaccaaggagaatttgacaaaaattctccgggccacttttgaatttttcttgtacgtattttagtgtttgccaatttcttttcgaattttaattaattctattattccttttagagaatgaattttaattttgggatgaatttatcaggacgtgacaaatccaccccccttacaagaatctcgtccccgagattcgaggaggctagcaagaagataggttgggcggtctcctcttcttgtctgacttcttccgctctggactgcttggctcgatctcctgttgcagatgaaatcttctcttcacccgacttgtcccgggttgcacctttaactgactcagactaggctgcggtggttgaggatggggcttcagttctagaacttcttatcattcatatctttggcgtcaacctcataccagttaccaccttcgtgacatgcgtcgacatcagctttgtcattactaagataccatgcttgtcatttgcttctaactcgccaccaactgcctcatattagctttcctggtctccgggtgatagctacttctgctattcgattcgagggtcgataactttgcctttgaattatgtttctcaacagagccaacttatcccacttgacatgctttgacgcctttccagatgactttactgctggacttgttattgtttgatcgttaccctgccaaatctgaagcttcgctgttacatgtgattttactctgacctctgtagactatcttcgaacatatcacttggttcataactgggaatagctcccacgaacaagcaactcggattcactttctttacatttggttcgcttcccactattctcttcatgttgtcatcatttagcattcaacctattcctttgcaccttccgcatggatgggttctttctcgatggatcgattgctagggaagtgcgttgagcgatactagtgcaagtgcttttattctagtagcatctgatacaaagcccaaggttgaaccgagctttagattccactgttcaggttttacttcttgacttcttggtcatgtcacaaaagtttccatccttgtcccccatagaagtacttctacctgtggtcatctctcttactcgtgaattcacctgctttaatgacagggcaactattgtagggttgtttgctatcgggagtcttcctcgagtgacacaaatcatggttctcgttatcttttatcaatcacctttcgacctttctcaaccaggtactcttcgctccgggtgttgaggatgtttctggggcaatgaggtgcttgggcgtgctgcctttccgtgaaaccttgatgtggttcgtcaaaaactgtactgactaccttcagggaaatacattgcttgctatctgtatccatgccactagggtttaattgccgatgatcacctttagtgcttcttcgagatgggaagcatccaaattgttcttctaccataccacctttgccccttttctgatacctgatagactaattaccaaccatcgactactatgtcctcaaatgtggatgtctcctggatcttcttaactgtttgtaggtatatccgaacttatcaatgtagaggcatggcgggtacccttatgggtttcatccaacaatccttatcttgatctgtaaaaggcgtatccaaactcctatccccaactactgtctcattggccttttaacccaactcagtttaattggttttcttttccatcaacaggttggttattaactcaaggttagaacatagttcctctgaaatgagaccctaggtctcctttatcagtaagcaattatacacataatcacatacccgcatcttccaaaagaatcctcatggaacttgtctgtattacacatttctccctcattacatgaatacgaggcactgccttaaacaaaaaagggacggtgcttaacatcggtacattgtatcctcaacatgaatcatccataagcatagcaaacccactgtttatagacatgaatatatttatgtattacatgattgctgcaaactttcgattacaccatgataagtagcggactgaaaaccacaaacatggctgctcattttgattctggagagatatagctggcattgttctagtgactgcatcatccttgattggttctgtgatgatgtgataggactgcatattgctatcattcacaggagaagcttccttctgattgctgtttgaagcggatgatggtcttctgcttggtatcgccctccggaggttgattgccctttgcttggcctggagtaggtcggggagagacacaacttcttccatcaacgacaattctttgctgaggctgtcggtgcagagaatggttgctatgatttattgcagagtcaggtgcagcaggaggagcattggtgcattgtttctgctatgggttctgattaacacgaggcctcacgggtacggcgtttgctccagtgaccacaatacgattggaatgtctgcttcgtgtaaattggcggtaatgtggaggtcgattttgccttggttgcaggcagtccctcgagtaatgccctggttctttgcaattgtagcaaatcaacgtcttctttgctgagctatccgtctgaggacgatcattctgacttggagttggagttggtggttggaaatccttgctaacattggcatcagtggtaccatagttgctatcaccattggagtctttctcagagtcaaaattgctagggttgtcattctgggtgccttcattgatactatcgtcgatatcttggtgaatgctgttgacattgcacgcttgatctaagtgatcatgaatggggcaagaaccatggtggttggtggtattatcagcattagtagtgctattgttgttgtctgcattgcgttcatcttcttggggcaggaactcttgatacacaacagaagatccggtgatctgaagtggctcagtgcgctgtctttggttaccacctggaaatactgggttgttgaccatccttctcttgcagttcgtcatccgattatgctcactttcaagttgcatggctttgtccacaagtttctcaaaattttcataatcctctaggagtagttgcactgcaagctcatcttttaacccctggagaaacttctcttgtttgtcttcatccgtttccacatcttctggtgcatagtgagccaaacgatagaactcatgcaggtactctgtgacggtcaaatctccttgcttcaggtagcgaaactctcgttttcttagtgtgatcgttcctgcgggaacatgtgatctcctgaatacagatgaaaactcgttccaggtaatggtatgtccttctggccgtgatgcttcgtagcgatcccaccactctgaagccggtccaaccagctgatgagttgcgaagccaacccgctcctggtcggtgcactgaatcaaccctagcttcttctcgattgtgcgcaaccaatcactggcttccataggatcgacggcaatggcaaaggttggaggttcagttttgagaaattctgataacttgcactgttgctggactgtaggcacttgaacgttggttgcccctgctgggttgttccaattctgtaatagttgaaaggctgttgccaacatgttggtttggttaaccactatttggattagctctggtgaggtttcgttgatgcttttctcattcccattggcttgggttcttgagtcatcggatccatcattcccatagcctttgttaccagtgttatccatctgtcacaaggtagaggttgagaggggaagcatacaaggaaagaatagaccagaactagggacaagaccttaaaggaactaactctttttgttgatgtgttgtttgttttgcttattctgcaagttgattaagcaaacaacctagcatggtcacatcacaacccaccgatgcaaaccacgcgctacacacacaagcaaggaaacacacgactgacaacactatcctagaggacggcttaggttctgcgactggttcccaagatcttcattcttgcttcacatctggcttcactgcttcctttgctgcgctgacggatccaacagtcttccggagcttcggcaaacaactgacgacatcttcttcttcgcaaagctgaccatctagtactagttgaaatttgaagaaggaagaaaagagtaaaccttttgcaaataacattaggggaaggagaaaaagaggaactttcgcaaatagttttatttataaaatatgtccttaggttttatccacttggcttatcctacagtcgagatggctctgataccagcttgtcgcgaccggaaaaatttccttttcccgaacgctagtgtattaatccccgtcccaggaaaagccggggtacaccacacaaacatgataaaaaaggcacatctttattatatcgataatatttacattattacaaaggcgcttaaggcctgacaaacaaaaaataaacagcagcggactagcgggcctacggctccatcttcacaggcgctcaactggggtataagccaggactccacctaagacttcttctccaaagcttctcttactgaagaggggaaagattgagcaagaatgagtacaaccacagtactcagcaagccacaccggagatgcacaattaatgcaaaggagtacaaggggataataatataggggttaagttttgcagtaaacggcatttaaaggtcacttagttgcccaaagccattttacaaagacgatcttagagctacacagtattattaaacaaggccgtgaaccctcacgaacctgccttaacccaaggcctacgatgattcagaccgaactggcaacccgaccctgggtcccagctcgtcccaagccaacccaggccaaccattccacattttagttgtcgagcaaattttaagaatttgaaacactgacttgggtacattgctcggcttgcccataaccgagggcgcggctattcgaatagattatactctgatcagaggtgtacatctttacccacaagacacatcttcctcacgtgcaaccacgtgccacataccaccacggtatacggacggaagacgtgacatagttcccaacccatcctagccataaacaagagtaccgacccaatccccctacggccgggacacccgggacaggcaggcaggactgagccccctagcagcagggcaccaaccctctgccatgacatctcgactaccgggccgcagctcgtgtagccttcatttgccctggagaatgtccatcgacccccgacttcatccatctccaatccgtgtacttttgtttataaccagactgagccacaaactaagccttatccactagacatgtggaagtacggtagtgctttgcaacagaggcccgagcttaatccttatagtactcgaggtacgactaacaaaacccaaccacgcacctcgagcccagcctaaaaccattttgggggttttgaatagagggggaggtgtgtgtccaattccaacataagccaaccattccatagtgtccaaaagatatgagaattcccaaagtctaaagttataaaaccacctaatgttgcctaattaaacagcgaagcatctacctaaattcatactagtggaaccatgaatagagtgtccactagttggggttttgtttattctagggtgaacaaggtaataataacaatagcaataataataaggtcataacaaaggtaaataggcatggctaaataaaacagtgataacgcgggaatttaaataaagcgataatgcattaatttaaatcaaaataattttataaactgggattcaatatgctcaaggatgatgtgacttgccttgctcgctttcccaaacgccggcttcaacttccacgaagagcggatcttccgaagctgcagcgtctacacgaccgacggaaaagaaaaggcttttactctaataaactccacataacagcagaaacaaagcacaaaaatgggttcttgacttcttaaggaaaaattagagacttgaacggtccaattccgagttcaaatggccaagatatggccatttgaagtttatatgctctttaaatggatatttacgaatttcttcatttaaattttaattaaaaatctcatttattgcgtcagccgggagagggggcgcgcggaccgggttaacgggaagtggggcccacgcgtcagcctctcggtccacggtggaccgggagcacgcggctggcggcggtcggcgccgtgggtcccacgcgtcagccgcacccgcgggcgcgggcggctgacggccgggcccacctggcagccgcggggcgcgcccgaaggcggcctcgccggcacggccgacgggagcggcgcgcccgcgccccgatggtcaccgccggcgaccaccggcgcggcggagcggcgcccgagagagcggagaggagagggaagcgagagggacggtccacggctcaccccgggacaacgaggacggcggaaacgacggccggagtggagaaaggcggcggcgcggttcgggatgccgagggcgacggtgctccggcggtcggcgggcgaagcggagcggcggacggggtcgacggcgacgcggcgacgcggaaggaggtgacgccgagtcgggaggaggaccggagcgacgacggtggcgaaacggagctcggcggcgacggcggagagagaggtgcacgacgcgagcacgaatccgacggcgagagcgagcggcgagcggcggaaacggaagagcgaagcacgggggacgattttatagcgccgagagggagagagggcggccggggaggaaggaaaccggccgcggagttctcgggctccattgatgacgccggcgaggattgcgggcgcgattcgaacgaatccgagggagagagagagggaaaagagggggaaacgggagagggaatcacgggggtgattttccccctctttaatgcgcgcggggacggcgggatgcggcggaatccgcggcggcggcggcgctagggcacgggcgagcggcggctgcggcgggaggaaggcgatgacaggtgggccccacccgtcagcgagagtggcgggcgggcccgcctgtcagcggcgcgcgcgcgggggaggagccgatgggccggagggagaggagagagagagggagggaagtgggccgagccggcccaagaaaggaagggggggaaagaagacttcttttagggtttttctttttataaatcctttttaactttgtttatttcttaacaattattatttgtgctctgaaaattccactaaaatttgagggctccttttagaccaaggagaatttgacaaaaattctccaggccacttttgaatttttcttgtacgtattttagtgtttgccaatttcttttcgaattttaattaattctattattccttttagagaatgaattttaattttgggatgaatttatcaggacgtgacactcaggagggggaaacctccggcgttggtagcacggagggtgcgctgttgctcaccttccgtcctggcccgtcgcagcggtagacgagcagttagtaggcttgcgcgtgtgtttttcctcgtttgtcttcttgagtcgtgtggggcatggttatgccggtgtgtggcgtaattatgtcggagcctgtcttattttttatttgcctaagcaacttgaacattaatgaaccaatttaatagaagtaataaattcaagaattatagtagtcgagggtggttagttttaattgtcagctttctctgtttgccggttctgtgtggggttttcagatggtgacgaccaggagaaatgttaacaccggtgaaggcaaccaacccgaaggcagcaaccccaaccaccaaggcaatccacctccaccaccaccaccagacaccaatgccattctcacccaaatcctcgctcagcaggccaacatgatgaccgctttcctccaccacctccaaaatccgccacaacagaatgctccaccaccacctccccaacactctaaactcgccgagttcctccgcatccgcccacccaccttctctagctccaacaatcccgtggatgcgttggattggttgcatgccgtggggaagaagctggacactgtgcagtgcagtgatgaagagaaagtcatcttcgccgcccatcagctgcagggacccgcatctctatggtgggaccacttccaggctacgcagccagagggacagccgattacttgggctcgcttcaccgccgctttccggagaacccatgtgcccgccggagtcgtggctctcaagaagagggaattccgagagttgaagcaaggcaaccgctccgtgatggagtatttgcatgagttcaacaatctggcccgttacgctccggaggatgtgcgggaagatgaggagaagcaagagaagttcctggcaggaatggaccccgagctgtccgtccgtctagtctctggggactatccggatttccaacgtctggtggacaagagcatccgcttggaggccaagcacaaggagctggagtcgcacaagcgccgcttggcgaacttccgcaatcagcagggtgctaaccagagggtccgctacaccaatccctatccagggggatcctcctcgcagcagcaacaacagcagcagcaacctcgttccgcgcctcgacctcaattcgtggtgcgcgtcccacagccgcagcagcaacagaatcaacaagggactcgtgcgccccgtcctcctacgccagctgtgcagcccgttcaaggccgcagggacgctcaaggtcagcagcgtctatgcttcaactgcttcgagcccgggcactttgcggataaatgcccgaagccaaggcgtcagcaaggccaagcgcctccccgctccaacaacggagggaaggatgtcattcggggccgtgtgaatcacgtgacggccgaggacgtgctgacaactccagacgtcatcgttggtacgttcctcgttcattccatccctgctaccattttgttcgactctggagcttcccactcgtttatatctgtgccattcgtggggagaaatcagttgggggtagaaaggcttaggaaccctctgctcatcaccacccctggcggggttatgacagcaaagtattatagccctgccgttcctatagaaattcaggggattccttttccctcggatctgattctgctagacaccaagaacttggatgtgatccttgggatgaattggttggctcaattccaaggagtagtggattgcgcgagacgcacggtcactctgtaccgaggaccggaacaaccggttgtcttctttgcacccccaacctctgtcagaagttcagaactgcatcagataggactgtcagaaatccccatcgtcagggagttcggagatgtgtttccggaagaactacctggtatgccgcccaagcgagagattgagttccggatagatcttgctccaggaaccactcctctgcacaagcgaccctaccgtatggcagcaaatgaactggccgaagtaaagaaacagttggaagagttgaaaggaaaggggtatatacgtccgagtacttccccctggggtgcttctgtgatttttgtagagaagaaagacaagacgaagaggatgtgcgttgactacagagctctcaatgaagtcaccatcaaaaacaagtaccctcttcctcggatcgatgatctgttcgatcagcttaaaggtgccactgtattctccaagattgatcttcgttccgggtaccaccaattacgtatccgcgaggaagatattccgaagaccgcattcaccacgcgatacgggctgtatgaattcacggtgatgtcattcggtctaaccaatgcacctgccttcttcatgaacttaatgaacaaagtgttcatggaatacttggataagtttgttgtggttttcattgatgacattctgatatactcacaatcagaggaagaccatcaacaccatctccgtctggtgttgggaaagttgcgggaacatcaattgtatgccaagcttagcaagtgtgagttctggttgtccgaagtcaaattcttggggcacgtgatatctgctaaaggagttgctgtggaccccgaaacagtgaccgccgtcactgaatggaagcaacccaagacagtcacccaaatccgcagtttcttgggtttggcaggatattaccggagattcatcgagaacttctccaaaatcgctcgacccatgacacagttgttgaagaaagaagagaaatttgtgtggagcccgcaatgcgagaaggcgttccaaactctcaaggagaagctggtttcctcgccagtgttaatcttgccggatactcgcaaggatttcatggtgtactgtgatgcttcgcgccaaggattggggtgcgtgctcatgcaggacggtcatgtggtagcctatgcctcacgccaactacgacctcatgaaggcaactaccctacgcatgacttggagttagcagcggtggttcatgctctaaaaatctggcggcactatctcattgggaaccgctgtgaaatatataccgatcataagagcttgaaatacatcttcactcagtcggacctgaatcttcgacaaaggagatggttagaactcatcaaggattatgatgtgggaattcattatcatccgggtaaggctaacgtggttgcctgtcacgtcctgataaattcatcccgaattaaaaatcattcgctaaaaggaataatagaattaattaaaattcgaaaagaaattggcaaacactaaaatgcgtacaagaaaaattcgaatgtggcccggggaattttttgttaaattctccttggtctaaaaggagccctcaaattttacttgaatttttagagcaccggaaataattattaagcaacaaaaacaattatcaaagtttattaaaaagaaaaatctaaaaataatcctccttttcttttgggccaattttggcccaaagacctccctctctcccctcggcccgcggccaaagtctccctttcctccctctttttctctccctctccttctctccctccttctcttgggctcccctttccctcggcccagcttcctcctccctctctctcccgggctgcctctttcccccccccctcccctcccggcctgcccggcccaggccgcctccccctcctctcctcctgggccgcctctcggcccaagctgagccgcccctccctttcacgcacgtgcgttgcacgagcgct

SEQ ID NO: 8929 - DNA, 2928 bp, Oryza sativa
ccggtggtcgccgacggtaaccatcggggcgcgggcgcgccgctcccgtcggccgtgccggcgagaccgctttcgggcgcgccccgcggctgccaggtgggcccggccgtcagccgcccgcgcccgcgggtgcggctgacgcgtgggacccacggcgccgaccgccgccagccgcgtgctcccggtccaccgtggaccgagaggctgacgcgtgggccccacttcccgtggacccggtccgcgcgccccctctcccggctgacgcaataaatggaatttttaattaaaatttaaatgaagaaattcgcaaatatccatttaaagagcatataaacttcaaatggccataacttggccatttgaactcggaattggaccgttcaagtctctaatttttccttaagaagtcaagaacccatttttgtgctttgtttctgctgttatgtggagttatttagtgtttaagccttttcttttccgttggtcgtgtagacgctgcagcttcggaagatccgctcttcgtggaagttgaagccgacgtttgggaagacgagcaaggcaagacacatcatcttgatcatattgaatcccagtttataaaattatgttgatttaaattattgcattatcgctttatttaaattcccgcgttatcactgttttatttagccatgcctatttacctttgttatgaccatattattattgttattgttattattattaccttgttcaccctagagcaaacaaaaccccaactagtggacactctactcatagtaccactagtataattttaggtagatgcttcgcaatctaattaggtaaccttaggtggttttataactatagactttgggaaatattcatatcacctggacactctggaattgttggtttattgtggaattggcttcacaccgctctctctattcaaaagtccccaaaatggttttaggctgggctcggggtgcatggtttggatggtagcacctcggccgtttaaggaccggtcttcgggcctctgttgcaaagcactaccgtacttccacatgtctagtgggtaaggcttagtttgtggctcagtctagtcataaacaaaagtacacggattggagatggatgaagtcgggggtcgatggacattctccagggcaaatgaaggctacacgagctgcggcccggtagtcgagatgtcaaatagcacagggttggtgccctgctgctaggggctcagttccgtctgcctgtcccgggggttccggccgtaggcgggattgggtcggtactcttgtctatggctaggatgggttggaaactatgtcacgtcttccgtctgtataccgtggtggtatgtggcacgtggatacacgtgagaaagacgtgtcttgtgggtaaagatgtacacctctgatcagagtataacctattcgaatagccgcgccctcggttatgggcaagccgagcaatgtacccaagttagtgttttaattcttaaaacctgcttaacaactaaaatgtggaatggttggcctgggttggcttgggacgagctgggacccagggtcggcttgccagttcggtctgaatcatcgtaggccttgggttaaggcaggttcgtgtgggttcacggccttgattaataatattgtttagttctaggatcgcgtttacaaaatagccctgagcaactaaatgtctttaaatgctgtttactgcaaccctaaccctttatattataattcccttgtactcccttgcatttattctgcatttgtgggtgtgtcttgttgagtacggtggttgtactcagtcttgctcaatttttcccaagtccagaagaggagctccttgaagatgaaggttttggtgtctagctcgtgcctgccgtcaagcgcctgtggtcgtcgccctagtcttccgctgcttcttcgtttgtctttgtgtgttgggccttcgctgcccatgtaataattctatttacgcttccgcttgttaaactctgaattgtatcaacttttggtgtaccttgcctcctgggacaaggattaatgcacgcacgtcaggaacgcccgttgggttatttccggtcgtgacaagttggtatcagagccacccttgaccctaggacgagccgtagatcccaagccttagcgatattttcaaaataaaaatctttggttatttgtgaaaattgtctagtctctctctgtcttgctgcttcatttatcgccaaaatctgatcttttaaatgttgtttctctttttgtttttgtttgtagatggccggcacagtcacccgtcgtggtttggatatgactggcttcgttttggagctgcgaggcatgtgcgtggtcttggggtatccacatggagtggactaccaggccaggccacttccggatcaggagggtgaggatgcagagcctcacgctggttgggaggtcactgcagtgatcctctctggctctcctgagcggacttcgctggcagtcaccgcgggtggagactccttccccgccgcttgccagaacgccgctctcctcgccatcggcacccttcaccagcgctacccggacgagttgcagcactcgccctaccgctactaccctcgtcgcggaggagcccgcgactacgccaccttccgagatgctagctcggaggatgacgctaccgttgtgcacctggcacgcatggtggaggcgtacgacgcggctcgtatcgacttccatcagatggtgcgccgcgggatggttgagaacaacatgaagatcctggggctgcggcaggagaacctgcagctcaagaaggacctcgacgcgttggaggcgcagctgcatcagctcaaggtcgcccagggtgaggatagccgccccaagcgtcgccgcgtctgccgcagccagaagatcaccgcccgcaagagcacct

SEQ ID NO: 8930 - DNA, 1584 bp, Oryza sativa
ttcaattgtcaaggaatgggtcatttcgccgacaagtgcccaaaaccgagaaacgtagctgccggcacgtcagtccacgcaactccctgcaatcagaagcttgctcctcaacgaattgtcatccatgcatcccgaagcagtcctatagcccgcgttgcaacaactccaattccaatgagtgcactaccacaaggtgtcaatgctcaatttcagccccagccaccagctgacaagacagaggccagtatctgcgttgtacctttggaagttccaatacagcagctgagaaatcaagtacaagatgaagaacccgagtgtaagaaagttattgtttgttacaactgcagtgaagaagggcattactccaaaaactgtccccaaccaaggcaaaatcgacctccacattaccgccaatttacacgaagcagacattccaatcgtattgtggtcactggagcaaacgccgtacccgtaaggcctcgtgttaatcagaacccatagcagaaacaatgcaccaatgctcctcctgctgcacctgactcggcaataaatcttagcaaccattctctgcatcgacagcctcagcaaagaattgttgtagatggaagaagttgtgtctctccccgacctactccaggcctagccaagggcaatcaacctccggagggcgataccaagcagaagaccgtcatccgcttcaaccagcaatcagaaggaagcttctcctgtgaatgatagcattatgcagtcctatcacatcgtcacagaaccaattaaggatgcagtcactagaacaatgccagctatatctctccagaatcaaaatgagcagccatgtttgtggttttcagttcgctacttatcatggtgtaatcgaaagtttgcagcaatcatgtaattcataaatataatcatgtctgtaaacagtgagcttgctatgcttatggatgattcatattgagaatacaatgtaccgatgttaagcaccgtccctttttgtttaaggcagtgccttgtattcgtgtaataagggagaaatgtgtaatacagacaagttccctgaggattcgtttgaaagatgcggatatgtgatcatgtgtataattgtttactgacaaaggagacctagggtctcgtgtcagaggaagtatattctaacctcgagttaataaccaacctgtggatagaaaagaaaaacaattaaactgtgttgggttaaaaagccaacgagacagtagttgaggataggagtttggatacgccttttacagatcaagataaggattgttggaggaaacccctaagggtacccgccatgcctctacattgataagatcggatatacctgccaacagttaaggagatccaggagacatcaatatttgagaacataatagtcgatggttggtaattagtttatctggtatcagaaaaaggtcaaaggtgatgtggcagaagaacaatttggatgctccccatctcgaggaagcactaaagatgaccatcggcaattaaaccctagtggtatagatacagatagcaggcaatgtatttccctgaaggtagtcagtgtagcttttgacg

SEQ ID NO: 8931 - DNA, 4671 bp, Oryza sativa
tcggtgaaaatgtaaacgcccaacaatggcgggataataagtcagccgtgcaggcggaaacatcagttggcggcggcgaaggcaaaccgggttggtgaagacgtagacgcccaacaacggtggcataataggccagccgtacaggcggaaataccagtcggcggcggtcgaggcagccagtcggtgaagatgtagacgcccaacaacggcggcataataggccagccgtgcaggcggaaacaccagtcggcggcggcgaaggcaagccggtcggtgaagacgtagacgcccaacaacggcggcataataggccagccgtgcaggcggaaacaccagtcggcggcggcgaaggcaagccggtcggtgaagacgtagacgcccaacaacggcggcataaaggccagccgtgcaggcggaaacaccagtcggcggcggcgaaggcaagccggtcggtgaagacgtagacgcccaacaacggcggcataaaggccagccgtgcaggcggaaacaccagtcggcggcggcgaaggcaagccggtcggtgaagacgtagacgcccaacaacggcggcataaaggccagccgtgcaggcggaaacaccagtcggcggcggcgaaggcaagccggtcggtgaagacgtagacgcccaacaacggcggcataaaggccagccgtgcaggcggaaacaccagtcggcggcggcgaaggcaagccggtcggtgaagacgtagacgcccaacaacggcggcataaaggccagccgtgcaggcggaaacaccagtcggcggcggtcgaggcgagccggtggtgatgttctgactgatccattcctggagcgtaagagataagcttaaagccatgaatcccttttatgcatatctggatctggatcctgcagaacaaacatataggatgagtagtatctgatataaatataatactcgagaaaaaaatcaagtattttaaaatatttataaatatgtatttctcctcttgtcaattttgatttccccgagcagatgattcattacgtttaaacgctctgtccgactagtcatagcccccaagcaccgggagtcggcctaggcacttcccagacatgcatatgagtgacatgagttcgccattaatggaacaaagtttcacggattagaatttactactcaggtacttttgcaattattaagagcaaaaaataaatttatctcatctctatgcttttgatttattccgaataatacttagcaccttgcgttactcggtccatccaacgagcccccgggtgctaggaatcggcccaaaggcaaccatccattggcaaaccaaacggaaagcataggaagatagaactccataactcgataggtacttttgtactcagattatgtcgcaaggaatcaagataaatattatgaaaattgtttaaaaaatacgatataacatctatagcccccgactcactagtcaacggcgaaccagttgatgtagtgaggcaaaggaaaagacaaaatatcatataaagaataaaataaatgatgacttagctttgtaatattccccttggtgatggcatggacgcccatgaacggtggtgtgaccgaccaaccgtataggcggggacaccagtcggcggcgacggaggcaggccggtggtgaagtcgtagacgcccaacagcggcggcataataggccagccgtgcaggcggaaacaccagtcggcggcggcgaaggccagccggtcggtgaagacatggacgcccatgaacggtggtgtgaccgaccaaccgtataggcgatgacaccagtcggcggcgacggaggcaggccggtggtgaagtcgtagacgcccaacagcggcggcataataggccagccgtgcaggcggaaacaccagtcggcggcggcgaaggccagccggtcggtgaagacatggacgcccatgaacggtggtgtgaccgaccaaccgtataggcgatgacaccagtcggcggcgacggaggcaggccggcgatgaagtcgttgttgctatcagcaatggcggtggcgaggacaagccggcggagtggactcgcggccgatcgaccggaaagctgagacgcctcgagtccatgaccagcatcaatcgcctcaatagtgccgcgtagttatatgcgaacaacaacaaaaaatagcaagaaattaatctgagattaaaaatcaatatgataaataatgataaaaatcagattgagtttccccctgactgatttggatcaagtcagagaagaggagcttgaagaagtggtcgacggaaaggaagtgaaaactcccaaagcgaaagcgaagtcggcgactcatgaaattgattccatcgcgctcgttgataggaaactcgacgcaacccctcctggcgcgccaactgtcgaaacatgatttcggcaataataaaagggggtagcatacgagacctaaaagtggatggatgcagagacaaaggatttagacaggttcaggccctctcaatgagaggtaataccctactcctgtttggggatttgaatccgccgggtgtgtattgatctgacgatcaggttgtctctcatgccccctagagggcctcctgcccaccttatatagggtggggggcaggattacaagatagaaaccttaaccaatacggtatcggtttcctaaatctactttacaatattatcaaaccaggactttaggctgttccgtaatatataaggaaacgtaatacccaagtcatgatctgttacatattccatacatataagttatcccctataactagtcggataaccatgccgtgtgggtatggggtacccataatctccacaaaatgtatgctaccctagcttgcaagcctgtgaggcaaattgcaagccaattgtttgatcagcttatcaagcctgtaattgtaaagaaatgataataatattgtctgttgttcaccaatcaagagaatgatcaatctcctcatagatgaacgtggtttgtccttttgtttaggggaaaagtataactgtcttattgatacataactggagatggccacaggagaatcacgagaataagcgcaagaaatagtatcgtatagtccatatggcatgtatgcaggtttgatcatagtactcgtttacagaataatgtaggcactgtttttgcaagtgcggttcactagattaaatttagttttgaggataaatcgaaaataccttttcatggcacccaaacgaagccttgaatcaatgggcaaccttttcaacttgggtctgcgtggcaggccaaattggaaccttctgtattgtaccatcattttttacagtgtgcatctccttcgtttttttttaccatagtgtccatctccttcgttcttaagcacaataatattatcacaagcaatctttcccccgtgaattatcgcaagagtttatttatagttgtacccctttaaagaaatcatgatattgtaaccttaagaacgaaacttcctgataatgaggtgaataggcacgagctcgtgtgattgttccttgtatcaccagtttagtatccactatggagacaccattgtcacccttttttaccccatttcaactacaaacctattcgaataaaatgggtaatatagagatttgatgcatcaatttcattggactaacctgtttccacaaattttgtaaacgcggtaatcacaaggatatgtttggttttcaatacaatttcactctgcgtgatagattgtaaaaaatgggcgtcctggttaggtatttgtcgcgcccggaaaaagtgtctttttctgaacgctagtgtattaatccccgtcccagaaaaagccgggtacaccacacaaacatgatacaaaagacacatctttattatatcgttaatatttacattatttcaaaggcacttcaggcctgacaataaaaaataaacaacagcggactagcgggcctacggctccatcttcacaggcgctcaaatggggtataagccaggactccccacctaggacttcttctccaaagtttttcttagtgaaggggggaaagatagagcaagaatgagtacaaccacagtactcagcaagtcacaccggtagatgtattattaatgcaagggggtacaaggggtaataatatagggtttaagttttgcagtaaacaacatttaaaagtcacttagttgctcaaagctattttgtaaagacgatcctagagctacacagtattattaatcaaggacgtgaacccacacgaacttgccttaactcaaggcctacgatgattcagactgaactggcaacccgacctgggtcccagctcgtcccaagccaacccaggacaaccattccacattttagttgttaagcaaattttaagaattaaaccactaacttgggtacattgctaggcttgcctataaccgagggcgcagctattcgaatagattattgtcgcgtcccaaatcgactctaaaattcatcctcgaaattgtgcaaagaataattaaaattcatgtgaaagcctccaacaattaaaatgtgcaaagataaaagtcaaatgaggcttggaggatttttgtatatttcctaaaagcctaaaatgtgtaaataaattttagtgaattttcagagcacaaataataattgaaaagaaataaaca

SEQ ID NO: 8932 - DNA, 6980 bp, Oryza sativa
ctaaatctactttacaatattatcaaaccaggactttaggctgttccgtaatatataaggaaacgtaatacccaagtcatgatctgttacatattccatacatataagttatcccctataactagtcggataaccatgccgtgtgggtatggggtacccataatctccacagtagcccctgagacctttacagtcgaaaagataatcttctctcgaaccagattactccaaagccgagtacttcaatcatctttgccatggtctcccgagtacttttaccaaatctgaagactgtggagggctgaaaaataaagtcaggtgcatcgactagatgcacctaataggtgtagccctcgactatgcggttaagtgaacaaaccaagcatatagtcaaggaataaataatccaaccaaccgagtggcttcgataattatagttaaccaagcgacttgatattaatatgtagcatatgcggtgtaaatccctgaataacatgatccgagtgatataccgactgctttgtaaaatatgatgagtgtaacctaaagttggctacattattgaaaattcacatagcaaaacagctataaaaaagcttgtatgttgtgaataaagaaatttccaaagtattgggcatacgccatgcgcacactctttaacagatgtgcttaagtccctagaagacacatggttccaccacacctggaaatatatggcatatgtggtataaaatccgagtaaataaactcataaaggatttaccaaccgcctgaaaatgaccacaatatataatcagcctaagccataatattggtcaataaaaatgcacacttactggcgaaaagcaatgatattgtatcaatcaattgcttaaaaacccaaacagcaccttgacttatatataaaaaagtcagcgggacagctatataaagctttactgtttgacaccttttaagatgcattgtaccaactcctaaaaagttaagtaactgcggtataaaaggattttaaggtattgggcacttgatcacgcgcactttggcctaagcaaaaagtgcctaagtccctaaaagaacgtgacaggccacacctaaaaatatgggctgcagacatattaggcctaggccaaaacatatgccttcgacaccctttaaaggatgacgcatataacatgctcccgagtaataaatcttccgggtaatatagaccaagcgtagctcatatgaatagcttctgatctgagtggttatcccttatgggatactccaaaatagatgtaacaattgaatcccgactggcgcaagtattcagttgataacccttacggggaataataaatagtccagtctttgagcatataaaatagacccatgatcatgaattcatgttgcatgtatccggagcaagtccaaattgaagatataatacttgtatttgagctagtaagcccctgagcacgtagtcacaattgttcattgatggtagctgacgcagttggcatagagacaagacaaccaatataaatagaatattgcccaccagaggtggcaaaaatattggtggtagtgaagatagtgataccaatcaaaagtactgaagtcgcatagccatggaggcgaagaaacagtcggtgatgacaaaagcaaaccgacgatgaagacgtagacgcgcatcaacagtgatggcgaaatccaccaatcatgaagatgaagaaaatagttgacgacgacaaacgcaaccgacatgatgaagatgacgatgtcggtgatccagccaatagcagtgtagcaaccaatgataatgacaaagacgctcatcagcatttgcatagtaggtcaaccgtcaaggtgaaataataagtcggcgaaaacataatcatccattagcaacagcagagatgtcagggtcgatgaagcagaggtgctggtgatgatgtcagtgacaataatccatcaaattaatgttatagctgttgtagatgcttcacttggaggagagttgatgttgttgcccaactcgtctaaaccgaaatatttgaagttgttgaagtagaatgtctgctccgaagcaaagatgaagataatgactcctggagttgactcgtgggttgatgaattgatttcttcagcttgacataaaatttgtcaaattttgagccttgtatttgtgtagcccccgactctttgattagtgggaaacaaattaacatagagtcgagaactgtagcctcttgtcgtcgaatagttattgcttgattgaagatatgtgttgaagatgtccaagtagaaatcatgaatgttggagagcctcttgttgtagtaaaataacatggcatcgcatgccgagatgtcgaggctcacaaagacgtcgtggttggtgaagtagcaaaacttgcgaagtagcagcaatagagtttgccagtgccgaagataataaagatgaagtcgctctaccatgatgacaaagttgcattgccgtgatgaagtgaacacgagtcgtcggcaacagaagcaaactggtagtgaagatgcgcagttgtgaaaataaaagcactagtcggcgacagcataaccagtcggcgacggaagacgatgatgttcatcagtagtgatagctgtataaaccagatgtagaggcgagggcactagtcagcagcagacgagacgaccggcgatgaagatggtaaggccaatcaacactggcagaatcatgcagccatggaagtgaagaaaccagtcggcaaccatggcaaacgtaggcagcttgtattgaagatactgatgcctattagtagtgacagcgatgtagccagccgtaaagaagatagcatcagttggcgttataacaggccagccgtgcaggcggtgacaccagtcagcggcggatgcggcggccggtcggtgaatgtcgcgaccgggaaaattgccttttcccgaacgctagtgtattaatccccgtcccaggaaaagccggggtacaccacacaaacatgatataaaagacacatctttattatatcgataatatttacattattacaaaggcgcttcaggcctgacaatcaaaaaataaacagcagcggactagcgggcctacggctccatcttcacaggcgctcaactggggtataagccaggactccacctaagacttcttctccaaagcttctcttactgaaggggggagaaagattgagcaagaatgagtacaaccacagtactcagcaagccacaccggagatgcacaattaatgcaaaggagtacaaggggataataacataggggttatgttttgcagtaaacagcatttaaaagtcacttagttgcccaaagccattttgtaaggacgatcctagagctacacaatgttattaaacaaggccgtgaaccctcacgaacctgccttaacccaaggcctacgatgattcagaccgaactggcaacccgaccctgggtcccagctcgtcccaagccaacccaggccaaccattccacattttagttgttgagcaaattttaagaattataacactgacttgggtacattgctcggcttgcccataaccgagggcgcggctattcgaatagattatactctgatcagaggtgtacatctttacccacaagacacatcttcctcacgtgcaaccacgtgccacataccaccacggtatacggacggaagacgtgacatagttcccaacccatcctagccataaacaagagtaccgacccaatccccctacggccgggacacccgggacaggcaggcaggactgagccccctagcagcagggcaccaaccctctgccatgacatctcgactaccgggccgcagctcgtgtagccttcatttgccctggagaatgtccatcgacccccgacttcatccatctccaatccgtgtacttttgtttataaccagactgagccacaaactaagccttacccactagacatgtggaagtacggtagtgctttgcaacagaggcccgagcttaatccttatagtactcgaggtacgactaacaaaacccaaccacgcacctcgagcccagcctaaaaccattttgggggttttgaatagagggggaggtgtgtgtccaattccaacataagccaaccattccatagtgtccaaaagatatgagaattcccaaagtctaaagttataaaaaccacctaatgttgtcctattaatcagcgaagcatctacctaagttcatactagtggaaccataaatagagggtccactagttggggttttgtttattctagggtgaacaaggtaataatatcaataacaataatagtatggtcataacaaaggtaaataggcatggctaaataaaacagtgataacgcgggaatttaaataaagcgataatgcattaatttaaattaaaaataatttcgtaaactgggattcaatatgctcaaggatgatgtgacttgccttgctcgctttcccaaacgccggcttcaacttccacgaagagcggatcttccgaagctgcagcgtctacacgaccgacggaaaagaaaaggcttttactctaataaactccacataacagcagaaacaaagcacaaaaatgggttcttgacttcttaaggaaaaattagagacttgaacggtccaattccgagttcaaatggccaagatatggccatttgaagtttatatgctctttaaatggatatttacgaatttcttcatttaaattttaattaaaaatctcatttattgcgtcagccgggagagagggcgcgcggaccgggtccacgggagtggggcccacgcgtcagcctctcggtccacggtggaccgggagcacgcggctggcggcggtcggcgccgtgggtcccgcgcgtcagccgcgcccgcgggcgcgggcggctgacggccgggcccacttggcagccgcgagggcgcgcccgaaggcggcctcgccggcacggccgacgggaggcggcacgaccgcgccccgatggtcaccgccggcgaccaccggcgcggcggagcggcgcccgagagagcggagaggagagggaagcgaaagggcggtcttcggctcaccccgggactacaacgacgacggaaacggcggccgaagcggaggacggcggcggcgcggttcgggacggcgatgacgacggcgttccggcggtcggcgagcgaagcggaggggcggacggggtcgacgggaacgcggcgaagccgatggaggtggcgccgagacgggaggaagtccggagcgacgacggcggcgaaccggagctcggcggtgacggcggagagagaggagcacgacgcgagcacgaatccgacggcgagagcgagcggcgagcggcggaaacggaagagcgaagcacgggggacgattttatagcgccgagagggggaaagcgcggccggagaaggaggaatcggccgcggagatctcggctccattgaagaagccggcgaaactcgcgggattcaaatcggacgaatccgagggagagagagagggaaaagagggggaaacgggagagggaatcacggggagtgatttccccctctttaatgcgtgcggggatggcgggatgcggcggaatccgcggcggcggcggcgctagggcacgggcgcggcggcgggcgcggcgggaggaaggcgatgacaggtgggccccacccgtcagcgagagtggcgggcgggcccgcctgtcagcggcgcgcgcgcgggggaggccgatgggccgcgggggaagagagagagagagggagggactgggccgagccggcccaagaaagaagggggggaaagaagactttttaggatttttctttttataaaacccttttaactttgtttatttcttttcaattattatttgtgctctgaaaattccactaaaatttatttacacattttaggcttttaggaaatatacaaaaatcctccaagcctcatttgacttttatctttgcacattttaattgttggaggctttcacatgaattttaattattctttgcacaatttcgaggatgaattttagagtcgatttgggacgcgacaaacctaccccccttaaacggaatctcgaccccgagattcggaagaactggcgaagagatcgggatgggctgccttcagctcgtcttcgcgctcccaagtagcttcttcttcggcatggttgctccactggaccttgcaaaaacggattacccggttcctggtcctgcgctccatggtgtccaggattttcactggcctctccacataagtcaagtcttcgcgaacttcaatctgctctgagtcggcctgttcggatggcactcgaagacatttcttgagttgcgacacatggaacacatcatgcacgttgcccaaggaggcgggcagctccaactggtaagcgacttctccgcgccgagcattgatacggaaaggacccacataccgaggtgcaagcttcccttttgtctgaaacctgtgcacacctcgcaatggcgtgacccgcagatacacaaagtcatccactgcgaactccagatcacggcgacggttatctgcataacttttctgccgagactgtgccacctttaaattatcccgaatgattctgactttagcttcagcttctctcaggatatcagtcccgaacacttggctttctccgacttgatcccacaatagcggtgtccggcatttgcgcccgtacaacgcttcataaggtgccatttgtatgctggcttgatagctgttattgtaggagaactcggcataggggagactcttatcccaagtcttcccgaaatctagtacacatgcgcgaagcatatcttctaggatctggtttagacgctcggtctgtccatctgtctgcgggtgataggcggtgctgaaatttagtcgggtaccaagctcttcttggagcttcttccaaaagtgagaggtgaattggcttcccctatcagatacgattttc

SEQ ID NO: 8933 - DNA, 11064 bp, Oryza sativa
caaatccgcttgattcacttggttaattccaaaattgattagggggtttcaatccccattgattcctcttcaaatgcccccaaattcccccttgattcgtgccttcaatccccgggaacggacgcgccaagtccggccgccttccattgccgccggccgtggttcccgccgccgttcccgctcctcccgtggccggctctctcccccatcctataaaatgggatcctcatcccccgttctctcgttttagccccctcccgagcctccccgtggtccctagccacctccccaccgtcgccctctctctcccacgctgccggccgcctccagccgcctgggccgcctcgaccgtgcgccggccggccgcgccgtcgcctcctccagcgtcgccgctacctcctccaccccggcctgccctccgtttcgcgcggtgatcgccggaggcgcgttcccgccgtcgcccttctcttttctccgcgccggccgcctccagccgcctctcccgcctcgcccgtgcgccgtccggccgcgccgtcttctccctcggcctcgcagccaccccctctccctcggtcagccctccgtttcgcggggaaagcaccggagacgcgttctcgccggcaaaacagtggcgttgccgccactgttccacctccggccgccactgtcgcgtttcccgtgcgccggccgacgtcgccaccacctccctcggcgttgctgcatcgccctctcctccggctgctcctcggtttcgccggaacaccgccgtcacgcgtgccgcctttccctcggtctcgtcggcacccactccggcagcccctttcgccgtgccagtgcgccggccgacgtcgccgtctccacctccggcatcgcagcggcaaggacgccctcggcctcgcctccccttcgaccgaaccccgccggtgttcgtcgtcgtcgtcatcgtcccgtcggttgcccggctcgtcgtctcgcggcgccgcctccgtcgtcggcatcgcagcggcgtggtccgcgtcgtccccgtctccgtgcagctgccgccggctgccctcatcgcctcctcgccggccccggtcgtcgtcgtcgtcgtcctctcgtcgttcccggtcgttgtggcgttcgtccctccgtcgagccgttctcgtccgccgcccgcgtttcgcctagtgtgctgcagccccgtcatcgtcttcgtcctcggctccgcgtcgtcaagcctcgtgccggccacgtctcgccttcgtccaaggatcgccgccgaagccgtcccctcgccgttcgtctccgttgtgcccgtctgtctccgccgcgcccgttcgtcgttgtcgtccccgcgcctcgtcgcgtggtggtaaggatccctctccctcgctgccccgtcctcgtcctttcggtgtcccccgtacccgttgtgcggtcgtcgaccccggtacccgtgtaccggtgtcggtagtcgttcacgtgtgcgggtggtgaccgtgtagtgtccgtgttagtgtgcccgctcggtagccgcgtggtttccacgtgtgcaggtcgtgtggtgtttagtggagtccgtttgtcggccactcgcctcggttgacacacggggtctgcttccgtcgacccggggaccgcctctgtgtactcggtctaccgcggtcctttaggttgacatgtggggtccgcatgtcaacggcgcagccttcctgtcctttccaggctagcgcttacacatgttttataattgcaaagcttaattataataatccgcaaatctccatataacagcattaaacctcggatgatcatatcttggtcatacgaactctgaatcgacccgttcaagtctcctaatgtttgttataacctaaagaaccctgtgctttctttttatgtattgttattgcttctttataggcttgtagctttgcttgtgtgcttcgcgtagctttcgtcgttccggaggttcccgaagcgtggttcgcggtcgtcgccgaaggttcggaagtccgttctctctgagcaaggcaagtcacatcatccttgagcatattgaatcccagtttataaaattattttgatttaaattaatgcattatcgccttatttaaattcccgcgttatcactgttttatttagccatgcctatttacctttgttatgaccttattattgttgctattgttattattaccttgttcaccctaggataaacaaaacccccccaactagtgggtactctattcatggttccactagtatgaatttaggtagatgcttcgctgattaattaggcaacattaggtggttttataattttagactttgggaattctcatatcatttggacactatggaattgttggtttatggtggaattggacatacacctctcttcctctttcaaaacccctaaaacatgtttgggtgcatgccagttgtgggaagtagcaccccggccactctaaggattaagctcgggcctctgttgcaaagcactaccgtacttccacatgtctagtgggtaaggcttagtttgtggctcagtctggttataaacaaaagtacacggatggaggtggatgaagtcgggggtcgatggacattctccagggcaaatgaaggctacacgagctgcggcccggtagtcgagatgtcatggcacagggttggtgccctgctgctaggggctcagtcctgcctgcctgtcccggaggttccggccgtaggtgggattgggtcggtactcttgtctatggctaggatgggttggaaactatgtcacgtcttccgtccgtataccgtggtggtatgtggcacgtggttacacgtgaggaagatgtgtcttgtgggtaaagatgtacacctctgatcagagtataatctattcgaatagccgcgccctcggttatgggcaagccgagcaatgtacccaagtcagtgttttaattcttaaaatttgctcaacaactaaaatgtggaatggttggcctgggttggcttgggacgagctgggacccagggtcgggttgccagttcggtctgaatcatcgtaggccttgggttaaggcaggttcgtgtgggttcacggccttgattaataatactgtgtagctttaggatcgtctttttaaaatggctttgggcaactaagtgacttttaaatgctgttttctgcaaaacttaacccctatattattactccttgtaccccccttgcattaatcatgcatctgccggtgtggcttgctgagtactgtggttgtactcattcttgctctatctttctccccccttcagtaagagaagctttggagaagaagtcttaggtggagtcttggcttataccccagttgagcgcctgtgaagatggagccgtaggcccgctagtccgctgctgtttatttttgattgtcaggccttaagtgcctttgtaataatgtaaatattatcgatgtaataaagatgtgtcttttatatcatgtttgtatggtgtaccccggcttttcctgggacggggattaatacactagcgttcgggaaaaggcaattttcccggtcgcgacaagctggtatcagagccatctcgactgtaggataagccaagtggataaaacctaaggacatattttataaataaaactatttgcgaaagttccttttttctccttcccctaatgctatttgcaaaaggtttactcccttcttccttcttcggatttcaactagtactagatggtcagctttgcgaagaagaagatgtcgccaattgtttgccgaagctccggaagaccgcagggtccgctagcgaagtgtaggaagcagtgaagccagctgtgaaggagtgaagatcttggagaacccgtcgcagaacctaagccatcctgtagggtagtgttgttagtcgtgtgttccttgcttgtgtgtgtagcgcgtggtttgcatcggtgggttgtgatgtaaccatgctaggttgtttgcttaatcaacttgcggaataagcaaaacaaacaacacatcaacaagaagagttagttcctttaaggtcctatccttagtttctaacctgtctctcccctttgttttccctctctccctctccaaacctgtcacgtcctgataaattcatcccgaaataaaaatcattctctaaaaggaataatagaattaattaaaattcgaaaagaaattggcaaaccttaaaatacgtacaagaaaaattcaaatgtgacccggagaatttttgttaaattctccttggtctaaaaggagccctcaaattttagtggaattttcagagcacaaataataattgaaaagaaataaacaaagttgaaaaggtttataaaaagaaaaaaccctaaaagaagtcctcttttccccccccttccttcttgggccggctcggcccagtccctctctctctctcttcccccgcggcccatcggtctcccccgcgcgcgcgcgccgctgacaggcgggcccgcccgccactctcgccgacgggtggggcccacctgtcatctccctcctcgcgccgcgcccgccgccgccgcccgtgccctagcgccgccgccgccgcggattccgccgcatcccgccgtccccgcgcgcattaaagagaggggaattactccccgcgtttccctctcccgattccccctcttttccctctctctctccctcggattcgtccggattcatcccgcgaagttcgccggcgtcttcaatggcgcccgagatctccgcgcgcggtttcctctctccccggccgcgctctccccctcccgttgctataaaatcgtccctcgtgcttcgctcttccgtttccgccgctcgccgctcgctctcgccgtcggtttcgtgcccgcgccgtgctcctctctctccgccgtcgccgccgagctccgtttcgccgccgtcgtcgctccggtcctcctcccgactcggcgccacctccatcggcttcgccgagtggttgccgaccccgtccgccgctccgcttcgcccgccgaccgccggagcaccgtcgtcatcgtcatcccgaaccgcgccgccgcttccctccactccggccgccgttctcgtcgtcgtcgttgtcccggggtgagccgaagaccgccgttcgctttcccccttctctccgctctctcgggcgccgctccgccgcgccggtggtcgccggcggtgaccatcggggcgcgggcgcgccgctcccgtcggccgtgccggcgaggccgccttcgggcgcgccccgcggctgccaggtgggcccggccgtcagccgcccgcgcccgcgggtgcggctgacgcgtgggacccacggcgccgaccgccgccagccgcgtgctcccggtccaccgtggaccgagaggctgacgcgtgggccccacttcccgtggacccggtccgcgcgccccctctcccggctgacgcaataaatggaatttttaattaaaatttaaatgaagaaattcgtaaatatccatttaaagagcatataaacttcaaatggccataacttggccatttgaactcggaattggaccgttcaagtctctaatttttccttaagaagtcaagaacccatttttgtgctttgttcctgctgttatgtggagtttagtagtgtaaaaagccttttcttttccgttggtcgtgtagacgctgcagcttcggaagatccgctcttcgtggaagttgaagccggcgtttgggaaagcgagcaaggcaagtcacatcacccttgagcatattgaatcccagtttataaaattattttgatttaaattattgcattatcgctttgtttaaattcccgcgttatcactgttttatttagccatgcctatttacctttgttatgacattattattgctattgttattattaccttgttcaccctagaataaacaaaactccaactagtgggtactctattcgtggttccactagtataaatttaggtagatgcttcgctgaataattaggcaaccttaggtggttttataactttagactttgggaattctcatatcatttggacactatggaattgttggattatggtggaattggacatacacctctctttctctttcaaaacccctaaaacctgttttcggtggggtttgggtgcatgccagttatgggaagtagcaccccggccactataaggattaagctcgggcctctgttgcaaagcactaccgtacttccacatgtctaatgggtaaggcttagtttgtggctcagcctagtcataaacaaaagtacacggattggagatggatgaagtcgggcgtcgatggacattctccagggcaaatgaaggctacacgagctgcggcccggtagtcgagatgtcatacggcagagggttggtgccctgctgctaggggctcagttctgcctgcctgtcccgggtatcccggccgtaggtgggattgggtcggtactcttgtctaaggctaggatgggttggaaactatgtcacatctttacgacgggttccaaggccatggaatgcggagtaaagatgtgtcttgtgggtaaagatgtacacctctgatcagagtaaatctattcgaatagccgagccctcggatatgggcaagccgagcaatgtacccaagtcagtgttataattcttaaaatttgctcaacaactaaaatatggaatggttggcctgggttggcttgggacgagttggaacccaggtcgggttgccagttcggtccgaatcatcgtaggccttgggttaaggcaggttcgtgagggttcacggccttgtttaataatattgtgtagctctaggatcgtctttataaaataactttgggcaactaagtgacttttaaatgctgtttactgcaaaacctaacccctatattattatctccttgtacccccttgcattaatcatgcatctgccggtgtggcttgctgagtactgtggttgtactcattcttgctcaatccttcccctcttcagtaagagaagctttggagaagatgtcttaggtggagtcctggcttataccccagttgagcgcctgtgaagatggagccgtaggcccgctagtccgctgctgtttatttttgtttgtcaggccttaagtgcctttgtaataatgtaaatattatcgatataataaagatgtgtcttttatatcatgtttgtgtggtgtaccccggcttttcctgggacggggattaatacactagcgttcgggaaaaggcaattttcccggtcgcgacaaaacctttgcaacagatggctgacaatgagaaaggcaataaggtcagaagtcaggacattggtacctcaagctcccgagtgaatgaagcaccagataccagttgtgtgacactggtccaacacctgattaaccagaaccgattgcttatagagatactacagcagcatcagacgccaattctgaacctgagtcaaatacaacctcaagtgcagttggaggcagtccaagcactcacaccacaagtcagcatgccgccagcatcccgaaggacccatggtgacgtgccacatgttgacccaaaagaagcaagtaacatttgctttatgtgtgatgagcaagggcactatgcaagggagcgtcctcagcagaaaagaaaaacaccaatgcgaaccgaagatgaagtccgtaagatgatcattaccagcacagaatggcctccaccaggaatgacaagacgtcagagaagaaataccttccgaggtgcaccacagttgacagagcatcttttagctaatggaggtagagtgtctgatagtgaagattcagatcaagtctcctcagatgatgaagatgaaatggaacgtaaggcatgctctcgttgtggagaaatcggtcatgtcgccagctcgtgtgccactatatgcgttcattgtgaggaagaccatccacccgacaggtgtccaacgagcaggatcacttgtttcttttgtgaaggaaccgatcatgtaccaaaagattgtcaattcagttttctgctgacgaagaagatggtcaaccaacccgccagttccaacggagagaagcatcaaggcaacaccaatcctcgccaaaattacagtctcagcttaaatccagtgccaggacagaggaatcaaaatgagaaatggaaatgccgagtccgggaagatatctgttgcttcaattgtcaaggaatgggtcatttcgccgacaagtgccccagaccaagaaacatagctgccagcatgtcagtccccgcaactccttgcaatcagaagcttgcccctcagcgaattgtcatccatgcagcccgaagcagtcctatagaccgcgttgcaacagctccaactccagcgagtgcattaccaccaggtgtcaatgctcaatttcagccccagccatcagtttacaagacagaggccagtatcggcattgtatctttggatgttccagcacagcagccaaagaaatcaagtataagatgaagaacccgagcgtaagaaagttattgtctgttacaaactgtagtacctgttaaggaagcagacctgccagtcgccaagtggtcactggagcaaatgcagtacctgacaagcctagcgctagtcagaaaaaaccataatactcttatatcagtgttcaaatacttttgttttatagttgttcccgtcaatcatgtaataacagagaaacatgagattatgaaggagtttgataagtttatgaaggatccatgttaagattgcaagtgctgtgagttgtgtacattttgttgctgattagggagacctagggtctcatttccgtaagctcataatctactatgaatcaaataacctagcgattgatggcgaagaaaataaagtgatcaaccaaagagacatttgtttggactaagagtttcagatatgtcttcttcggatcaaaggcatgcacccgttgtggagaaattggacacgttgctagcatgtgtctcacactctgcactcactgtgaagaagaccatccaccaggggagtgtcccacccgcaaggtcacatgttttctgtgcgaaggtacaaaccatgtgcccaaggattgccaactcagtgtgttgttgaccaagaccgcagaaatccaacgaacaaccctacgattgtctcgtcagctagtcagctccaacagcaacatcgacgatataatccacagcaccaatgctcctcttgctgcacctgattctgcagtaaatcatagcaataataccttcagcaccaaccattctctgcaccgacagcctcagcaaagaattgtcgtcgatggaagaagttgtttctctccccgacctactccaggccgagcgaagggcaatcaacctcaggagggcgataccaagcagaagaccgtcatctgcttcaaacagcaatcagaaggaagcttctcctgtgaatgatagcaatatgcagtcctatcacatcatcacagaaccaatcaaggatgcagtcactagaacaatgccagctatgtagccatgtttgtgattttcagttcgctacttatcactgtaatcgggagtttgcagcaatcatgtaataaataaatatattcatgattataaacaatgagttcgttatgtttatggaagattcatgttgaggatgcaatgtaccaatgctaagcacctttccttttaggcaatgcttagtattcatgtaatgaggaagaaatgtgtaatacagacaagttctatgaggattcttttggaagatgcggatatgtgattatgtgtataattgcttactgataaaggagacctagggtctcattccagaggaactatgttctaacctcgagttaataaccaacctgatgatggaaaagaaaatcaagcgattaaccaaagagacatttgtttggacaagagtttcagatgtgtctttttcggatgtcagggttgaatgtgtaaaggaatactttgaatgctaaataatgacaacatgaagggaatagtgggaagtaaactgaatgtaaagaaagtgaatccgagttgcctgttcgtgggaactattcccagttatgaaccaagtgaaatgttcgaagatagtctatagaggtcagattaaaatcgcatctaacaacaaagcttcagtttggcaggaaaacgatcagacaataacaagttcagcagtaaagtcatttaggaagatgtcaaagcatgtcaagtgggataagttggttcttttgagaaacgtaattcaaaggcaaaagttatcgacccttgcatcgaatagcagaagtagctagcacccggagagcaggaaagttaatatgaggcagttggtggcaagttagaagtaaatgacaagcatgatattcttatgatgacaaacatgatatcctagtaatgacaaagctgatgtcgacgcatgtcacgaaggtggtaacttgtatgagtttgacgccaaagatatgaatgataagaagttctagaactgaagccccatcctcaaccaccgcagcctagtctgagtcagttaaaggtgcaaccagggacaagtcgggtgaagagaagattccatctgcaacaggagatcgagccaagcagtccagagtggagaagtttagttagataagtttgttatagaagatgaagcggaagaagtcagacaagaagagaagaccgcccaacctatcttcttgctagcctcctcgaatctcggggacgagattcttgtaaggggggtggatttgtcacgtcctgataaattcatcccgaattaaaaatcattcgctaaaaggaataatagaattaattaaaattcgaaaagaaattggcaaacactaaaatgcgtacaagaaaaattcgaatgtggcccggggaattttttgttaaattctccttggtctaaaaggagccctcaaattttacttgaatttttagagcaccggaaataattattaagcaacaaaaacaattatcaaagtttattaaaaagaaaaatctaaaaataatcctgcttttcttttgggccaattttggcccaaagaactccctctcttccctcgggacgcggccaaagtctccctttcctccctct

SEQ ID NO: 8934 - DNA, 922 bp, Oryza sativa
gtctcctctttcatgttcatcatgggcatttttaagtattgggagagggcgaaggctatgctgctcgccaacctagagaacttgcgaagctcaatcaagaagaaggaggaggaggagacaaggagacgacgaagcttgagaaatatttggcgtccaagcagttcgaagcatgataatgacgaggaggcactgctggttgctcatggcctgctcgacatcaccaaaggcgccttcgtcgtttcttcagtcgacgagcatcaaatccctgtctatgctgccaggagacgagagatatttcctaagagtggctgggggatgatgtacaaggtggtcgacatggagctctccctcatgtatgacatcctctacaccaaggcggccatggtgcacacatggcatggctacgctatgcgtgccgcctctccgttcgccacttccgtggccttcatgctgttttggtttgacagcaagcaaggtcagcggatgaccgatgttttgatcacctatttcttgctgggaggtacggtcctcctagacatcatatggcttctcagagcagtggcatcaacaaggacctattcgttcctcaatgataggccacacttgtgggttcatcacgcatttttgtgctctgggaagtggcgcctgctccgtcgtctcattgtctccctggatccgtcgttgatcctcgccaaggaaccaagtagctacaggaagtggtctggaaaaattggacagtataacttgttacacaagtacactcatgacaaggacgaaaggaccagagattacttgagctatgtggtagagaaagtagcatcggaagacatctcgatggagtacgaataccacaacttgaggggtattcatatttctgtggatttcaagaagaacttgttggattgtatttgggactatatgt

SEQ ID NO: 8935 - DNA, 850 bp, Oryza sativa
ataaaggccagccgtgcaggcggtgacaccagtcagcggcggatgcggcggccggtcggtgaagacgtagacgcccaacaacggcggcataataggccagccgtgcaggcgaaaacaccagtcggcggcggacgaggcggccggtcggtgaagacgtagacgcccaacaacggcggcataaaggccagccgtgcaggcggaaacaccagtcggcggcggcgaaggcaagccggtcggtgaagacgtagacgcccaacaacggcggcataaaggccagccgtgcaggcggaaacaccagtcggcggcggcgaaggcaagccggtcggtgaagacgtagacgcccaacaacggcggtataaaggccagccgtgcaggcggaaacaccagtctccggcggcgaaggcaagccgatcggtgaagacgtagacgcccaacaacagcggcataaaggccagccgtgcaggcgaaaacaccagtcggcggcggacgaggcggccggtcggtgaagacgtagacgcccaacaacggcggcataataggccagccgtgctggcggaaacaccagtcggcggcgacgaaggcaagccggtcggtgaagacgtagacgcccagcaacggcggcataataggccaaccgtgcaggcgaaaacaccagtcggcggcggacgaggcggccggtggtgatgttctgactgatccattcctagagcgtaagagataagcttaaagccatgaatcccttttatgcatatctggatctggatcctgcagaacaaacatataggatgagtagtatctgatataaatataatactcgagaaaaaatcaagtattttaaaatatttataaa

SEQ ID NO: 8936 - DNA, 11585 bp, Oryza sativa
attttagaaacacatatgtaagcgaagataatatgcagtgctatattctttagtccgggttcttaaccctaactgggtttaaaaaaaatttgaaaataccggaaagatatctttagtcccggttgttctcatcaaccgggagtaaagatccgggggtatatatttttccggtgcgccctcgtcttctccaccaacacttcacgttttcggccgatcgatctctctcggcctctctccttcaccgccactacctagggcaaatccccgcgccgacgccaccgtatcttgccgtcgtctcgagctcgtcgttgtggagattatgggtaccccatacccacacggcatggttatccgactagttataggggataacttatatctatgtaatatgtaacagatcatgacttgggtgttacgtttccttgtatattacggaacggcctaaagtcctgatttaggaaacagataccgtattggttaaggtttctatcttgtaatcctgccccccatcctatataaggtgggcaggaggccctctagggggcatatatatgagacaacctgatcgtcagatcaatacacactcggcggattcaaatccccaaacaggagtagggtattacctctcattgagagggcctgaacctgtctaaatcctttgtctccacatccatccacttttaggtctcgtgctctaccccgttttattattgccgaaatcatgtttcgacagttggcgcgccaggtaggggttgcgtcgagtttcctatcaacgagcgcgatggaatcaatttcatgagtcgccgacttcgttttcgctttgggagttttcacttcctttccgtcgaccacttcttcaagctcctcttctctgacttgatccaaatcagtcagggggaaactcaatctgatttttatcattatttatcatattgatttttaatctcagattaatctcttgctattttttgttgttgttcgcatataattacgcggcactattgaggcgattgatgccggtcatggactcgaggcgtctcagctttccggtcgatcggccgcgagtccactctgccggcttgtcttcgccactgacattgctgataacaacaacgacttcaccgccggcccgcctccgtcgccgccgactggtgtcctcgcctatgcggttggttggtcacaccaccgttcatgggcatccacgtcttcaccgaccggctggcctacgccgccgccgactgatgtttccgcctgtacacggctggcctattatgccgccgctgttgggcgtctacgacttcaccgccggcctgcctccgtcgccgccgagtggtgccttcaccgccggcccgcctccgtcgccgccgagtggtgcctccgcctacacggctggcctattatgccgccgctgttgggcgtctacgacttcaccgccggcctgcctccgtcgccgccgagtggtgcctccgcctacacggctggcctattatgccgccgccacgctggctacccgctgttgggcgtctacgacttcaccgccggcctgcctccgtcgccgccgactggtgcctccgcctacacggctggcctattatgccgccgctgttgggcgtctacgacttcaccgccggcctgcctccgtcgccgccgactggtgtcttcgcctatatggttggttggtcacaccaccgctgttgggcgtctacgacttcaccgccggcctgcctccgtcgccgccgattggtgcctccgcctacacggctggcctattatgccgccgctgttgggcgtctacgacttcaccgccggcttgcctccgtcgccgccgagtggtgcctccgcctacacggctggcctattatgccgccgctgttgggcgtctacgacttcaccgccggcctgcctccgtcgccgccgagtggtgcctccgcctacacggctggcctattatgccgccgctgttgggcgtctacgacttcaccgccggcctgcctccgtcgccgccgactggtgtcttcgcctatatggttggttggtcacaccaccgttcatgggcgttcacgtcttcaccgccggcctgcctacgtcgccgccgattgatgcttccgcctacacggctggcctattatgccgccgctgttgggcgtctacgacttcaccgccggcctgcctccgtcgccgccgagtggatcctccgcctacacggctggcctattatgccgccgctgttgggcgtctacgacttcaccgccggcctgcctccgtcgccgccgagtggtgcctccgcctacacggctggcctattatgccgccgctgttgggcgtctacgacttcaccgccggcctgcctccgtcgccgccgagtggtgcctccgcctacacggctggcctattatgccgccgctgttgggcgtctacgacttcaccgccggcctgcctccgtcgccgccgagttgtgcctccgcctacacggctgggctattatgccgccgttgttggatgtctacatcctcaccattggctcaccttcgttgccgtcgactggtgtttccgcctacacggctgacctattatgccgccattagtgggcatcttcgctttcaccgtcgaccgccttcgtcgccgccgactggtgtcttcattgttattgatggacgactttgttcccacattggccacttctgccatcaccaaggggaatattacaaagctaagtcatcatttattttattctttatatgatatttttccttttcctctgcctcactacaccaattggtcttccattgagtagtgagtcgggggctacagatgttatatcatattttttataatatttatcttgattgcttgcgacataatctgagtacaaaagtacctatcgagttatggagttctatcttcctatgctttccgtttggtttgccaatggatggttgcctttgggccgattcctagcacccgggggctcgttggatggaccgagtaacgcaaggtgctaagtattattcggaataaatcaaaagcatagagatgagataaatttattttctgctcttaataatcgcaaaagtacccgagtagtaaactccgatccgtgaaactttgttccattaatgacgaactcatgtcactcatatgcatgtttgggaagtgcctcggccgactcccagtgcttggggctatgactagtcggacagagcgtttaaacgtaatgagtcatctgctcggggaaatcaaaattgacaagaggagaaatatatatttataaatattttaaaatacttgattttttctcgagtattatatttatatcagatactactcatcctatatgtttgttctgcaggatccagatccagatatgcacaaaagggattcatggctttaagcttatctcttacgctccaggaatggatcagtcagaacatcaccaccggcttgccttcgcagccgccgactggtgttttcgcctgcacggctggcctattatgccgccgttgctgggcgtctacgtcttcaccgaccggcttgccttcgtcgccgccgactggtgtttccgccagcacggctggcctattatgccgccgttgttgggcgtctacgtcttcaccgaccggccgcctcgtccgccgccgactggtgttttcgcctgcacggctggcctttatgccgctgttgttgggcgtctacgtcttcaccgatcggcttgcctttgccgccggagactggtgtttccgcctgcacggctggcctttataccgccgttgttgggcgtctacgtcttcaccgaccggcttgccttcgccgccgccgactggtgtttccgcctgcacggctggcctttatgccgccgttgttgggtgtcgcgaccgggaaaattgccttttcccgaacgctagtgtattaatccccgtcccaggaaaagccggggtacaccatacaaacatgatataaaagacacatctttattatatcgataatatttacattattacaaaggcacttaaggcctgacaaacaaaaataaacagcagcggactagcgggcctacggctccatcttcacaggcgctcaactggggtataagccaggactccacctaagacttcttctccaaagcttctcttactgaagggggaaaagattgagcaagaatgagtacaaccacagtactcagcaagccacaccggggatgcacaattaatgcaaaggagtacaaggggataataatatagggattaagttttgcagtaaacagcatttaaaagtcacttagttgcccaaagccattttgtaaagacgatcctagagctacacagtattattaaacaaggccgtgaaccctcacgaacctgccttaacccaaggcctacgatgattcagaccgaactggcaacccgaccctgggtcccagctcgtcccaagccaacccaggccaaccattccatattttagttgttgagcaaattttaagaattaaaacactgacttgggtacattgctaggcttgcccatatccgagggctcggctattcgaatagatttactctgatcagaggtgtacatctttacccacaagacacatctttactccgcattccatggccttggaacccgtcgtaaagatgtgacataacccttcacccatcctagccgtgaacaaaagtaccgacccaatcccacctacggccgggatacccgggacaggcaggcagaactgagcccctagcagcagggcaccaaccctctgccatacgacatctcgactaccgggccgcagctcgtgtagccttcatttgccctggagaatgtccatcgacacccgacttcatccatctccaatccgtgtccttttgttcaggactagactgagcaccgagttatgccttacccattagacatgtggttagtacggtagtgctttgcaacagaggcccgagcttaatccttatagtggccggggtgctacttcccataactggcatgcacccaaaccccaccgaaaacaggttttaggggttttgaaagagaaagagaggggtatgtccaattccaccataatccaacaattccatagtgtccaaaatgatatgagacttcccaaagtctaaagttataaaaccacctaatgttgcctaattaaccagcgaagcatctacctaagttcatactagtggaaccataaatagagtactcactagttggggttttgtttaacctagggtgaacaaagtaataataacaataacaataataataaggtcataacaaaggtaaataggcatggctaaataaaacagtgataacgcgggaatttaaataaagcgataatgcattaatttaaatcaaaataattttataaactgggattcaatatgctcaaggatgatgtgacttgccttgctcagagagaacggccttccgaaccttcggcgacgaccacgtaccacgcttcgggaacctccggaacgacgaaagctacgcgaagcacacaagcaaagctacaagcctataaagaagcaataacaatacataaaaagaaagcacagggttctttaggttatagcaaacattaggagacttgaacgggtcgattcagagttcgtatgaccaagatatgatcatccgaagtttagtgctgttatatggagatttgcggattattataattaggttttgcaactataaaacaggtgtaagcgctagcctggaaaagacaggaaggctgcgccgttgacatgcggaccccacatgtcaacctaaaggaccgcgttagaccgagtacacagagtcggtccacgggtcgacggaagcggatcccgtgtgtcaaccgaggcgagtggccgacaaacggactccactagacaccacacggactgcacacgtggaaaccacgcggctaccgagcggacacactaacacggtcaccacgcgcacaagcgaacgactgccgacgccgatacacgggtaccggggccgacaaccgcacaacgggcacgggcgacaccgaaaggacgaggacagggcagcgagggagagggaaccttaccaccacgcgacgaggcgtgggaacgacaacgacgaacgggcgcggcggagacagacgggcgcaacggagacgaacggcgaggggacggcttcggcggcgatccttggacgaaggcgagacgcggccggcgcgaggcttgacgacgcggaggcgaggacgaagacgatgacgggggctgcagcgaccttgacgaagcgaggacgacgaacgagaacggcttgacggagggacgaacgccacgacgaccgagaacgacgagaggacgaggacgacgacgaccggggccggcgaggaggctacgagggcagccggcagcggctgcacggcggcgaggatgacgtggaacacgccgctacgatgacgatgacggaggcggcgccgcgagacgacgagccgggcgaccgacgggacgtcgacgacgagaacgatcggagacgacgatgatggaccgcggaggggtttggatggaggggaaatgatgccgaggacgaccttgccgctgcgatgccggaggtggtggaggtgtggccgaccggtgcacgggcgaggagggacgggcggccgaacaactccggcgaggcggatgtagaggttcgcggcgatggcgttccggcgaaaccgaggagtggacgaggtggagggctacgccatcacgcaagggagagatggcagcgccggctgacgcatgggcatggcgaaaagggcagccgggggagatgccgccgaggaggaaggagaagccggcgcgggcgacggtgttccggcgaagttcgggcgaggaggaggtgatgccggggatgagagcggcgtcgtggagccgaggaaggtggtggcggcgtcggccggcgctccggggacgtggcagaggcggccggaggcggagaagtggtggcgacgccactggacgccggcgaggacgcgtctccggtgctttccccgcgaaacggagggctgaccgagggagagggggcagctgcgacgccgggagaggtggcggcgcagccggagggtgcacgggtgaggcgggaggtgcggctggaggtggccggctcggagaaaagaggagggcgacggcgggaaggcagctccgggggtcacctcgcgaaacggagggcaagccggggtggaggaggtggcggcgacgctggaggaggcgacggcgcggccggacgacgctccggcgaggcgggagaggcggctggaggccggccggcaacgtgggagagagagggcgacggtggggaggtggctagagaccacgggagagctcgggaagaggctaaaacggtagaacgtaaagagggggttctattttatatgagagaagagggagccggccacgggagaggtcggaacggcggcggaaaagccggccggcggcaatggaaggcggccggacttggcgcggccgttcccggcgattgggggcggcattcaaaggggaaattagggggaaatgaagaggagtcaatggggattaatttcccctatttaatttgggaatcccatgcttgattcgcgcggatttgagggaggaacgaagctaggttttcggggagagagagaggaggccggctgggaggaggaagaaggcgacggcggcctgacgcgtgggccccgcgcggccaggcgcgcgcccagcacacgcgcggcgcacatgcgcggcagggaggcggctcgggcttggcgcggcttgggccgattggccggcccaagaggagaggaggggaggcggcctggggaagagagggaggaggagggagtgggccgggaggggaagaggggcccaagagaaagagagggaaggaaaaagagagggaggagggaagaacttcggccacgggccgagggagagagagaggactttgggccagacttggcccaaaggaggaagaggacattttttagatttttttctttttaataaactttgttaattgttgttgttgtttaataattatttccggcgctctgaaaattcaagtaaaatttgagggctccttttagaccaaggagaatttaacaaaaattctccgggccacatttgaatttttcttgcacgtattttagtgtttgccaatttctttccgaattttaattaattctattattccttttagaaaatgaattttatttcgggatgaatttatcaggacgtgacaaatccaccccccttacaagaatctcgtcccgaagattcgagtaggctagcaagaagataggttggcgggtcttctcttcttgtctgacttctaccgctccgtcttatataacaaacttgcctagcaaaacttcttcactctggactgcttggctcgatctcctgttgcagatggaatcttctcttcacctgacttgtccctggttgaacctttagctgacttcgactgggttgcggcacttgaagatggggcttcagttccagaactttgcatagttcatatctttggagtcaacctcatacaagttacccacttcatgtcatgcgtcgagatcagctcgtcattactaagataccatgcttgtcatcatttagcattcaaagtattcctttacacattcagccctgacgtattctttttagatttctcttaacaatcacctttcgacctacttctttgttcgataataaacacctttgctggtatcttctatcaatcacctcttaaactttgtcaaccaagtactcttcactccgagagttgtggatgcttctggtgacgatgaggtcctttggcttgctgcctttcagtgaaaccttgaagtgttttgccaaaagctatactaactgtcgttgcctttgatccgaaaaggactcatctgtaacccttagtccaaacaaatgtctctttggttaatcacttgattttcttcttttccatcctcaggttggttattagctcgaggttagaatataattcctcggaaatgagaccctaggtctcctttgacagtaaacaattatacacataattccatatcagcatcttccaaaatgaccctcctagaacttgcttttattacacatgtctccctgattacatgaatacaaggcactgtcttaaacaaaaagggaatgtgcttaacatcggtacattgtttcctctatgggttagaattaacaggaggcctcacaggtacggcgtttgctccagtgaccacaaggcgagtgacctgtcttcttcttgcataatggccggagtgatggcgcaggttacgcttcggctgtggacaatctctagagaaatgacctggttctttgcagttgtaacaaatcaacgtcttctttgctgagctgtccatctggggatgatcattgtgacttggagttggaattggtggttggaaacccttgctaacattggcatcagcggtaccatcgttgctatcaccattggagtctttctcagtgtcaaaaattgctaaggttgtcattctgggttccaacattgatactatcgttgacatcttggcgaatgctaccgacattgcacgctttattcgagtggtcactaatggggcaagaaccatggttgttggtggtatcatcattattagtattgctagtgttgttgtctgcattgcgtccatcttcttgaggcaggaactctggatacacaacagaagatccggtgatctgaagtggctcagtgcgctgtctttggttaccacctggaaatactgggttgttaaccatccttctcttgcaattcgtcatccgattatgctcactttcgagttgcatggctttgtccacaagtttctcaaagtcttcataatcctctagaagtagttgcactgcgagctcatcttttaacccctggagaaacttctcttgtttgtcttcgtccgtttccacatcttctggtgcatagtgagccaaacgatagaactcgtgcaggtactctgcgacggtcaaatctccttgcttcaggtagcgaaactctcgttttcttagtgtgatcattcctgcgggaacatgtgatctcttgaatacagatgaaaactcgttccaggtgatggtatgtccttctggccgtgatgcttcgtagctatcccaccactctgaagccggtccaaccaactgatgagttgcgaagccaacccgctcctggtcggtgcactgaatcaaccctagcttcttctcgactgtgcgcaaccaatcactggcttccataggatcgacggccatggcaaaggttggaggccccgttttgagaaattctgataacttgcactgttgctggactgtaggtacttgaacattggttgcccctgctgggttgttccgattctgtaatagttgaaaggctgttgccaacatgttggtttggttaaccacaatttggattagctctggtgaggtttcgttgatgcttttctcattcccattggcttgggtttttgagtcatcggatccatcattcccatagcctttgttaccagtgttatccatctgtcacaaggtaggggttgagagaggaagcatacaaggaaagaatagaccagaaccagggacaagaccttaaaggaactaattcttcttgctgatgtgctgtttgtttcacttattctgcaagttgattaagcaaacaacctagcatggctacatcaccacccaccgatgcaaaccatgcgctacacacacaagcaaggaaacatactacaaacgaaacactagagggtggcttaggttctgcgacgggttctccaagatcttagcttcagcttcacggctggcttcactgcttcctacactttgctagcggatcctgcagtcttccggagcttcggcaaacaactgacgacatcttcttcttcgcaaagctgaccatctagtactagttgaaatccgaagaaggaagaagggagtaaaccttttgcaaatagcattaggggaaggagaaaaaggaactttcgcaaatagttttatttataaaatatgtccttaggttttatccacttggcttatcctacagtcgagatggctctgataccagcttgtcgcgaccgggaaaattgccttttcccgaacgctagtgtattaatccccgtcccaggaaaagccggggtacaccatacaaacatgatataaaagacacatctttattatatcgataatatttacattattacaaaggcacttaaggcctgacaaacaaaaataaacagcagcggactagcgggcctacggctccatcttcacaggcgctcaactggggtataagccaggactccacctaagacttcttctccaaagcttctcttactgaagggggaaaagattgagcaagaatgagtacaaccacagtactcagcaagccacaccggggatgcacaattaatgcaaaggagtacaaggggataataatatagggattaagttttgcagtaaacagcatttaaaagtcacttagttgcccaaagccattttgtaaagacgatcctagagctacacagtattattaaacaaggccgtgaaccctcacgaacctgccttaacccaaggcctacgatgatgatgagctacgta

SEQ ID NO: 8937 - DNA, 3611 bp, Oryza sativa
cttttgcaaaggagaaagaaggagaagaactagctcaggggcgtgatccgatcgttctatctctaaactcgcatctaaacagatcaagcagtagcggggagactgccattcaaaattgggactgatcgggcgccgccttggttcggctgaaccctggcgggtccggctggccgccaattttttcctaggcccactaattcctaagctaagcacaaaaatgacaactttgcatggtttttagcatggaatagatgagaccattatggctcataatcgattaattcaataacatccacttcttcatctaaagtttcatttggcacaaggaaaatttttaagcgttgaccgtttaccttgaatatattacctgaatcatcacggagtgtgattgccccatgtgaagaggtgtcgatgacgtcgaacggtccttcccatttgctgcgcaattttccgtggccgaaaagcataaccctggaattgaacatcagtactttgtctcctggcttgaatttcttaatgtttatccttttatcatgccagcgcttcgtcctttctttatatatctttgcgttgtggtaagccttctctctccattcttcaagttcagcaattttcatttttcttcattctcctgctccttcaaagttcatgttctagtttctgatggcccaatatgctctgtgctcgagctctacgggtagtcgacatgacttcccacagtgcgtctagcaatctatcctttcaccatgttcccattttgttgaccgtcttctgcacaatattcttcatttgtttgtttgatgtttctgcttgaccgctggtctgtggatagtaaggagtggccacattgtgtttggctcccatgtcttgtaggaggtctcggaaggttttgtcgatgaagtgagaacctccgtcacttatgaccatcctaggggtaccaaatcttgggaggatgatttctatgaacatcttcttggcatgcttcgcatccgcggtgctgcatggcatagcctcaacccacttggagacatagtcgactgccactagaatatactcgcagttgcgggacttagggaaaggtcccataaagtctataccccaaacatcgaatatctcgacttgcaagttgtatgtgaggggcattgcatcacgagcagtaattcctccttgcctctgccagcttgtgcatcttctaacgaatgcttttgaatcttcatacattgtcggccagaagaaaccacttttccaaatcctgacccgggcgcggaatgcatacaaggaacaatcacaagagctcgtgcctgttcacttcattatcaggcagtttcgttcttaaggttacaatatcaggatttcttgaaaggagtacaactaaataaatcctgtgataattcacgcgggaaagattgcttgtgataatattattgtgcttaagaacgaaggagaaaaaacgaaggagatgcacatagtaaaaaatgattatacactacagaaggtcccaatttggcctgccacattgacccaagttgaaaaggatgcccattgattcaaggcttcgtttggtgacatgcaatggtatatacgatttagcctcaaaaataaaattaatctagcggaccgcacttgcaaaaagagtgcctacttttttctgtaaacgagtactacgatcaaacctgcatacatgccatattgactacacgatactatttcttgcgcttattctcgtgattctcctgtggccatctccagttatgtatcaataagacagtcttttcccctaaacaaaaggacaaaccatgttcatctatgaggagattgatcattctcttgattggtgaacaacggacaatattattatcatttctttagtattacaggcttgataagccgatcaagcaattggtttgcaatttgcctcacaggcttgcaagctagggtagcatacatttctacagcagaccttcgatggggagaaaatgttgcctggtacgggtaccaaaccatttatattgacattgttgcgtccttcattcatggatgcactcctggtgtaatccagatttttacctgaaaaataaaaaatattttactaggaaagcatgaaagatacagaaaaaccatatgcaatacatggatatgtgaagatggatgtccagaagaaaattggaatcacaaattttactctgaaagatatgtttctttaatacatcgtgattaccacagaagaattgaataattgtgaaatcaaaataaaccttggattcaccattgagattcaatattagatagtagattaccatacacgtggccaggaatgctaaaacagcctagaagggccaacaacagaagcagaagtccacggctacagttcggcatctgcttgcccatttgtgtgattgctttgtatgaagctgtggcttgtgcttcttctttgttttacgatggttatatagacagcacaactgaaataaataggcaaaagtaatccaatgattaatagtatccaaatataaggcttatcctaaacatatgtacagttttgttatatattattgaaatgaagtatggtggatagtcttatctaatcttaccatttgcagtttactcatattgctaaacatggacggtggcctatgtaacgtctactagacactcattgtgatagctaaatatttattaatgtgtttattctgcacaatctatgcgaagttattccctcgtgtaagaaatataagatcttttgcacgatgatacggtctgacatattaaattttaccactaatattctttccagtatactcggtgaaaagtcactagaattacaacactataaaaagatgattgtaaaagtagttaaacatattttaccgttcctataatctctacctcccaatgaaaattttaaaaacatttacgtgttgtttggtgataaatctgttttatgatcaaagcaaatttctttgtattatataatcccttattttccatatgttacctgttaatcagtggcgggcccagctttttaaacttgggtattcgaaatgggaaggggtaaaaaaatatccatacaccaaaaagccaaaaaatgggcttgtatattatgatacactaataattataatttagagcgtatagaacataaaattgatcattagttcacacagtgatagaattgatcatcactagaaattgtttaacttatagaaatactaataccaaacatatcaaagtgtcaaaatatggaatacaaaaatgatagaaaataataagttaggaagaaaacttacaatttagatattaacttttcgacgcttgatattttggaaataattgatgatgtccttgtccttagcttgcaaaaagaattctctttcaatgaatgtaaccaaacaatcattcaaatactacaaatttgctaatatggtatgaactatgaactactgcccagtgtccaatatactcaattactcaaatactcaaataggcaactagtcaactacaatcctacaaactaaatgtctaaatcaagcaagcaagcaagcaagcaactacactaaaatactaaatgtctaaatcaatgaatttttgtgcttgtcccgttgtccggagtt

SEQ ID NO: 8938 - DNA, 4040 bp, Oryza sativa
agatgtgtcttttatatcatgtttgtatggtgtaccccggcttttcctgggacggggattaatacactagcgttcgggaaaaggcaattttcccggtcgcgacaagctggtatcagagccatctcgactgtaggataagccaagtggataaaacctaaggacatattttataaatgaaactatttgcgaaagtccctttttcctcctttcccctgtgctatttgcaaaatgtttattctcttttcttcctccttcggattttccactagtactagatggttagttttgcaaagaagaagatgtcgtcaattgtctgtcgaagctccagaagactgttggatccgtcagcgcagcaaaggaagcagtgaagccagatgtgtagcaagagtgaagatcttggagaacccgtcgcagaacctaagccaccctctaaggtagagtcgttagttgtgtgtttccttgcttgtgtgtgtagcgcgtggtttgcatcggtggggtgtgatgtaaccatgctaggttgtttgcttaatcaacttgcagaataagtgaaacaaacagcacatcaacaaaaagagttagttcctttaaggtcctgtccctagttctggtctattctttcctggcttgtttcctctctcacctcaatccctgtaacagatgtttaacagagaaaaaggaaagaatgtcagcgggtatgcctccagtaactcaagttttcaattcaatccaccactggcctcaagagagttaaccagggcacacccttggtccattccaagcatgctgcttagttcacagctaccattagttggaagtcaagaccaaaatcagtatgtgtttgatcgagcgtttgccacccaggtcaatgagcttccaatgccagaagaggatgtccccttttgtcacgattgtagagagcaaggacactatgccctgaattgtccatgggtatatgtcaaagaagccccttcctttggtttagcagggcagacatcgctaaaccagcctcctcgcaccaagtcaagtttgcagcctagtgtgcaaagtgaagagcccaatggagacaatccattgaatcctagaaaatgctttcctcctagcctttcgcaccacgtggggtcacgtactaagcaagccaaaggcaagaagagtaagaatcagaagagaaaagcaccgatgcgaactgaagaagaagtacgtaagatgactattaccagcaccgaatggcctccagcagggataactattcctagacgtcaaagaggaaataccttccgaggtgcacgacagttgacccagcacctcctaagccatggtggcagagtatctgatagtgaagggtcagatcaagtctcctcggattatgaagatgagtccccccgacatctcggcgaggaagagatggaatcaaaagcatgcccccgttgtggagaaattggacacgttgctagcatgtgtttcacactttgccctcattgtgaggaagaccatccaccaggtgaatgtcccacccgcaaggtacatgttttctctgcgcaggtacaaaccatgtgcccaaggattgccaactcagtgtgttgttgaccaagaccgcagatatccaacgaacaaccctacgattgtctcgtcagttagtcagctccaacagcaacatcgacgatataatccacagcaccaatgctcctcttggtgcacctgattctgcagtgaatcatagcgataataccttcagcaccaaccattctttgcaccgacagcctcagcaaagaattgttatcgatgaaagcagttgtgtctctccccgacatactccaggccgagcaaagggcaatcaatctcagagggcgataccaagcagaagaccatcatccgcttcaaacagcaatcagaaggaagcttctcctgtgaatgatagcaatatgcagtcctatcacatatcacagaccaatcaaggatgatgcagtcactagaacaatgccagctatatctctccagaatcaaaatgagcagccatgtttgtggttttcagttcgctacttatcatggtgtaatcgaaagtttgcagcaatcatgtaatacataaatatattcatgtctataaacagtgggtttgctatgcttatggatgattcatgttgaggatacaatgtaccgatgttaagcaccgtcccttttttgtttaaggcagtgcctcgtattcatgtaatgagggagaaatgtgtaatacagacaagttccatgaggattcttttggaagatgcgggtatgtgattatgtgtataattgcttactgataaaggagacctagggtctcatttcagaggaactatgttctaaccttgagttaataaccaacctgttgatggaaaagaaaaccaattaaactgtgttgggttaaaaggccaatgagacagtagttggggataggagtttggatacgccttttacagatcaagataaggattgttggatgaaacccataagggtacccgccatgcctctacattgataagttcggatatacctgcaaacagtaagaagatccaggagacatcaatatttgagaacataatagtcgatggttggtaattagtctatcaggtatcagaaaaaggtcaaaggtgatatggcagaagaacaatatggatgctccccatctcgaggaagcactcaagatgaccatcggcaattaaaccctagtggtatagatacagatagcaggcaatgtatttccctgaaggtagtcagtgtagctttttgacgcaccacatcaaggtttcactgaaaggcagcaagccaaaggacctcatcgtccccagaagcgtccgcaatccacattaaagaataccacctgttagagataagccgaaagatgatttataaaagagattggcaaagatgttctctagcatgaaagaagtaggccgaaaggtgattgataaacagaaacatgctctgcatcgctcaaggacgacccctgatagtaattgccccgcaacagtcaccttgtcattaagtaagcgagatgacctaggtaaaaatgtttctatgaaggcaaggagtgaaatcttcaactcggtatcagatgctacacggagtgaaaagtgcaagcaccggttaccaggtaatgccatgtcttgggagatgatccaatgggaaagaacacatcaaggttaaaggtgtaaaggaatacgttgaatgctaactgaggacaacctgaagataataatgggaagtaaactgaacataaagaaagtgaatctgcgttgcttgttcgtgggagctattcccagttatgaaccaagtgatatgatcgaagatagtctacagaggtcagattaaaatcacctccaacaacgaagcttcaggtctggcaggaccacgatcagacaataacaagtccagcagcaaagtcattcgggaagacgtcaaagtatgtcaagtgggataaattggttctcttgggaagcataacttatagttagagtggttgacccttgcatcaaatagcagaagtagctatcacccggagaccagggaagctaatatgaggcagttggtggcgagttagaagcaaataacaagcatggtatcctagtaatgataagcaggttacgacgcatgacacgaagttgataacttgtccgaggttgactccgaagatatgaatcatgagaagttctggaacggaagcatcactgcactaccgcaacctagtctgagtcagccaaaaggtgcaccctggtccaagtcaggtgaagggaagattccatccgcaacaggaggtcaagccaagcagttccgagtggtgaagttttgctggaagtttgtcaagacgcgacggaagaagtcagacaagaagagaagaccgcccaacctatcttcttgctagcctcctcgaatctcggggacgagattcttgtaaggggggtggatttgtcacgtcctgataaattcatcccgaaataaaaatcattctctaaaaggaataatagaattaattaaaattccaaaagaaattggcaaaccttaaaatacgt

SEQ ID NO: 8939 - DNA, 4939 bp, Oryza sativa
gttttcgcgcaagccaaaaccactgatgctcttagcaaaaagctggccacctatgacaagatcttagagaacatatatgttaagctagaaggcttccgcattccaaaaccagctaagcttcaacaagatgatagagatacagctggcacagttagctgctctagtcgctacaaatgagtctaggaggattctaggacaacccgaaccttccttagagtatgttaaggcgatcaccatgagccggggaaagtctactcgggatccgccatatcctaaccctgcaggaacacagagcagtaacaaggaggcatcacctgctagtccggctgataccgacaaagcagctcaaccaagtaaaatagtgccgcaagagtactgcgacacatcggctgcttccgtttccccaaagatacaagaaaccgttagtggacgagcagttcgctcgttttgttgaagtaattcagaagatccacatacacgtgccgctgctagacacaatgcaagtacccacttatgcacgattctgaacaaaagagatcgctgccaacaacggaagtggtcatgctgacaaaggagtgtagcaatgctatactctaccggcttccggagaagaagaaagatccaggggtgtcccacgattacatgctcaatcgggacacaactattcgaccaggccctctgcgaccttggagcaagcgtcagtgtaatgcccaaagaggtctttgacaagttcaacttcacggtgttggcaccaacaccaatgtgtctccaactggccgactcgtcggaccgctacctagcagggattgcggaggacgtgccggtcaagatttgagacttcttcatcccggtcaatttcgtggtgctagatatggactcggataaggaaacaccgctcattcttgggcatccgcctctgagcaccgccgaagccaacatagacatgggagtaggcagcaaacgtttccacatcaacgagaaagagaattttgagtttcggctaaggatgaaacaatgctccacggtgaggatcaagtacgggccgaatccatagaatattaaagaggtctaagtgaagccgcccaagatggataacctcatgcattcatgaagaacttcctagagaaggaagtgtcaatgaacaggccctgtccaaagaagacaccggtgaaaactagtgcactggcaaagcagcctgatgaagcatgtatgcccccgttgttaatttggtaattaatgacaagcactaattgtggactaaccgttctattgagttacatattttacgttaggatcacataatgtgtgcatatggatgattatcgcggactaaaattgatggcgcaaaccaaaaggaaaagaagacggtaaactagtgttttaattgtaaattgatcgaggagttgtgcgatcaaaatttgctagtttatttttagcttcgctatactattatggggtgtaatgacctagacaaagagatgatcgaaatgccacattaggtcatttgcatttagacttgtgctcaatttatatacatttgagattgtctgactagggccggtctgaccgaggcatagatgccggtctgaccgatgggtagcggccggactaaccgtcgggttaaccacggtctgaccgcccccctggaggttggcggtggtgctttggggaggggatccagagccgcagccggtcagaccggtagcacactgagttgggagatttcgcccccgacggctagttttggttggtgggagtataaatactcacccaccagcaacaaggggtctctcttggcacttgcttcacttgcatacaccccttgcatctctcccacactcaattaagctttgtgttcatgcatgtcacacccagagttttcccttcccttagatttcaaatcactaataattgacttcaagaatttgctttggttaaccaggataaaaccctagttaacgatacatttaataatcggaattgtcagggagaatttttttcgaattctctttgctctgtaaaccgctaacaggacttaaagagtaaatatcagatcaccggaggcaatgttgctaagttaaaaagtgtcaagctaatctccttcctttacctttggtcgtgaattgtgcccaattcactcccctctcagtccgcactttccttttgcatgacgaaccgtattcgtgtcagttcgtgggatcgtttcttttcctttcctaaaacagcatcgcattgtttttccttttcgggaaagacctagtctcccctagtttccatttccctccccctctccccaaccagccatgccccctcccctactcgcatgcgcgcccctcctcccctcttatccggctccctcccctcctcctagtcctacttcctctacgactccaccattcctaatccaaccctctcctatatgtgtgtcctccccttgtttttttttgtttttcccgagtcctagtcgcaagccgccaccgccgcttgctgtgccgccgccgccggccggtgccgccgccgccgtcgccaccgttgcgtcgccggtactccgttccccctcccctttagatgtatttggtcctgcactcatcaattcatctatctaattccttccgttcaatcttttccagcgtcgtcgtcgtcgatcccgagctcgccgccagaaccgccgccgccgtcaccgtcctttctccgctcatcgttgttctccggtgaggttctccgtccttttagggttaagatttttctgttcctagcgtttgtgtcatgtgtcgttgccctatccctagagctgagccgtcccgctgttggcggttattaaatgccaattttataccgccaacatctgcataaagtccagataataaaacatccaacatagtgataggtgttaaatctcacatatttcacaagtgttaggaggaaaatcagactaaagtgtgggagaaatatgtatccatacaaggatggtttgtgaacttcatcaaaataccaaagaatcagtccaacactcccagaaatggatagaggaggaccaggggaagagatgggtcgaaggccaggccaggtgggcccagcccaggttcggccgaacccgagccaggggtctcagccgttcaagctggggtttggcatggacgtcccagattactccctgatggcgattgcggggcaattcagacaattcacataaggataaccgtcatacgtacctctatataaggagcttcactccttcactcacacacactaccaagcttgagctgaattgtaagaggctctattgtactatattgtatactagaataggaagagagtagagtagaagaagtcggaagaattccggagttgtcggtaatcttctctcatttattttattctgtttattactctgatttcaatagagttatcttcctgagtaatttagatttatcttgtgagatttatctcttggttagttcctaaatagcataggggattattgttcactataatcaactaaaatatagtgattgctttagtgagttataagcactaaagtagatcttaattgcttagacgtggtgtttaggtaattgttatccaataattgatgtgtatcccgcagtacgtttgaggtagatgtagaggtggtgacagccctcgagatcacttaagttctccctgtccgggtacgtagtagagcaacatctgggaacagtgggttgccagtgcctgaagtattgtgttaggattaaacttaagcttaccctagacacactgattctcactagtaaatcctctctatactagcctatctttgcttggtgtccttggatgaaccggagaaaaggtctgatcacatacgttcccttggattcgatacccatagaatagtccataggggaagtgctacatcggcatatccatgcgcttgcggatttctatctgtgaccgtaagaattaccaacaagcatttctggcgctgttgccaggtaacggttgctgatcatttccgaacccagttcatcctcgtatctcttttcattttctattctacctttacccctgctacccagagaagtattcctgtcaaactcttctcgactatggagcaacctctcttcgagctgtctgttcctaggggcgaattctatgagccacttccttcattggagccaatttatacatctggctatgaaattcgccccgaactaatcagtatggttagggaaaactctttctggccttgatctagaaaatccctaccatcacatataggactttgagcaagtctgctcatgccttcagattcgtagcatgaaggaagaaactgtatggtggaaatttgtcacgcccggaatttctatccaaaattccaaacgcttacatgtgtgtgaaccctcgtccaggaatcagccgaggcacacaataacaaattgataatagagtacaattattactctaattaataagcaaataaaatgtcattacagaggtagatagttcctctcaatcaataaagatctaagcagcggaaaataagataaacggcgcagacggctccactccacaggcagcttgaccaaggctacacctaatcctccacaccatcagcatcattgaagaactcttcctctgatgaatgattgcaaggtgagtatatgacatactcagcaagccacgcagcaaatatgcaagtgcacaggataacaaaggatggcataatagggtttcatttgcaaaagcagcatttagcaaacatttcagaatttaataaaacagttaagtattaaacaatattaatccaacgctacacaacataccctgttgcataggcccagccattcagatcaaccatcccggctgcatagttctatctccaaaccaggaatataccattccaaaccaggagctaataaaattattaccagttatagcatcatttactatggtgaga

SEQ ID NO: 8940 - DNA, 8507 bp, Oryza sativa
cataagttatcccaaaagtgagctaatgtttctaagcagggctaagcaattaaatctaatatctagttgaaccaacatatagagctcaactagtcaagttataataacccaaggtatcaaggaataaggtaatcaagaacaaaagggctataacaaacaataggttaattccacccaatgacattcgaaaataaatgcaatatttgaatagaaacaatagctttaaatgggatcaacatgctcaaagggttgtttgggatctgtgtgacttgccttgctggccttggaactcttcaaactcttctccggcgaaaatggactctccggaaacgacggaatctaagcagaaagaagcaaaatcaccaaaacagcacataaacaagcttgaacagtacatgtggatatttttaacatgtacatctcaattttagaaaaatttagagacttgaaccaagtaaatcggagctaagataaattagttatgaatttttgaagattaaatcggattaaaacacttaaattgattttaattgaattatgacgcaataatgaattatttttgaaaaggaaaaggaggattattgcgtcagcgggctagggtttcggtggaccgggcgcacgggcgacggctcacgcgaacggacggccgagatcgacttgatccaaaacggacggccgagatcgaacggtccacgaccggctcacagcaaacggccccgatgacgtcggcgatgacgtcaccaccggcggcggcggctcgggcttgcatgctcgccggcgaatgacggcacggcggcgcgaacggaaggcaccaacgggtagagcgcgacgcggtgaactcaccggtgaccaaaagagcggcggaagatcaacggacagcgacggcgacgaggaggaagcggcggcaaacttcgggtcgtcggcggcgacggtgctccggcggtcttcggcggcggcgaaggagcggacgaggacggcgacgtgacggcgaccacgacggcggtctacccgagcgacagcgacgtctggaacggcggcggcgcacggctggagcgacggctacgacggcggcgctaggttgcacggcgctagagctcttccggcgacgagaggcgaaggcgaaggtggcgacgggtagaggagacaccggggaaccttttaaaggggctcggaggcgacggcgaaggcccacggcggctggcgatgagaaggaaggtttagggttcggaggagagagacgaatccgattcgacctcgaatcaaacactttccaagccgttttagccgatgtttccaaaagggaaaaggtagaggagatcccgaggatcatttcccctctatcaattcggccggagaaggaaaggagcggccggatttggaagggaacggcggcagcgcggcgctagggttttgggaggcggccgacgcgaggaagacgacgacttgacaggcgggccccacctgtcagcgagcgagggcgcgcgcgcgcgggcggctgcggactgggccggctgggccttgagagagagaacggttttgtgccgactttcggcccaaagccaaaagagactttttcaaacctttttcaatttaaattattcatgaaatgcaattccatttattaaaaatagttccttagctcaaataaatctcagaaaaatctaggaattatagaattaagcaaagtatttaatgaaattttatctggccccattttatgttggaatttattaattaaaattagatcttctcttcaagacttttaaaattatttctaaaaattccaattaaacaacaatttatatattttgaattttcagggtgtgacaaaattgtttacgttctcccttcatgagagagtgaagcaatggtacacatctaccgttggatgtgtaaacggtagttgggaaaagttgcgagacagattttgtcttgctttcttcccagttactcgtattacaaccctttgagtagaaattctcaatttccggcagattgaaaacgaatccatcggtgtagcctggtccagattcactaatttagtgtagtctggaccaaccttatccttacccgactatgtgcttttgcaacattttcatacgggtctaaataaggaatctgcattctatctagacataaccgtcggaggatcattcatgcacaagatgccatcagaaggaaaagtaattctagacagcattctagaaaatacttccttcatgacgcaatgcgatgaaccccagctagaggcatccgtgtccaagatagaggaaccttcaacaatcgagtcacaacctgaaccttccacctctaccgactcgattgatgaaaaagttcccgagccatccgttgagactgaagaaattcagactccggatcgtgccgcaatcatgttcagggatggttttgatgaagactatggtaacaccctgaactacttcggtaaaaagaaaccactcgtccccttgccacctcccgatcctatggaacttgggttcctaagagaaactgtccgggagttgaaatctataatgagtgacgaatggctaagggagacagagctttcatctgaagtaattcaggggcataagccaaacgacttctccttctggaccctttttcttcaactgaggtttgattgaattaaatcctgtaaaattcataactaattcaaatgaagtcggaatgaggccgttcaagtctctaaattcatctaaaatcatgatctacatgtttgtttactttttatgtactatttatttggtttttcttagactttttcctcgttttgcgtgatatcttgtcttttccgtcgttacaatggtttgtgagtgcgtcggaagtattcaagaagattaatggaagacctattgttgcaaggcaagtcacacagatcctaaacacaattcctttgagcatgttgatcctatatttaaattatctatttatttcaactgtgcatttattttagaatgtcacaaggtggtgtgaaactattccttcgttatggccaattcgcattgattaccctattccttgataccttgggttataatttgactagttgaactttacatattggttcaactagatattggtataattgcttagccatgcttagaaacactagcacactattgggatgattaatgtttcactattatttatggttatattgaatgatagctcacgattgtcaatcgtgattggttaattaattatttgccaacttaaacttgacaatggtgggttgtgagcatatagttttgaagatcgtgctcatgacaactaaggaccggttcgtgagctattgttgtgagacattaaccgtgccaaccacaagccagcatgggcaatggctttatttttttgtataccatggttcattgttgtgagacattagacgtggtgtttaggtaattgttatccagtaattgctgcatatcccacaatatgttttaggtaggtgtagaggtggtgacagcccttgagattacttaagtcctccctatccgcgtatgtagtagagcgatatatgggaacagcgagttgctagtacctggagtattgtgttaggatgaaacttaagcttaccctagacactgtttctcactagtaaatcttctctatcctatatatatatatatatatatatatatatatatatatatgcttataccaaaggaagaagtgccagtggtacgagagtatctggatgtatttcctgaagaactaagtgaattacccccagatcaggaaatagaattcatcatggagttacttcctggaacgacacctatatcaaaaagaccttataggatgccaattaatgaattagaagaattaaagaaacaaatagccaagttagaaagaaaaggttttattcgaccaagttcttcaccttggggagctcctgtgctatttgtcaaaaagaaagatgcaagcttaagaatgtgtgttgactaccgagctttaaatgaagtaactattaagaacaaatatcacttgccaaggatcaacgatctatttgatcaattaaaaggagctagtgtattctctaaaatagatcttcgatcggggtatcatcaattgaaaatcagacaagaagatatatcaaagactgcctttgtgacaaggtatggattatatgagtttacaattatagcatttggactaacaaatgctccggcttattttatgaatctattgacagaaaactaatcttctctccaacgctgatgttaccaaatttgattgttaacagaatctcatgaacaatatatttatggagtatttggaccagtttgttgtcgtgtttattgacgacattcttatatacaccaaaaatgaagaagaacataaataatatctccgattggtactggagaagttaaagcaacgccaactttatgccaaattctgtaagtatgaattttggctagatcaagttgcattcttgggacataattaccaagaatggagttgtcgtagatccagagaagattaaagctgtgatggagtggaaggtatcaacatcggtacctgaaataagaagttttctaggacttgctggatattatcggagatttattaaggacttctccactattgcaaaacctattaccaaattacttaggaaggacaagaagtttgaatgtacactagaatgtcagagtagttttcaaagattaaaacataagcttactactacaccagtattactcttgctagacatccaaaaagattttgagatctattgtgatgcttctcgacaaggattaggatgtgtccttatgcaagaaagtaaaatagtggcttatgcatcaagacaattaagacttcttgaagaaaattatccaactcatgacctagagttagctgcagtagtacatgcggttaagatctggtgacaccacttgattggaaatcattgtaagatctacactgatcacaagagtttgaaatatatttttacccagacagatcttaatcttcggcaaagaagatggttagaattaattaaagactataatttggaaattctataccatccaagaaaggccaatgtgatggctgatgccttaagctaaaaagcttattgcaatttacgacaggaaatactgtcaaaacaattacaagcagagttgcttaagttaaatcttgacgctattaattatggagaattaaatactgtcgaaacatgatttcggcaataataaaacggggtagcgcacgagacctagaagtggatgtatgtggagacaaaggatttagacaggttcaggccctctcaatgagaggtaataccctactcctgtttggggattagaatccgccgggtgtgtattgatctgacgatcaggttgtctcatgccccctagagggcctcctgcccaccttatatagggtgggagcaggattacaagatagaaaccttaaccaataaggtaccgatttcctaaatctactttacaatcttatcaaaccaggattttaggtcgttccataatatacagggaaacgtaatacccaagtcatgatctgttacatattccatacatatatgttatcccctattactagtcggataaccatgccgtgtgggtatggggtacccataatctccacagtagcccctgagaccttcacagtcgaaaatataatgttctctcgaactagattactctaaagccgagtgcttcaatcatcttcgccatggtctctcgagtacttttaccaaatctgaagactgtggagggctgaaaaataaagtcaggtgcatcgaatagatgcacctaataggtgtagcccccaactatgtgattagctgaacaaactaaacatatagtcaaggaataaattatccaattaaccgagtggtttttgataattatagtcaaccaagtgacttgataccaatatatagcatatgcggtgtgaatccctgaataatatgatccaagtgatataccgactgcttggcaaaatatgatgcgtacaacctaaagttgacaacatctttgaaagttcacatagcaaaacaactataaagaagcttgaatgctgtgaataaagaaatttcgaaagtattgggcatacgccatgcgcacactgctttaacagatgtgcttaagtccctaaaagacacatggtttcaccacacctggaaatatatggcatatatggtataacatccgagtaagtaaactcataaaggatttaccaaccgcctgaaaaatgaccataatatataatcaacctaagccataatattggtcaataaaaatgcacacttacgtggcaaaaagcaatgatattgtatccaatcaattgcttgataaacccaaacagcaccttgactatataaaaaagtcagcggggcagctatataaagctttactgtttgacaccttttaagatgcattgtaccaactcctaaaaagtcgagtaactgcggtataaaaggattttaaggtattgggcacttgatcacgcgcactttggcctaagcgaaaagtgcctaagtccctaaaagaacgtgacaggccacacctgaaaatatgggctgtagacatattaggcctaggccaaaaaatatgccttcgacaccctttaaaggatgacgcatgtaacatactcccgagtaataaatcttccgggtaatatagaccaagtgtagctcatatgaatagcttctgatctgaatgattatcccttatgggatactccaaaataaatataataattgaatcccgactggcgcaagtattcggttgatagcccttacggggaataataattggtccagtctttgagcatagaaaatagactcatgactatgaatccatgtggaatgtatccggaacaagtccaaattggagatataatcctcacgcttgagttgatgagcccctgagcatatagcttgtccttctgtcatagtcaaaattgtctattggcaatagctgacgcagtcggcatggagatgaaatgaccaacatgaagacgaaattgctcatcagaagtaacggaagatgtcagtggtagtaaaaacagtgacaccaatcaaaggtaatgaagttgcataaccatggaggcgaagaaaccagtcggcaacagtcaggtcagctatcaatgaagatgaaagcacccagcgataaagttggtagccatggcagcgaaataattgacgtgatgaagatgacgatgtcggcgatccagttaatagcagtgtcacaactaatgataatgacgaagacgctcatcagcatttgcatagtaggtcaaccgtgaaggtgaaattataagtcggtgaagacataatcatccattagcaacagcggagatgtcagggccgatgaagcagaggtgctgttgatgatgtcagtgataataattcatcaaattaatgttatagctgttgtagatgcttcacttggaggagagttgatgctgtagtccaactcgtctaaaccgaaatatttgatgttgttgaagtagaatgtctgctccgaagcaaagatgaagataatgactcctggagttgacttgttggttgatgaattgatttcttcagcttgacataaaatttgtcaaattttgagccttgtatttgtgtagcccccgactctttgattagttgggaaacaactgaatatagagtcgagaactgtagcttcttgtcgtcgaatagtcattgcttgattgaagatatgtgttgaagatgtccaagtagaaatccggtagtgaagacgcgcagttgtgaagataaaagcaccagtcggcggcggcataacacgagtcggcggcggaagacgatgatgtccatcagtagtggtagctgtataaaccagatgtagaggcgagggcactagtcagcagcagacgagacgaccagcaatgaagatggtaaggccaatcaacactggcagaatcatgcagccatggaagtgcagaaaccagtcggcagccatggcaaacgtaggcagcttgtgttgaagatactgatgcctattagtagtgactgcgatgtagccagccgtgaagaagatagcatcagttggcgttataacaggccagccgtgcaggcggtgacaccagtcagcggcggatgcggcggccggtcggtgaagacgtagacgcccaacaacggcagcataataggccagccgtgcaggcggaagcaccagtcggcggcggacgaggcggccggtcggtgaagacgtagacgcccaacaacggcggcataaaggccagccgtgcaggcggaaacaccagtcggcggcggcgaaggcaagccggtcggtgaagacgtagacgcccaacaacggcggcataataggccagccgtgcaggcggaaacaccagtcggtggcggcgaaggcaagccggtcggtgaagacgtagacgcccaacaacggcggcataataagccagccgtgcaggcggagacaccagtcggcggcggcgaaagcaagccggtcggtgaagacgtagacgcccaacaa

SEQ ID NO: 8941 - DNA, 8001 bp, Oryza sativa
  unsure (1)..(8001): unsure at all n locations
ttccccccccccccccgctcccggcctcacattggccaccgggtgaataacctgagccacccccgatcctgtagaggacccgacagttgagtgggccccgcagctccgatgaggggaagggacgaagggtggttgcggcgtcacgctttgataggcagggcaagccgacgactcgaaggagaaggagagacggagggtggttgcagcatcacgcgctaatagcccagggccccgctgggttacccgagggtgaatataacctcccccaccgccgctcacccatgggtgtgaaacctgacttggcctctgcccccattagggtggggtcctagccccagcagggaaattggcaccctatgggcaattagttaatttttcttatcttttgaattagtttgtggaatgctttcaattatcacacaatgttctaaaatcaccattttatgttaaatggaattataggaaattttcaaccaataatatacttactctgaatttaactaataaaatttatgctcaagtcatgtttatagtcatgtctgtgtgcgcggatgcacgctgcgtcccttctagttacggtaagatcagatcagtcttcgatacaatatatagacaagtaagcacagggttccgaactataattattagctattggactagtctcaaatagagtaaacaatacagtaatgggttgggggagaatggaagcaaagtacggtcacatggcgctaaccatgtgacacatgggaatgggagacccgtacttttagttcgggtaaacttttacttgtcatttctgttatgaaaaaagatgtacaatggagacacgaatttttacgtgaaaaacccttgcgggaaaaaatcacgggcgccgaccggcaatgatcactatagaggagttgattacaaacgtaggatagacatggagtcctactagaaaattaatctgaatatattatgggtccaaaatttggatcacatatttaacaatttctttatctttttatggcttgcagcttgttgtttggtcgatagactttactctccgtcccaaaatatagtaaccttgtactgtatgtaacacatcctaatataacgaatctagacaggatcttcagaaccaaacccggtactaacaatgtttccccactagttcaaaaatgattttcctaggcaagcaatctaataggttgcagatgggccataagtgtccgcgtatgcaaaaatcggccctcattttcgaatacgactccataatagacccgcacgaaaaaaatcaatgtttccaaatggcccacttaaaacatccgcatgcaaaaataagggtattttcgcaagtgggtctcttaactcacccacacgcgaaaatattcgtccaccccattttttattctaccctctccctatctctgtctctcccacctcacacttcatctcctggcttcactcctctcctctctctcccggccacattcctctcctcttctcccacttggcggcgacaacggcggcggcggttggcgtaggcagcggtgacggaaggggtgggcgacgcctagcgccggcctactgcatgctctcccgtgcatggcgagcccctccagcggtggaggcgcgggatccggcgggcggcggccgtcgccgcacggatccggcggccggctgcttccccccacggcctcaccctcgacggtagtgtgcgtggccactcccctccctctccatctatctcccctcccctccccttccttccctccctgcgtggtcggagggggagcgccggcagagcgcggatgaggcggcacgacctctcccctccctttcctcttgcttccctcctagatccgatggaggggatgggcatcgacagtggtgtggccagaggggaggctggcgtcggcggcgatggggaggcatgggggcggtgggtccggcgacgccctccgcgcgtgcctccgccgacgccctctacccgcgccgcccgtcgacaccctccgccggaaggaaggaaggaaggaagcggaggggagggagccagagggaaacacgagagacagagttgagggaatgagtggtggggagaggataagatggaagaggagaagataagataggaattagttttttttatgtaggcatgattttttgtatgcggaccacataaggttccgcctgcaaaaatcatattttttttaggcggaccacttaagagatccgcctgngaaatannnnnnnnnnnnnnnnnnnnnnnnnnnnnnnnnnnnnnnttcntaagtggtccgcctagaaaaattgattttcgtaggaggatgatgaaaatccaccttggtttacattttcataagcggatattgttagatttaattgggtaattgatccatttaaatcaattaaatcaaataaattccaaggctcattaagctaggaatttatatgtattcattctcttatgggatatcaatgggatgaagagttttgaaaattaatccatttaatcagtgaattggtaacttatatcaatcactcctaattgatgaatggttgatggttgtgtggtgaaggatggttcatggctagttgctagttgatgacaattagctgctctattcctcttcctattccgttggtaacctacatcaattactcataattgatggttggttgatgattgtgtagtggaggatggttgatgggtaattgatgagaattagttactctattcctcttcctattccataactcttactcttcatcttccattcctcctataaaatgagaacggatttgatctctctaaggagaagtgagacacactttcatccatttccaaggctattgctgctacggtaatcccatcccgacgagtgtgtgcacatgctttgggagaataggccttcgaaaccatgcactgctacgacgtttgcatggacgggtgggcgattaggttttcggggagcacaaggcgcaactactcactgttcgtcaacgtctacttcgtcttcaccaacatgtcgaacactggagacaacggcaacactagagacaaggagaaggaggcttctgtcaacaccaacggtgacaatactatctcaaactccagcggagaaccattcttggggtataaccttcttacattatttcaattagaagttttacggttaatattcatcgcaatgtaaacattgcgttattatgtgattgttgatgcttattctacattaagcatgctcatgttgattacatgctactatcactggatcaaatcccattgtaaataacatgtttattatcttgttattttggagtaaaatatgccgaattatgatcaaatttccaacagatatttggctccaagggtcatacccgcctgcggaaaaagagacccaacgtcggcaaaaatgcctttttaagtagtgcttgcttcgtaatttctataaaaatcctgcaaaatagtgtctatgttttaaaaggagtaaattgcacccacggttcaacaacttggcaggtgggtgcaatttgatataataacttgaaaaatgaggattctagtgcaacaacttagtaagaaggtgtaatttagtataggaatttataagtgatcgtataaatacaacaacttgcaaggtaggtacgattttgatacaataaaataaattaagaagtgtgacaacttaattatttggagtattttttatataaattcaaatttttaagtacttattttgacaatatactagcgtggatttgtataagcatatttatatttttatcctaataactaataactctaataactaataactaaaagtcaattaaattggatgtagaaattattatatttcggttgatatttgagaaggtaaagaaacaaaaaattcttaaaggtaactgaatgtaaattgtatgtgcaatataattcttaaagattaaattcaatattataaggtaacatccgtaggattactatgtattggcatattgacatcgtgaaaaacctcacctagcatatgtttagccaaattgattcaccaaaatactaaattgtcaagtacttgtactagaacgcacccacttgtcaagttgttgcagtcagacgtttaattctcaagttctttcactatatcgcacccacataccgagttgttgtaccgtgggtgcaatttatagattctctaaccacaatccctccgatctaataattcatccactatttagagagtcatcattctcttcggattcacccgtattgaaaaagaacatcaggccggttaggtgcatgatgcagcgcattatcttcttaatacgacgatatacatattcattgacgggagtaataaggacgttactttacaggtcaagtcaagtaaagcatgaacgttatcgaatcctgatttgcttctgactcatgtgttgtcaccgagccgacgtcagcaaaccgcgtattcagatggaatgcacgcgtcttccagaatctgttcttcaggaatctccgtatttaagttcagaacacatggcgatgttgtgcttgaagcagaactagctagctcgatcttgcacttgtctccgacttccttctcgtttttgtttcattccatagctgaagcaaaatggtatgtgttgttcttgaatatttgttgctgcactcggttgtctttctggttcaaatcaacattttttttggtgatgtatatatacttggtagggtgacaagaaacaagtgaagctaaaggttcggggtgcaagcgagactgaggtcaagaatgtacttcgtcaagaattcaaaggtttaattaccatcttgtattttctgttgtcgaaaaggaacgagcaaaactcagaggtgtagagaggatcagctaaaatttcagtgacatacaaggaatttcctttactaatacctgtgttgttcatccttctttctatgttttttagaatctatcgagtatagaaactacagcaaaaatccagagagcagcagtttgaaggtggaggtgcgagggactgtggatgtggggaagctgtacgaacgcctcaagaagatggcatccagtgtcaagattgaatcggttattccggtatgcatgtactatttgcatcttaattgatcttgtgcaagattgacgggtacatcaattcgttaatatatcttttgggttattgtttgaatctttcatgcatccaggatgatgtaaaggaagaaatagagagatacaagaaagaccttgaaagaatgaagagacagaaggaagatctagacataaaactaagggaaaaaagggaagaaaaaaaggttctccaggccgacaaaacagctgccgaggaagagcagaaaagattgaagagagacaaagaaaatctcaatttaaaggtagacacaaagaggaaagagaacaggcgtctcgaggaggagaacaagaaattgcagcgaaaaattaaggatctcgagcaaaagcacaaggtattaagctaaatccatgctatgatgctatactgcagggtacagaaatttcggaatatccccccatctccccccgggcaagcaaatgtctcatccgaaattttcatttaatttctttcaaaagcaatcaaaatttggtaaaattccaaataatttattgcagaaaaacaacgaagttcctggaattttggtttttacgaaattgcaaaccctcatgctacagacagatgttgtacattttgcctcagtccatccaagcctgcattcgtgctgctgattttcctcttcttttttggtctgcagggagggacatcaattgagtatcacggcgtggaggtgcatcagaagatgaatcatatgcatcaggaggtacacatgcatgaagtcgttcgcaagcttaagatatcggacaacgatcatggaaacgctaatgggagggggcatggacaactcctgcagcagcttggccacggaagaaattgatccgcttataaatattaccaaagctagatatatgtgtgtgctttgtgggtgccaacctattttggtgtatggtttatttgcttgtgtttctcggttgtgagttttttctcttccataacatgtctaataataaaacaataacaagaaagctgcattattaggaaccgttttgttctactgaatgtctgagctgagcctgaaattgtaatgatgtgaaaagggcaatgtaatgtaatggattgatacgtcaaacgttttctcatgttcggctctctcgggtaggattattagacggcatccttaaggtagtgtttggttctgagactaggtgggatgggatgaaaccatccatgattttgaggttgggatgattccacttgcgtgtttggtttatagaataggacgatcccagttttttgtttggttgaagggacgagggagggatgggatggacgccgtttgccaccactgacgacgccgtttgcaacaaccatggccgccgctgcctctgccctcacctctatctccgccaccgagctgcggtcgcgaagggacgcgatgcggcgggtgatggcgtcgaccttcgcgcggagcagccatggctcggcgacgatgatggcggcgaggtccgcacgggagagggagagggacaggctagcgacggacgacgacgacgacgacgccgagagcttcggggacgacgacggacggccgggccgccgccggatccgtcggcgcagccctccccatcgtcggatccgccgccgccgccttccccgccacaggatccagtgccgccgagcccctcgacgccgccacttccgagcttgtcgccaccgtcgcccgagccgtcttccgtcagcgcagccctccccatcgtcggatccgccgccctggagccttccaccgtcgctcgagccatcttccgccacccgagccctccccattgtcagatccggcgccgccgccttccccaccacaagatccggcgccgccgagcccccggacgccgccgctgccgagcctgtcgcctaccgccgccgtggagtctgccgttgtcgcccgagcctgtcgccaccgccgctgccgagcctgtcgccgccgccgtcgatgagctcgccgccgtctcctgagggcgagcagggtgagcgcgcgagcagcgtcatcacgccgttcgctcgtcccaggtgggacgagtttgtccgccagttttggccggatgagttggtcccggatctgagaggaatattcctttctagggaccaacccatgccactcacccctaaaccaaacacccctgaaagtgggttcatcccatcccatcccacctcatcccaccaaccaaacactacctaagagtctccaagacaagtcaaactagcttcaattatcaacccaaccttgcatttctgggccaagcagatctatttggcctttattttatcagaaagtgtcttaattaattacatcatccttacaaatatgatggtattctcattgctggcagcccgttggagccattggaatactggatgttccatctctcgctctaactacactattcagcacgtggactgaacgaaccaagcatgtgacgctactcaaaagaaagcatttttgcatacaactaaaacctattttttcatgcggtaagactgtccgtctgcccgaagatgtttgtaaaaatcaatacttttcctacggttggtgcacccgcacgcaaaaattaatttcacaaaaaagtgaaaatccaaaaaatcacatccgccgtctccattgccgaagctgagcacagctcatcatcgttgtcgtcaaagcccgacagctcctcattgtcatctgtgtttctgagtccccttcccggggaactccccgccgccgaatccacctctgtcgcacctcccaaccgccaccgccctccccattaccagatcagctgccactgaggtccccaccgccgacgtccctcccaattgccgccgccctccccgttgacagatctactgcctctgtgctccctaccgccatatccaccgctgccgagctacttgcggctccta

SEQ ID NO: 8942 - DNA, 25804 bp, Oryza sativa
  unsure (1)..(25804): unsure at all n locations
ccaaacaggagtagggtattacctctcattgagagggcctgaacctgtctaaatcctttgtctccacatccatccacttttaggtctcgtgcgctaccccgttttattattgccgaaatcatgtttcgacatgcggtgtgaatccccgaataatatgatccaagtgatataccgactgcttggcaaaatatgatgcgtacaacctaaagttgacaacatctttgaaagttcacatagcaaaacaactataaagaagcttgaatgctgtgaataaagaaatttccaaacaattacaagcagagttgcttaagttaaatcttgacgctattaattatggagaattaaatactttggagttgaaacctacacatatggatcagataagagagcatcaaaaagatgacccagaaatacagatttttaaggaacggaaggtgcgaggaaaggctgcagatattaccgaagacctagaaggaatattatggtacggaaatagaattgtcgtaccacaatcaggaaatctaagagaggtaatactaaaagaagcacatgactcagcctactctttacacccaagcaatacaaagatgtatcatgatttaaaagatctatactggtggccaaacatgaaacaacatattgcagaatatgttgcattatgccatgtctgccaacaagttaaagcagaataccaaaagcctacaggattattacagcctttacaaatacctgaatggaaatgggatgaaacagaaatggattttatcactggactacccaaaacttcttctcgatatgactctatatgggtaatcattgatagacttacaaagactgcatgattcattcctgtgaaaacaacttacactggagcacaacttgcagaactttatatgacaaggatagtatgtttacatggagtaccaaaaagaattatccccgatcgtggtacccaatttacttcacacttttggtagaaattgcattatgaattgggaagttatttggattttagtacagcatttcatccacaaaccagaggacaaacggaaagactaaaccagacattagaagatatgttaagagcctgtgctctagattttgctgctagttgggacaaatgtttaccttacgcagaattctcatataacaatagttatcaagccagtttaatgtcaccacatgaagccttatatggaagaaaatgtcgaataccattgatatggacagaaaccggagaaagaagtatattcggaacggaccttttaaaagaagctgaagaaaaagttcgacttattaaagacagacttaaagtagctcaatctcgacaaaagagttatgcagactctagacagagagagttaacttttgacattggagattatgtatacccaaaggtttcatctttactagggataaagagatttaaggtaaaaagataaactagcccctcgatatattgaaccctatcaaataattgctaaacatggagaagtagcctatcaattggctttatctggctacttatcagacgtataccctacatttcatgtctcgcaatcaaagaaatgttgacgcattccagaagaagaaatatcagtaagtactgttgaactgaataaagatttaacttatccagaatatcctatcaactgaataaagatttaacttatccagaatatcctatcagaattttagatgaagtacatagaacaactcgtactaaggcaataagaatgtttaaagttcaatggaatcatcatacagaggatgaagcaacttgggaacgggaatattatttacaattggaattcccgtatctattcgaagactcctaagcaaatctcgggacgagatttctttaaggagggtaggtttgtaacatccttaaattttaaactaatatttgactgcatcatgctggttttaatcttagactagcaaaatcaaaattttctttaaaagttctctttttattcttgattttggttcaagtattacccctagaattcccttaacctagtttaccaataaaccataaattgttgccctatcttaaaccttagtgaatttagcaaatttccttcaaattccaaaacttagaaactttctctagattacccttctattagtgagacattgttatagtgcataatatttgcaaaactcttccaaagatctctagataaattcaaaatattcaaaattcctaaatagttcttttgggccgaaatccttttctctcccttccagcccttctctctgtcttggcccaaatcagcccacagtcaaaccgcgtcgtcttcctcctcctctcctgggcgccgctggattgagcgccaacgcccacagccaacgccgtgccgtgtccatctaccgccgcccacaactctctgccgccgccgtcgtcttgccttagacgctaagaaatcgccgcccaacgtcagcgccacctcatgccactgacgtcagccgccgaaccgaaccgacatgcccagccaatcaccgaacgaagccggcgccgctttcttccgctccactccaccggcgccgtgtttcccttctccctctcctttgcaaaccgacctcctccgcctataaatagccgacgagatcatccttccctcccccacatcactacatcagagcttgaagctctcttctctctctctacttgccatgtccggccatggctgccaccactcgatctctcttatcggagcattgccggccaagccctcgcgccaatatatttgcctcgacgaggagaacccatttcacccctttcccccaacccttccaccttgagttaagccaccaccgccagctcccaaatcggccgaaccaagcacttgccgccggcgttccggtctcctccctctccctctccgccagccaccgccctccataggtgcgtggcgctcgggaacaccacccaccgacggcgtcgtcgccttccgcccgccggagagccagcgcccctcctctccttctcctctgttgctcggctggaaagagaagaaaagaagagaggaagaagaagatgagaggagagagaaaaagaaaagaaaaagaaaggaagattgacaggtgggcccttcaacagtaaattttcgtaattttcctatttaatgtgaattccaaaatttagaagcccatatcttttaaaatataaacccaattccagtgaaacttggaccaaaattcttctaaaatctttctctattttttgaggctatttttgctattttatcattttatttcattttttcctatttttggattttattcgaatttcttttgaatttgaattttacaagcttaaccctaggtcttgaggagtctcctaacctattagataatctcaatcaatctcaggacatcgagcaaggcaagttactatctaccttttgatcatttaagcctatattttacaaattatttatttatagccttctattcaacactctattttataggcataattcaaccatagaacccagataatttagtattgcttatcttgcttacaatttggttaaaatattttatacttagattgggacagtacgtaagaattggatgatttccgggtggctagtactgtctcgatcgatatagttattaccaggtagttatgtcaaacgaacgggtacgactgcagtttctagaatggggacagacctagttattatgttaattagcaatatggcacctctgtatagtggttcttatttttaagtcctcgcgtatgaggcaactatagccgtgaagggcaacttttaaccattaccatgtacaagtaaatggttcgtgatactcgagtataaattatatggtatattctaaaccctgatcgagatgacgtggtgtcatccagaactccttttgctgcaattaacattacgttcagagcatatgaggatataagttcatggaacaggtgccacaattgttaataacctaatactgggccatgactaaagctgatgattatcagcaagtcgtggactgcgggtaaagcgtacatctgctgcagtagaatatcattaaaactattcaaatagccgtgcacacggaattgagtatcgggactcatatggtaccctggttagaaacctaaagtatatgttttacaaactcttgctttaatatttctagattgtctattattgctttctgcaaagaactccactccatgccaacgcataacatatttccatggtaacttgctgagtattccgaatactcacccttgctcttattaaccctttttcatatttgggtcaagaggaggacccctgtgattattattatgatgactgataacttagaaaatccctagaggttataccttcctagtcagaatgtactagaacttccgctgtgtaatattagcacatatgtttaattaggtaagtacctacccttgtaaaacccctagtattgtaaactttaacgtatgcaatgaagaaccagctgtattacatgtatcaatatttattgatccagggattgatacattaatcaaagtcggatccaagttattagttttgggacccgacaagagccgttcagagtcgccggttccgttcgccggtttcggttgttcattcgagtgttcccgtgtcacataaaattgactcgttgggtcagtatctcgtgaggcccgctcacccgtcaggtctcctgcaggggcgagggcggctcaggttattcacccggtggccaatgcgaggccgggagcgaggggaaaatgcgggggcgttcctgcccaacccggtccagccccgccccgctgccacccctaattgccattgggaacatgtaccatgttcataccattacttgcctggtatcccacatgtacattaattaaaatataaccatcaggtttataccatggtcactatccctcgctcagctctcgatcagtggctaacctacaatctctgaatatttttcagacgtgaacagtaactgaagaactgaaacgaagaacagagtttttttggtgctgcgtaaccacctgcagcttttctgatttctcttcaatttattccctcatcttgtgaggttgttacatgcataacaaacaccgatttcaccggatccaaacgagtgaacgcgccatccgacgctccagatctagttctatcgatactaacagaaaaaacgggaaaaactcagctgcccaagactgaatcttcctgggacagccgttacaatgcatgcagcatcctatgcctaagaattcaaacttactaactgaaatcaaacaaattattgcaaatgcacaagattatcttcaggctaacacgctaacggtatataaatagggacacataatatgtcattgtttatagagtcaactgattaaaaagatagatcaggttagcattgagtgtgagctataagcctgttgggctaatgaaatgtaaagcacatgcatagacgctaattaaatgtaaagcgtatgcagaaacacaaccggccactaagttcagatcttgtcccgtgttcttctttcagttgtatcttccaatatctcaggcttagtccgtcagtgatcaactgcaaagtgcatactcgccatcagattccaagagcattcggtacgccctgtctatttctcgtaatttatctggttttgtgtcctggatttatatggtttttttcatcaatattaattcttgctcaactaacacacgtgttagcatcagacgatgcctggatggatggttcgcacggtgttcttgctcaattcgtgggtaatccgggcgttggtagtattcagcttcgcagcgcatgtcaccatcatcttcttggccggagtccgccgtcgtagggctatcggcttgccgataaccatcctgtgggcggcgaaccagctgggccggtgggccgcgacgtacgcgctcagcaagctcgccctcggcagcacgacgcaggagctggagctggagctggtgacgctctggggggcgttcctgctgctccatgccgctggtccggacaacatcaccgcctactccttggaggacaatgttctgtcgacgcgccagaaggtagaaatgatcttgcaggtatcaggagcagcatttgccatgtacaagaatatagtcatcagaagcgggtccggtacgatggtctggatctcttctttcatgttcatcatgggcatttttaagtattgggagagggcgaaagctatgcagctcgccaacctagaaaacttgcgaagctcaatcaagaagaagaaggagacaaggagacgacgaagcttgagaaatattaggcgtccaagcagttcaaagcatgataatgacgaggaggcactgctggttgctcatggcctgctcgacatcaccaaaggcgccttcgtcgattcttcaatcaacgagcatcaaatccctgtctatgctggcaggagacgagagatatttcctaagagtggctgggggatgatgtacaaggtggtcgacatggagctctccctcatgtacgacattctctacaccaaggcggccatggtgcacacatggcatggctacgccatgcgtgccgcctctccgttcgccacatccatggccttcatgttgttttggtttgacagcaagcaaggtcagcggatgaccgatgttttgataacctatttcttgctgggaggtacagtcctcctagacatcatatggcttctcagagcagtggcatcaacatggacctattcgttcctcaatgataggccacacctgtgggttcatcacgcgtttttgtgctctgggaagtggcgccagctccatcgttccattgtctccctggatccgtcgttgatcctcgccaaggaaccaagtagctacaggaagtggtctggaaaaattggacagtataacttgttacacaagtacactcatgacaaggacgaaaggaccagagattacttgagctatgtggtagagaaagtagcatcggaagacatctcgatggagtacgaataccacaacttgaggggtattcatatttctgtggatttcaagaagaacttgttggattgtatttgggactatatgtatttagcatacccagttgaagacgtggaggagaagaagaaggagaaggaggagaagaagaagaagaagaagaagggaacggcggagaagaagccagatccgccgatgaagccggctgagcaccacaatattgagaacattcggaaattggaagaagctctggattttcttcctgaatttcaggagtccattcttatcatgcacatcactacgaatgtcgtcttcatgtacactgaatctgaacaaaatgcagaatcgtccaagtccaaagacaatgtggaggtgaatcaaggcattgtcggattacatgatattccttatcgcggtgcgacccaccatactacctggtctcaagctgcgcagcctgtatgaagctaccgaggatgctcttgccaaaatatggtctaagaaagaatcttcccgctgcagctccagatcaagacaaaagtgtcttgctgacatcctgcgatgcatggagaacaaaaggagagagaaaaggccggataaatccgacaactggaggctaggctacaggacccggaactggcaaccagactatacaaccgacctttacagcattagtattgttctgtccgatgggattaaactagctgatcatttgctgcaatggctgcatcgtaattactgggttaaatttcccaaatctgaatactcgtacgaggcaaaatttgcacagatgtttccgaaattgagaaaaatcctgaacgggcgctcgatgtacgactaccccgataaatggtcgcgactgctggaacacatcttcttagagtgggtgcgtctgctgattaacgcgtccgtcaagtgtacaagagattctcacgccaagcagctgagccgtggtggtgagctcacgaccgtcgtttggatcctagttgaacacgcgggcgtatttcgcgtcgaccgtcaaaagagatgaaactgtttgatgctacaattcctactgaatcgaggggttcatatataagttgagatgtctgtcttctcttgtcctctgtacctgtaaaactcaaactcaatttgtagatcacagggttctcaattatatattacctgtacaatctttttctcatcgatatgataaatctaccatgggtccaaaatattcaaaaatatagcctttacttgtttctgatttaaaaaatcccaaaattcaaacggaaggctataagtttaccaacaaagatgtcaggaaaattttaaacacaaactataattgtacactagaagcttcagcaatttatgcagacactactaaaaaaacgtgtttgggtgccggttggcaaccanccatatgtgctggatttcccaaccagcacccaacaaacggcaccttcgagtctcctcaaaggtgatggtttaaaaaccaacacatttaaggttcccggaatgaaaaaataaacggctcaatgcactggctcaaatcgagccgatgcaccaagtgctccaccctgcttcgcccccgaaatcgcaccccccccaaaaaaaataaaaaataaaaaatcaatcatcaacaacacaacacacaacatcatctaaaaacgaagacacaacaacatcatctaaaaagcaagcccctgccgctgcctcggctggatctgttcgcgggagccaccgccagatccgccgcgggagaagcttgggacggagggggaggagagggggtagaggatcactggatctgcccagcggaaacgccactgccttcacctccgccggatccggccacgggagcaccgatgccgccgccgctgtcgctggataagcttggtggcaaagggatgggagagggagtagaggaccgccggatccacccgtcgaaaatgccattgttgcgtcctccaccggatccgcccatgtgagccgccgacgccaccgccaccaccggatcggctgcgggaggagcttgggggcggagggggactgggagggggtagaggacagccagatccggacagtgggagccgtcgacgccatcgcttccatcagatgtaccgccggtgagggatgtgagagggaaaggaggcggggaccagagagagagaggaggggatggcgggtgggggacagtgacagagataaaaagaggcgcgggtatatgggtggatataaggataaggactgggaccgattggctcgtctcggatttttggtgttggattattaaaatccagtataatatattataggtgtcggttgttttaaaaaaaatggcactatagtatttatgtcggtcctttttttttcaccctgcaggaatagaaaaagtctataggtgccagttttagatattccggtatttatagtgatgtatatactttatgtgtttatgtagtagtgagacttaggggtcaaaatttaccaaccgggactaaagatggatctcaaccgggactaaagatgggcatctttagtcccggattgctactcccggttggaaacccgggactaaagggggttcccaaccgggagtaaaaaaggtttctccaccagtggtagtgtgaaactggaatactgaaacaattgaaacttcaggatataactgcggtttcgtactatagtctatatatgattaagaatcaatccatatgttaggatacacgtgtgtgtatatatatatatatatatatacatatatatatatatatacatatatatatacatatatatatacatatatatacatatatatacatatatatatatatatatacatatatatataaaatatttgaaattgcaaaaatatggaataacttatgataatttctgtgaaaaatgctaccgcatggaccacttgttaccaattgacatgttggctgtcacttgtcatgaaaaaatatagtctgactaccaaagaaacatggtggacttggtaacaatgttatgagaaccactttatctatttatatgtcaagtgtgtttttatggatgtgatagcaatgttgaggatatgtgtgctagccactgatcatgggcctgtacgtacagtgtacactccacgtatttggcaattctatcccgggtgccgaaaaaattagtactttgataaatgtaagaatcataattatttatgtattatgtttacattattgttcctaattcttaaaatcacaacccacgatgaattcggctagctgggttcgtgattctcagtccaaatcatcgacccagggtcatcgacctgcatgacatggagtcatgtccctcgaccgatactttcgaactgggatcatcgtcccagctttatcaggatcgtggtccataacggtcgattggcgtcccgaggaggtatactcccgtcgtaccacacttttccaagtgtcgctcctcgtccgtcgaccctgttcctcgacccagtcgacccatatttttggtgactatgccttgaccacagttgtcgtggtcgcgtgcggtcgaggtctcacgtggactgccacgcttcgtctggatctgtgccgccgtcgccttgatccggtgtcagaacgagcccccaccatcgccttccagctcgtcgtcatcgctgagccttgccgagccctgccttgcctcacctcgatctacccatgtgtcaccgcctggattcgccgctaagccccaccgagccttgcctagatctgccgtcgagccctgcctcagacccacgccgccaagcccgtgtgctgccgagcctcacacctcagatccgcacgcccgagcgccgcccctgggtgtgtcgtcgccccaagcttgagagcgacagagatcgagagggtgtgagggagaagaggagggaggagagatctagagagaaaggaaatgtagctaagggagaggtaggtggctgtttttttatagggcctttagtttattttttatggcggccagttaagagaaccgcttggaaaaatctatttttataattataaaaataaaaattggcttataagcttataagcggtgctcttatctggccacaggaaaaaaagttatttttacaagcggtcgtcttaaaaaaaccattcgtaaaaatatagttttgcaagcggttattacctagggacctccaattgcatcttcacaaactttcttattttcttaggcgaaataaaaatggtgactccatgaaaatatttttttaagtaatgtaacttctcaacgatccaaaaattaatctctacttatactttttttttcatttcgatatagaatgatgcctatattggctgacaaatttcttccaaaattacacattctacataagccaagtctttggcggctgtcagaaatactatacctaccttgcaacctactccatgcgtctgcttgtgatccccaagatctagactgctcacagtgcacagatgcctgtcaactttacaaagattccgacatcccacaaatctgtccaatgagctgactcctttaacgatgacaaattaaggataatgatgatttggcaacaagtgtgccacagatatgctaatgatatccacacattgtccctgttgcgtttctttagagtcgaactaattaaacgccgaaagttattccatatttttttcaatgaaaaatgtattatataatttgtcctaacataaagattatttaattagcctaaggatgccaactagaaggcctagaaactcagttattttagtccccatgtttcatactactaaataaagaaaattgaccttggtttttctttagtgtcgtggtgtgtttgtgcttatgttgactaaggatcatgctaagaaaagagtcaaacacatggcaaatgggcactgatatgatattttcataagttgatatgtattagtaccgaaatgacaagaaaatatttaaaaagtggatatagaaaaggagaagaaaatccattcttcagttcacaagaagatttgtaatcctcattctactgttcatgtcgaactatccatcgcatcacgcatgcgactgatgatacaagcagctgggtcagcttatccgctccaggtggggaattgccggctagccaagtgagaccgtgggggcaatgggccgaaggcccatctagaccagcaaggcagggagggctccgaggttctctcgtgcagtgcgtgtctgccccagcgagtatgtagaatatacgaaaccgatacgatgacggtgttgtacaaaaatttgagataaaaacacctaaaacttttataatagtggagataaaggaataggttaaattgccggtccacacgtaaactgagtgtagagaataattgagaaccctgcaaattagttaattactccctccgttttcatattataagatattttgactttggttaaaatcgaactacttcaaatttaactaaggttatagacaaatatagtaatatttatataaccaaattagttttattaaattaataactaaatatatttttataataaatttatcttggtttaaaaatattactattttttctatgaacttggtaaaatttgaagcaatttgactttaactaaagttaaaacatcatataacctgaaacgaagggagtagtagctacaagtcgatcgagttacacaagtacacacaggagaaatgaaaaaaaaaagttctaactaaaggagatcaaatgaacacatcaatcagagacgctatggatatctgtcagtagcgagacacatgaatgcctagtctatcgtagctatctgctggtttcctcttcgtcgtctttttcacacgaagaatgcgagcgtgttcagcgaggatccacacaacggtagtgagctcaccaccacgagcaagctgcttggcatgggaattcctcgtacatctgatggacacgttaatcaagagacgcacccactctctgaagatgatgtccctcacttccttgggcatttgatactctaattcagtctcagtcgcctcaccggatttcatcaaatccggaaactgccgcttaagtttgtcttcgagtactttgttgtctccaatttcgatcttagaaccaggtttccaatttagcagaagattggctagtctagctccgtcagatagaatataactcgagtcgtaaagaacacttagataggcacctggtgacagtatctcagttttgttcccttgatgccacttgaatgttctcatgggtgtctttccattcttcttcatctccttatcaagcagacttttggcaagacacttctctctcgccatggagttgttgaaggaggaagaattttttatctccttccattgttcacccaaagcatcaaggagagcatcgtaccggctactgagtgcgaggcccgggagcatggtcggtcgcaccgcgacgaggaacatcatgtaatccgacaacgccttgatcgccttcccccactccgattgatcttgattttgaccggattccgtgtgaaagaggaagatgtccgtggcgacgtgcaggacaagaatggtctcttgtaaatcaggagtgaaatccagggcatcgtttagttcctgatcaataccaatagtagctttcgcagcagcctccgcagcaaccgtcgcagaaggaaacggatcctccacatgtatccattttggatccgataactgcacaggcggtatccgttcaggaaacgctaactccatgtttttccaaacacggtcaaacagcttgttcctgaaatctcttgaaatatgaatgcctctcgagttgtggtattcgtactccatccatgcttcttccggtgcattcttcttccaccaagagctccagaagttgctggtcttctcgtcctcctcccgagtgcactccctcaacaagttatactgcccaatggttcctaaccacatcctgtacctagttggtttcttattattggcaaggaaccgaaatagattcaaagagaggatgaatcgacggagcatgcgccatttccctgagcacagaagtgcatgatgaagccacgatcgtggcctatcattcaggtaagaataggtccatgtggacaccactgctcggaggagccatttgatatccaagatgacggcgccacctagcaagacgtaggtgattacaacgtctgccgtcgcctggccttgcttgctgtggaaccaaaacagcaggaatgcagttgctccgaggaatggagaggcgaaacggatggcgtagccaccccaagtttgtaccatgactttcttggtgtagaggatgtcgtacatgagggagagctccatgctgacaaccttgtacagtgtctcatcccaggtaccagagagtgcctcttgctcgtcatcactccttttgtccaaaaaatccatgaaggcattcttggtaatatatagcatatcatgagcaatgagcaggatctgctcatcatccggcttcctgcctccccggctagtattttggaggctgctgctgctgcttcgtcttctcatgttctccttcttcttctcctcctcctttcttgagcttctcatgttctccaggtttccgcgctgcagcgcgtagtatgccccctcgaaatacttggcgatagccatgaggcagacaaaggaggaaatccagagcatggagtcgccaggcatggcgaacatattcaggtacaggatataggcaggcgacacgggtccaaactgttatgaacgacgtatagaaatatgaagtaaacgaaaaacaatcacagcggagacacacgatttaacgtggaaaacccctttaatgcgaaaggggaaaaaaccacgagcaccagccagcaacaatctcactatctcaagagttttgggttacacgcctatggcggcttacaagagaatcaagtctccacgaaaccctagctccggcccaagcctccggcttaggcctccgctccgcttcgtcagaagcccggccaatatcttgaagtgaatttagaacaactccaacacaaacacctgagcaatcacatctaccttctgtcgcagcgagaggacgctgtcttccaaggcgtaggcggcgatgttgtccggcctggcagcatgcagcagcatgaacgccgcccagagcgtcgcctgctgtctctcctggaccgtgctgccgatggttattatgcccagcgcggcggtcggggcccaacgggcaccctcgtttgccacccacaggaggaatgtcgccccaccggtcgcttggcggcggcgaactccggcgaacaagacgaggacgacatgagcaatgaagctgagggctaccactccccggatcgaaaaaagaaagtctctgatgaacatcatggtacccatccatccaggcatcgcccctgctaatgcatgtggttaggacgtaatttataaacaaactagacgtacgtcaaacaatcaaccaagagacgtacgtaccggccatgcgctcgttgaatctgatggcgttacagttaatttgccactgatggactacgcctgactggatagtatatatcactatatatcaagctggttcgaatctacaagggctagaacaacagcaaacaagatgtgcactggtgccttgggtgtacgtgtttaacaatgcttgtagcaatccaggtatacttatagggatctgggcatttcattagtatctcgatctgttattgcacgcttacatttcattagccaaaagtgctacttaatatgctacagtgcatgctagcattatgatcaaaccatttttcatacatctgcgctattctaagcaagggtgtactagcgcccggtttagttcccaaaaatttttgttttgggtgtcacatcggatatacggacacacatttaaagtattaaacgttgtctagtaacatgagcatcaccaccatattagagaatatatgggatcccagttgcttctgccacatttgtattaatttgctaaaactcctcttttccacaacctccaagtgaatatagttagtagttaactactctctccatcccatatataatcacttttggattttgacacggttttcgagatactactttgacttaaaagtaatatgttttaaatagaaagaactgcatattaattatgatagtttgtttaatgataaatccagtaacatcaattttacttaattgatctttttttatatttttgttattaatagtcaaagttacaaatatttgattgggcactatgctaaaaatgattatattttaggacagagggaataatttcctggaatgatgttctcttctcagaatcatagagaaggaatgtttgttcttcatttcattttatcaaacaacatttcaaattacagcatcttaatttacaccgggttttaatattactgcagaaattaaaaacattttctgcgtgcataatgccataatgacggaaatagaactacttaagtttcggacatactccctccgatccatccaaaaaaactcaacttctaaagtttaaattttattttaaaaaaccaaattctaacatcctacctaccctcagcatataaaacgagaagttttatctcttaaattccctttacctacctattaccattgctacttttttcaataataagagatattttgcttatttttactcttcactattttctccttgggatgtgctaggaatagacttttttttggacggcgagagtattctaagaacataaacatttttttctgaactgaaaaaaaaattgctgcaaaaaatatattctgccaggtgggccgacagataactaatatttcaatccagcatttaaaatctgatcgacgtcctaacgaactaattttaggctgttcttcccctctttttctaactcatctgcctcgtttttcgcgcgcacgcttttgaaacttctaaatgatgagtttttttttaaaagtttatatacgaaacttactttaaaaaaatcatattgatccagttttgaaaaaaaaagctaatacttaactaatcacacgctaataaactactttattttccgtgttaagaatatgggttgccaatccaggctgccgaacacatattgcctgttgataaataattggtgttcatctaattcggtaaagcatcgacctccttaattaattatcaacagcttcgactccacatattgcaagagtggcgaggtagttaataatacacctgccggtagggatgaaacggtcggaaattgtcagaaacggtatattattttattatttttttgaaaacaaacgaaaacggtcagaaaattttgatatttatgaatttatctatttaatgtcaacttcaatgtcacactgacataaattaaaaaaaataaattttaaaaacggtaaccatcggtaaaaatattattattatactagttctgtggaaatcataccgttttcacctctaagtgccggtatgccccgcacacgttaactgcctcgccggcttatacatcctcgggtgtgagtgatttccctgtctccacgttaataatacaaggctcaattctccacggatgcatgcatctagtatggttctacacaggccggtagaccatagtagttgactatatatatagtagtagctgctagcttatgttgtttgtttttatatccagctcccgatctaatttttttctccttttcttattcatttgatttcttgcatatgtgccatcacatatatttgagtgtcagctacatgactcactcttagctcctaagagcaatgtcaatagtgtcacccgctaatggctgtaaaaatgactacatcagtctcttatagatattactaaaagctaatatatataataagtagatttacattgactattatttatttttttaatctttagctagcttccccatctaattttttaattttattgccgttgtttcgtccaaccattactgaatcgtgtcagctcgcgtggacccacaatcgcatgtcccaatcaaagctagcctggtgttgctacacttgcgttgggacgtgtgagtagccggtgataatttagtcgcagactcacgctctctctcctgtctagctcattgacaaatccgatgtggcagttttattgctggctaaacaggtttattatactttctctaatgcatataatcgtaggttgcccatggtacatgtaggtactaggtctaattaatatctaacaacacaaattctaattaatacctaacaataccgataccgatggatactagcatatctatatgtaccaggcgtgacacatatgggtatatccgatactcagctaccaagtctgaaactgatatatactgtaatggtacctacgataccaaacataattcatatgggtattatatttgaaacacgtgggtatcatgtttgatacctatatatactatatatgatatctatcagtatcagacatggtatatataggtatcaagtataatacttaccaaccttgatacaataatactataagataataggtctgactaagtatcaagtatgatacaagataatattagagacgataatatgggtatctggtccaatatcttcgatgttacattattatcatctatgcaccgtatggtctctgtgctctaggaagagattttaaattaattaaactaaaaatagtaaatagaacaaacaagtgtttcccttgttttgtgcacccgacagaatttatttgtagcaattgagctcatatatagctcactagctcaatggacacaagccaaaaggcccagagttataaaatccatctattaatctaatgaactaactaaaaaattcacactcacagtctaaaattttctcagattaatcgaagaaaggaaaaaaaaagggtttgagtaggtacacaattcaaagcatctgaaattcggagtaaaaaataaaaacaagagtcaacctggaaatacacactgcaggaaaacccttcattagtcccggtttgcaacccctttcgtcccgggttgcaatccgggactaacgatgctagcgccaatgttttttttctttttttattgtttatttgctgcttgcattttgattttcccaaatcgagttgctccctacgtatccctaaatcaaagtaacaacatctcaaatcatatatttacatcacaaattctcaaaaaaaaatcacgaattctaaaagaaatacattacagatccaatgaaagacaaattctaaaaaaaaaagaaagaataacataaaaaaatctagcgctactgcctcccgccaccctccgcccacctgccacctccctcccatccgcccacctgccacctcccttcgatccgcccgccgccaccctcccctacaccagcccctgccctcccatccgcccgccacaaccctcccctccgccagccgctgccctcccctcccgccgctcatggtgcgccgccgcgcaccaccgctcgccgccgcaaaccaccacctgccgtcgccctccgcacaccatggagagggccaggaagggaaggaggggatcgaggagaggggagggccggggaaggttgcctcggagagggccgggaacgagaagaggaggagtggatcgaggatagttgtggatcgaggggacgaggagtggaggaggaggggcatgagtagataaggatgggatgtgtgcgaggcatatgtcactgcaccttttttttttcaatttttgtcccagttggtataaacaactgggactaaaagtgtgtggggccgggggggctgacacggcctaaccacgttttgaaccgggactaaaaataaacaaaaatcgggactaaagatcataaagtgttgtgccgcttttgaatcggggctaaagatcttgtttagtcctgattcttatttaaacaggactaatgtgatttttagccaacccagcaaagatagttacaatttagaaaaataaaattgtattgtggcaagaaatttttaaaaaataataataagataataaaataataaaataggtagaaattctgtggcttggattatagctgtcacatgaatccttcgtacttggacaaagtggaatgcaacaactgccatcaaatgagacatcattctcaacagtgtcctcaaggacaaggacacaaggtagtaccaggatacaatccaaggtagcaagtactaatggagcacctacgtaccgttggacacaagatcatgactaattaataaaccgtacactgggtaggtgtcacaagtaatggagcacctaccattgaacacaagagcatgactaattaataaagggacaatttaaaccatgccacacaaattttacaaaatttgtgatatgccaccctgacccacatgtcattgactcatgtgggtcttacatgtcattgagatacgggtggtatatctcaaattttgtaaatatagggtggcatggttccaacaaacccaataataaaccacactgtacactgtataggtgtcataagtaatggagcacccaccgttggacacaagcagcggatcgatcagtgtcacaacctacgccagctttcaggagatcccgactaataaaccacgggcctgtttggcacagctccagctccaactccacccctccttgagctggagctcagacaaacaatttcagctccaccaaaactaggagtggagttgggtggagctctctcaaaaaatgtactagagttgtggagctgggtttaggcagctccacaactccactccagactcaactcctggagttatatttaggagttggagttgtaccaaataggcccgtgtcattgggacagaagaaattctggaagaactactcaatgaggcataataacaaataggtaaaacttgctatagaacattcaaaaaacatgtaatttgctatggaacaccgtaagaacgtgtagctgttgtaggacatcgcaaaaactgataattagctgctggacacccgtgacattattttattatttttgaatgaataggagagagaaacaattattaaggacaagttcgccctttgctcaaatcaatccaccatgggccccacatgtaaggccctctttccagatgggacggtggggcggcgacgagcggagtagcaccggatcaagcaggtatgggacagcgggcgtagcggcggaccaatagcacgacgccacgtcgttagccgcaccgcgcgcgttcctcgcacgcaccttgacagcgagccaacccactgttcctgcgtgcgcatttgaaaccgtgtgggccccgccttctcctatgcgcgacacgtcgttgctcctcgcccgtgccatttccctcgcaccgaatgcgagcatgccacgcgtcctagcgtggagaccgcgtccgcccacgcctgcctatgggtcccgcgtgtcgtacgactcccgcgcttgcctcgtgaatctggggtcgccatgtcgccggctctgaagaagagaagagaataaaagagaggagaaagaaaggagaagcaagaagaagagtgtcatgggcaattcaggactctcaacgctctttctctctctattttcatcggaaatagtaaaatatgtcacgagtgtacaccagctaattactatatttctacagtacccacaagaaaataagcattctttagatatctcatagctaattacacattttttgagtgtcctatagcaaattttgccgaaatagttgaggaccaagttccacttgaggagcagaacctgcaccaaagacatagaagtaccaagatcgacgtacaaagacctaaaaaataaagtcagtggtacaaagctactacgtagctttcaaggatcgacaccacccctagttcttagctaggttgcccgccgtagttctcccatagcttcccttattttgaatcttcgatcgggtcaagatttcttttgagtgggtaggtttataacaccccatttttctcatgctattaaaaactatttaaataaaaccttattgtgaaagtttggatctttgtgtctgatcaaggatctaagtgccaaagatctcaaaatctctctttgagacccaaaatttctttccaaactcaaatcttgggattcaaattttgaaatttgaatttccctttgttctttccaaatctcccaaatcctgaagccatcaaatgtctccaacaaaaacatcaatttttctttgaatgcccttccttgggctcctcttgagtttatgagttcaaatgtcaaatttaatttgaattcaaattgaaagtcatgatcatcaaattctgttccaaactctcccttgaaaattcccatgtgctactgtccatatggaccacatcatcctccctctttccttctgatcctggcctgcaacctttttatcctcctcctccgcacggcccatcactctgtctctccacggcccatgtcctcgcctcctcccgcgtgctgcttgctcactcacagccaccatgcacttctttagtgtgttggccaatagaccaggcccaccctgcgcccgatagcggacgcgcggccgtcccctacctgcccaccgcccgttcgacgatgcgagtgtgtgtcggccaccgagccatgcacgaccacgtctcctcccacgcatgcaaggctccatcctaggggtagcaatgcagccacattcggcccccagaccttagggcaacacattcacatcagtggtgccggcgcattagcagccatctgtcttgccattctcccttctccgatgagctcccgttcccattccttcctccttcctctccttcccgaaaataccacaaccaaccatcactgtcccgagcctaatccccacccccaaataatcgccgctggcgaccaaaccccgccaccaccgaaccacttccccctcttgctgcctgccatcccccgtaccctcttatccaatccaaactgtccatcttcatcgtcgaccctccctcattccattatcgtgctctgtttcccctcccacgacgccgttcgctgtaaaaccgccagccgccatcggtcgtcgatacagtcctaggtcaacgcggacccagaccaccgatgcggcgtggttagccatgcgctgcctcactcactgttaacaacgaaattttgtatcagattcggagaagaaggaacaagatcgaagtggatttgatgaagaattgagttgagatcaaagttggaccgcgcattggctggcatcgttattgatggtcgttacaaaccaaattcgacggtcaatataactaaaataaaggagaattagctatgcttgcaatgcatatttgttttaaaataatatatttctatttgtacttggattctatctatctatagataaagagatacaaaatggaggagagccggcagcaaaacactcgaacaatcaatcagacgctgtcaagaattagacttgtggggaaatgggccagaaactcagaattgacatgatcaaataggcccataactcactgatttggattgaggagccaaagaggagatggcctgctgaacagggggcctgttgggccagcccatgttcagccgaaccataggcccccttagcaccgctggatgaagggttttgatctgacggtggggatttactcccaatggcagttggagggtattactaacctttccaactgccacaaccgttattcttcagctataaaagggcttcacctctaccactccttcacacactcaagcaagctcaattatctcttctacactttagtttagtattctagtgttaagtggagtagaatagaatagctcccggagtcatcggagtcttcggaggaattttggtatggttgtaatagctttccttctttcttttgtaagactttaacaattgatgaaatattcttattcatatgctctcgatacttcagttcatctaagtattgtttttactttatatctgtatcgatacaactgtatagttagcctaccagcaaggtacaatggtgtgggtttaatgttcgattattcggttgctctatgttatctcgagggatgtagagtattatttaataatgtagacgtggtgtctagattattaagtatcattatctaggcatatatggtacgggttagtcgaggtgggccgctgatggtgacagctcagtacgggtattcctccacgatagtatatattcctaagaaactttcctagggagggtactccttcgtatttagccccggttggacggccatgacaggttgtcgtaaggaactcgacaagccgcggtggtctctcgaagcactaggagggcactattagggggtattggctatatagttgtatactagcagatgtagactaaagttgggtgtatattataattataggaatcgattgtttttctatttcttcttccacttagtttaggaatgattaaatgagatacatgagtgctttgcttcgtgtcactctacccatataaatatcttaacccctacttagactttgattatgcaagtggcatgtatatatattattagcatagttctctcttacaatcttcccttgggattaaataaataagatactttcgaatactcctgggtgaaatgctacaatggtatatccgtgcacttgcaggttctttctgtaaaccatatatatactaggtccatttctagcatcatggctaggaatttatatttctagtagtatcattaagaaataccaataagcatttttggcgccgttgccggggaagattaataaagagattactataagctaataatttatacacaccacctctgtatatatcactgtcctttgtaggctaaccttggttgttttcacttttcgtgtgaaaatagggtagtgcacatctggtttcaacttgccggaaaatttcaaagacaatccagagtctttcttctagaatgttaagccgcgagttagaaaaatcacctgaccaagaaaccaaccatccccgcgtcaccgagcttgtagagtatggccgagaagacactccgcgagttcactgccccctcagctgacaacgtgcccgttgggccgcaagtcaacttgtgagatgcatactttgatttgaagaccagcctcatcatgatggcgcaggctagcccattctgtggcaagcttaacgaggatgccagtgatcatctgcaaaggttcctggatatctgcagcacgtacactatgaaaggagtcagcccagatgtcgtcaggctcaggctattcccattttcccttcttaggaaagcgaagcagtggttctatgccaaccgtgctacaatcaacacctgggatacatgctcaacggcatttctatctaaattcttctcgatgggcaggaccaacacccttcgcggaaaaatttcaagcttctagccgacgagggacgagtcaattcctgcagcatgggagagactgcaggagtaagtggtcgcctgtcctcatcatgggatggacgatggctgatcctgcagagcttctacaatgggctcaaacctgcatcctgcgaccatttggacgctgctgatggaggggccttcttctccaagacggtcaggggaaccgtcaagctaattaagaagatggtctccaacatgggctggggtgcagaacgactccagacccgccagcgaggcatgcacaccgtcaaggagacggaaatgctcgctgcaaaattggatctccttatgaaacggttcgacgatcaagagaagaaaccttaggtcacgtcaaggctatggactcgtatatgacatgtgaggtctgtggcagaacgggtcactcggggaatgactacattgagacccgtgaggaggaaatgttcatggggaacaaca

SEQ ID NO: 8943 - DNA, 6981 bp, Oryza sativa
cgccgtcgaccggggtgagccgaagaccgttccattcgcttcccccttccctcctctctctcgggtgccgctccgccgcgccggtggtcgccggcggtgaccatcggggcgcgggcgcgttcccctcccgtcggccgtgccggcgaggccgccttcgggcgcgccctcgcggctgccaagtgggcccggccgtcagccgcccgcgcccgcgggtgcggctgacgcgtgggacccacggcgccgaccgccgccagccgcgtgctcccggtccaccgtggaccgagaggctgacgcgtgggccccactcccgtggacccggtccgcgcgccctctccctcggctgacgcaataaatgagatttttaattaaaatttaaatgaagaaattcgcaaatatccatttaaagagcatataaacttcaaatggccatatcttggccatttgaactcggaattggaccgttcaagtctctaatttttccttaagaagtcaagaacccatttttgtgctttgtttctgctgttatatggagtttattagagtaaaagcctttttcttttccgttggtcgtgtagacgctgcagcttcggaagatccgctcttcgtggaagttgaagccggcgtttgggaaagcgagcaaggcaagtcacatcatccttgagcatattgaatcccagtttataaaattattttaatttaaattaatgcattatcgctttatttaaattcccgcgttatcactgttttatttagccatgcctatttacctttgttatgaccatactattattgttattgatattattaccttgttcaccctagaataaacaaaaccccaactagtggacactctatttatggttccactagtatgaatttaggtagatgcttcgctgattaataggacaacattaggtggattttataattttagactttgggaatattcatatcatttggtcactatggaattgttggtttatggtggaattggacatacacctctcttcctctttcaaaacccctaaaacctgttttcggtggggtttgggtgcatgccagttgtgggaagtagcaccccggccactataaggattaagctcgggcctctgttgcaaagcactaccgtacttccacatgtctagtgggtaaggcttagtttgtggctcagtctggtcataaacaaaagtacacggattggagatggatgaagtcgggggtcgatggacattctccagggcaaatgaaggctacacgagctgcggcccggtagtcgagatgtcatggcagagggttggtgccctgctgctagggggctcagtcctgcctgcctgtcccgggtgtcccggccgtagggggattgggtcggtactcttgtttatggctaggatgggttgggaactatgtcacgtcttccgtccgtataccgtggtggtatgtggcacgtggttgcacgcgaggaagatgtgtcttgtgggtaaagatgtacacctctgatcagagtataatctattcgaatagccgcgccctcggttatgggcaagccgagcaatgtacccaagtcagtgtttcaaattcttaaaatttgctcgacaactaaaatgtggaatggttggcctgggttggcttgggacgagctgggacccagggtcgggttgccagttcggtctgaatcatcgtaggccttgggttaaggcaggtccgtgagggttcacggccttgtgtaataatactgtgtagctctaggatcgtctttataaaatggctttgggcaaccaagtgacttttaaatgctgtttactgcaaaacttaacccctatattattatccccttgtactcccttgcattaattatgcatctccggtgtggcttgctgagtactgtggttgtactcattcttgctcaatctttcccctcttcagtaagagaagcgttggagaagatgtcttaggtggagtcctggcttataccccagttgagcgcctgtgaagatggagccgtaggcccgctagtccgctgctgtttatttttgattgtcaggccttaagtgcctttgtaataatgtaaatattatcgatgtaataaagatgtgtcttttatatcatgtttgtatggtgtaccccggcttttcctgggacggggattaatacactagcgttcgggaaaaggcaattttcccggtcgcgacatacgattcgccatgtgaaaaccttaacggcgtaatcaaattatgccgaaaccgagtcaatctcaatggctcgtttttctcattggcgtgcggttcttgtggacatcggactatccgatgaacacaatcgcccttggccttggtgagtactagacattccagtgaagtcaccaacacacataccgattgatctcatcaacccatgcggctatcggttcatcgcatgttccgatcacctaagaactcatatacaacataatagatctcatctactacatccgcatatcaactatatgcaatgatctagatcataaactataaaaggtggctctgataccactattgggatacgcgtaggctacgatagcatatatcaaaattttctatcgcgtaaaccaggaaccatgcaagtattagatcatagatcgttaccactcgacgcgctgcgcagcggaagaagacactgagaagtcgaaggaactctcgcgaagtagcgcgcgtcgatgtagaggaagtagtcgatcgcaccggctcgacctttttcttctcacgcgttctcctcgccgtactcccacgctaatcagcaccgcaaaccagcggcgcctctaccggtatctacacgtacagggacagaacgccacgcgcagatatgctagcacccgcgcgcggctagggttttgcgtggggagggaagtgacggctagggtttctcacgtgatgcaatatctccgccggtcgcacccctcacgaatatataggatccatcactcgggcctccaaggcccgtaggactcctattcggatccctatccgaattaagcttatattggatctccatccaatcgccttattccggcccattaagcgtgcgaccctgtaggttcatgtatattcggctgtaacccgaaaactccttttcggtccacacgtcaacagcggcccctagcagaacgtattaacccaccggacatacataatgatcatatcgactgaacctgtagtgtatacttgtatgaacccctttgcctcacgatatcgattaagctcaaggctagatatgtgacatcctctaatagcttaattattcactcgaacctgttaatagattatataacttgtgattgactcctcattcacctttggcatggccatgcacttccataatctacaacatcgaggggcccagagatatctctccataggaggggcaaatcccatcttgattattcatatcccactgcatgtttcatagcatacccgaaaactacttttataactacccaattacggagtagcgtttagcaatccctaagtaagctactacacatgttgagaaccatgataatcttaggtctaaggattcaacaccaacactaaaagagatcactgatgacacaacacatatggctcttacagtgtctcatgttgggtctatccaataacatgttcaccaacatgtgtccacattattaatttggtatgtctataccataatccataagacatgatcatcaattaatacatgtgctgatcatataaacatatttgttccacatatgatatttgatcagggatcctttagaaatagtaacaaacaacataaagagtctcataaaagaatcacatattcattaaccaataaggagttatctatttcaaagaacaatgtcggataaatatgtaaacatagtgtatgatacaatcatctctatgattgcctctaaggcatatcactaacaatttggcatgtggtgtgtacgttgcggcaattgcctgccttctaaaatgcatgcacatatatgcccaataaatggacttgcaatgtggaggtggtttccattttataagaagtaaagtaaatcagggagatggttattctcaggtgaatattaaaatctaagtatatgcatgacattataaaataagtcatttaattccctaagatatgtaaaattgtgttaattagtgaattgtacaaaacatgtaaataatgaaatggatgattactaggcgaatttgttcttaagaaaaaaaatgtaaatctcaaaagagcacgcaaatatcgtcctgcagatgataactactcgtaccgatgcggtacatatgtacatatagaactaatacttaacacaattatatccttctctatcccctagaaaattatctttttatccttactacctaattaactgtgccagtatttaaataccttataagtggtaccttttagttttactgttgagcgctgaatttttgcctttttttagaatgcctctccatatattaaatatatcagcagaaaacgttcctgttataccagtatctttttctgcaatcccagcagtttgagggcgactgctttgatcagataagtgatattttaagcacaatagcgaccgtacgttataagatattcgctctccgagtgcgtccaattatgtataaaaattggaacaactagaatgggagataccaccaacctttgtcatcaaaagtcatgggcctgccgatcaagatagatgtgataatgcaggtctaggctacccaccatatccatatgtctatgtctatgtgtgtgtatgttgcatatattcatgctctaaacttttagctgtccacgacaacaatctctcgtgcttatcccctacaaaacgatgtgcttccctcttctatgttgcaaaaatttaatttgtcacaagtcggtccaatgagaatttgcctcaccatgccatgtccgtatgtatttagacaaaatttgatcacatatcataaattgctcaaagatgggatttttttttcattacgggtggtgttcaatgagaatatgctggctaaaaaaattatttgttttaatgttactcaatagtaagagggagtcggggatttatcccatgctactcaatgagatatatatcaccttagatctcattttgttttttttagcttatggctgtgtgtaatatgatagaagttagaggtgtataaaacatttgcattatcttaaaacaaattgctcaaacaagtaactcatcttatttcgcgatggaaatcttgtccaacatgtgccatgtcccaattttttccaaaatgtaagtctcacaccgatttcttttgtcgtaaacaagatcacacgcgattcagaaaatactccctccgtccttttttaaatgtaaccatataagtttccgtgtctaattttgatcgttcgtcttatttgaaaatttttataattagtattttcgttgttataaaatgatagaacatgaatagtagtttatgcttgacttatgttttttaatttataaaaaaaattttaaataaaatggacgattaaagttgagcacagaaaattatggcttcactcgaaatgggatggagggagtagtcgacaataatgcaatagtacgttttttaacatattatctagctcaaattgatcccactgtcaaattgctcgagctaatcgtggcatgccgcatgtgcaagacttaaccgatcaaataaattaaaacaactgtgtgccccgatgagcgcgggcaatttgacagtgggatcatattgtggctcataatacagagtggaggcgcttacaagaacaatattcccttagttgccaattgccattggaataggcgcaatcaaagaattgattcccgtgtgatggctccaacactctatctacgtccccataatgactccaactttacaggcaacccacgtgaattgatatgttccatgggattcacataaccaaaacaaattatataatgaagtgactggttgctttataacatactccctctgtcccatatccccttatagattgattctttttggacggaggggtaggtgactaaactgtgcctatcttacaaattatggtaattagttcgtaccccgcactttgctacagaataagtggatgaatacatgctatatattatagaaatggtagatatatatttaaataatataaaaatgatgtgaagataattaatgatttgacaatgcttgcatattgagttataaaaatataacaaaattataaatgatatgtcatatttgcatgatatttgaaatagtctagataataattactagtgggtgatgatgtggtgcacttacatatgatttaaaatactctagataataattgctagtaagtaatgatgtggcacacttgcatatgattttaaagactctaaataataattgatagtaagtgacgatgtggcacacacttgtattttaagctttaaaagttagtggacatcaatattatagtaagataggataccaacaaggcgacgagatgatctaacgatggatctaatggtattgggtctccaattacaagctagcatcgaagctccattcttgttttctcataggtccatgctctccctaaacaatagatcttctcatgcgatatagcctaggttttttttttatataacaaagcaacttattgaaaagaaaagttcaggagacataaaatccccggtacatcacctggattaaaattaaagataatatagaacaaaagcatcccttctgcaagtaagtgtatagttgaactaagagaaataattttgcaaatgaaaccatgcagcaataatgaatggggtcgacagagggatacgacattattgttgtgatgacttcatcctccacaggccagatctattactaacgtacgcaccgcttaggtggccctgtcaatgtgattcaccggactcaacaaaatatgtcactaatttattggttaaatcagatgcaccctcttgtctaa

SEQ ID NO: 8944 - DNA, 2422 bp, Oryza sativa
agactgaacatccatcaagattcacaatgtataagccattcatcatgggtgcatggaaatagaaaatgtcattataatagactgaacaaccattgtccacagatctaaaaccataaccctctgcttgcaaacaagaagcagagataacgttcttacacaaagctggaatgcaataacaattatttaactaaaaaactaatcctgacggtaaagataatggcatagtgccgaccgcaacagcagcaactcttgatccattgcccacgcgaatgtccacttcgcctcttgctaagctcctacttcttttcagccctgcaacgatttgcatatatcagcaactgacccggtatcaaatgcccaagaatcagtagaggaagtagcaagattaatttctataacattaatacctgaggtggaactctttccatcctgctgcttctgcttgagctgctctaggtatttcttacagtttctcttccaatgacctgtctccttgcaaaagaagcactctgcatccttagcgggccctgtcttttgaaccttggtcttacagttgctagtactcgtgatctcatcagagtttagctttctcttttgaccactcttcttgttgttgggcttgagcttatgcataaccatcacatagttggagtttttcttaatgctttcctcggcagtctttagcatcccatgcaattctgccaaggtcctgttcaggttgttcatgttgaaattcataatgaacggctcaaagctgggagggagcgactggagaatcaaatcagtagccaactctcggctaaggggaaaaccaagcttatccagactctcggtgtaaccaatcattttgatcacatgtgggctcactggattaccttgtgcaagcctgtacgcaaacaagaactttgaggtattaaacctctcagctcttgcttggtcctcaaacatgttacgtagtcccgtgattatcgtatgagcatccaatgcctcatattggctttgaagctcaggggacatagtagcaagcatgagacagcttatatcaaggtaatcattgcatcgcctttcatgcttcctacgttgagcagcaggagcattgttgggcaagtcagctggaaaaggctgtataagcagaaactctttgtgctcttgcctgagaacaattctcaggttgcgataccaatccatgaagtttgttccagtcaacttctctttctcaagaatagaccgcaagttaaaattggatggtgcatgagctgccataatctacaatagaaatatatgtatgcaaaatcagcaccatgtttacatttaacctttcatcaaacaatttaacaaaagatactcccattatgtattgtgaaacaaaattccctctagtaacatagtgagttaagatcctcattttattagtgtctagtgagctttggcatccaagctagacaattatcaaaacaggtaagcaacaccttgctaatcacatcatatgtgactcttgtgctgttggggtgacatctccatgtccaacccaacctatgccccaaggtccaataaccttgtcaagtaaaccaataatctccgcatatagatgtccgacatctatcctattttatcatgataaaaagtgacactttactatggcaaactgtcacgtcctgataaattcatcccgaaataaaaatcattctctaaaaggaataatagaattaattaaaattcgaaaagaaattggcaaacactaaaatacgtacaagaaaaattcaaatgtggcccggagaatttttgttaaattctccttggtctaaaaagagccctcaaattttagtggaattttcagagcacaaataataattgagaagaaataaacaaagttgaaaaggtttataaaaagaaaaatctctaaaagtcttcttttccccccttcctctcttgggccggctcggcccaactctccctccctctctctcctctccccgcggcccatcggcctcctccccgcgcgcgcgccgctgacaggcgggcccgcccgccgccctcgctgacgggtcgggcccacctgtcatcgccttcctcccgccgctcccgccgctcgcccgtgccctagcgccgccgccgccgcggattccgccgcatcccgccgtccccgcgcgccataatgaggggggaatcattccccgcgattccctctcccgattcccccgcttttccctctctctctccctcggattcgttcggagttaatcccgcaagtttcgccggcgtcttcaatggtggccgagatctccgcggccgattcctccccctccggccgttctctctctctcccggcgctatataagcgttccccgtgctctcctcctccgtttccgccactcgccgcctctcctccccgtcggaatcgagcccgcaccgtcgcaccttc

SEQ ID NO: 8945 - DNA, 26588 bp, Oryza sativa
  unsure (1)..(26588): unsure at all n locations
ctgactgcctccttgttgtccctttcctatttgcgtaggttgccttgtccacgccataggctgcgacctctttgttgccagttgtcgcctcttagtcggactctacgaccatcgcacctcttcgttgagcgccccatggtcgtctcctgatccgcgttggctgccgctctcgtctccacctccctcctcgctggccgccatcctcctctccacgtcatcctccacgtcggcggtctcgcggacctcctctccaccgtcctccagcttctgcgaaaatgtaagattataagtgttattttatgtgatttttagctgataatgtgaaaacattttatgtgagataatgtgaataatgtgaaatttttttgtgatataatgtgaaaacttgttatgtgagataatgtgaatatttcatatgttatatttatgtgattttttctgtcgtaatgtgaatttttttatgtgagataatgtgaaaaattttttatgaaaaattggatcacgtgcgagcaagaggattaatgggtccacaagtcagcgcaaaccgactttggatcagaccaaactacaaggaaccgtcataggggcccacatgtcatcctcccatcaaaggtggtggctagggttcagccgaaccaggcttggtgcccccgccaccgatgctagaggtggcatttgccgacagaagggatgtagctaagtttaggacatggtgtagtgcatggtgactctacagcaactcctgatggtggttatgcatggttagcagaccaataaccgtcatacaactgctattgagaggctataaatggagctctcttcactttgtaacacacacatcaaggatcaattctctcttccactttattctctatagtttctagtaggaaataagcttaggagcctcagtcctatagtcttctcagagttctgaatatgtctctagtactctcttctttgtgtaagactatagtcgaattaatataattattttctttatttatttatgctcatattttatataattctttattgagtatatttgttatgagtagtatatacttcgtatatctacttcatcctagggtagtcgatccatgctatggtaatggtccaatgacctttataggttgcgctagctccaacttgttcttccgaagggtaagagtcctaggggagttagtgatattgtttactagcataaacgtggtgtttaggctagataaatatcgttggatgtgggtgtatcctatggaaagtgatgtaggcggcaggtggtgacaaccttgtccatcctttgtatttctccacgtctaggtttgatgtaagagtgcgtaaatgccataaccacgctggcaaaccagcagggagtggtctctcggtagtacttgggtgcttggaactaagttctatgttgtaagcatgtatatattaagtatgtactagacatgattagtttagaagtatagttgtatcatagtatccttagctatttactactaggcactcttttagaggtgaatctcttgtatgtgtctactaccctataaatcattatcctaacccctgtctagactatggtgaattaattatagattgattaaatatatataagtatgtcttcataccgccgcctccctgtggaaatattaatacgatatctttgggaatactcatgggtgaagtgctacaatggtattctgtacgcttgcggatttatctgtgatcgtaaaaaataccaacaatgctagccgcatttctccttcactttgatatagaattcttgcatccaggttaattctccaattgcaatacaactacattattttttattagtatacatgtaggaaattataatttccctttattaattgtgctagttggcagtcgaaagtggtacttaacgactgtcaacacccagctccatcgcaaccaacgacagttgttgctccaacaccactttcctgttaacagggaaatttggtaagtcccgaagttatcatcgacctagagtcagtattggcttcattgtcctggaatcggccgacgagaattatcaagtcgctaatagtcggattcttgctatattcggttaaggaaataaatctattagggaagcttatccagaagtgaccgagttcaaggaggatacgtcatggcaagtttatctattaattaagaatagtctattagtttccttttatctttaggaaagtgtgtttagtgttcaataaggactttatgtttccttttatctttagaaagtttctttcttgacctacaaggactagtatctaccgatgggcataaatatgtacaccgaggtcattgtaaactatctctcaatcaatactactctcggcgtatcgccaccctcttttctgaggttttacttatcaaccggcggaatttggcacctgacgcggggcagcatcagttcagttcgatctctggcggaggggtaagtcctacgttccgtcggccctgggaatctatcagctacattggtgttgttcaaggctacatcacttcgatctcttgaattgctctggtttggttgatatatttgcctacctgatatctcaattctatctctaattgcattgtgtttagagatgcatcgatttagatgggactgtcttggttaggcccgatctactgtcttagccgatatatctctacaatcacaatgctgttataaatagatttattatatccatcacattagacaaactaaacaaactaaaggtttcactgtttatctaaatcaattggattttatgacatcagacttttagccgatgtatgttttaaccatcggatcagtacttatcctatcatattattattagccgactggtttctattggattatattattattatatcttattatcatcagtcgattgtctttgtatcattatctatgttggacatatagccgattgctcaaaaccctatcgacatcggctagaatcggcatcggctaatgtcggctatcggctggaattactccatcggcttgttagccgatcggctgttttatctgctgtttacataccttgtcagttgcaggatcaaactgactgactgttaggtaattcttacagtcacagatagaaatccgcaagcgcatggatataccgatgtagcacttccccctacggagtattcgaaagggtatcgaatccaagggaacgtgtgtgatcagatcttcctctggttcatctaaggacaccaagcaaaggataggcaaggatagagaggatttactagtgagaaacaatgtctagggaaagcttaagtttaatcctaatgcaatacttcgggcactggtaacctgctgttcccagatgtcgctctactacgtacccggacagggaggacttaagtgatctcgagggctgtcaccacctctacacctacctcaaacataccgtgggatacacagcaattactgtataataattacctaaacaccacgtctaagcaattaatatctactttagtgtttacaactcaccaaagcaatcactatattttagttgattatagtgaacaataatcctgtatgctatttaggaactaaacaagagataattctcacaagataaatttaaattactcagggagaatattatattgaaatcagagtaataaacagaattaaagaaatgagagaagattaccgacaactccggaattcttctaacttcttctactctactctcttcctattctagtatacaatatagtacaatagagtctcttataattcagctcaagcttggaagtgtgcgttcaagtgagtgaagtgaggtatatttataagaccttgtccgaagagccccttaaccatcattagggagtgttttatcggggtgctagccgataagttatctagacattgcatcggcttacaaggattacatacaagttggatttagccgattgcaacaaaagcttcactgtttatctaatcttgtggatttaatgacatcggtcctccagccgatgtatgctttaactttcagatcagtgcttattctatcatatcattattagccgattggtttctattggattatattattggtatattttactatcatcagccgattacctttatattgctatttgcttcaagtgtcggattctacatcaaaattatagccgatagttcaaaaaccctattgctatcggcttgtatcgacatcggtcggaatcactccatttgcttgccaaccgatcggctctttgatctattgtttacatatcttgtcagttgcaggatcaaactgactggcacgcccgcatctcatcaacctttggacctacactagagctaagcagatctcctaggctagtgtgtgtttttcgcgtcaacactagtccaccttccccaactctagtgaggtcatcacccgcatctcctgctcaagcgccgactcctccctctccgcctacagttcaagcttcactgctgaaagtgcatctaggacccctcaattgttttggtgttaatgacaacacaattagaggttcactaatgctttttgttgagatgaatgcaaggataaaaaggagtggaacttgagtttaaaagcattgcagcatgttttgtggtaatcgtcttctaatccatgtatatcttgtgttcttgagtattaggatgccgtactattaagagggataccacatgcatataattggtagaacactagtgctcaaaatcctttgtttgaagtgttcttgttttattcttgtgagactatccgatcctgatcggactatccgatgctcagactatccgaaatttcatagaactttgctctctgtctttggtctgagtgttggcgaaaaaatatcggactatccgatataaggtcggattgtctgatacatcggactatctgaaatttctcagaacttcactctctgttttgaattgtttttttcctcttgagtgattttgaaatcagattatccgatgtgatcagagtatccgatgacccagagactccgaaattcaatggaacttgagtctctgtaagaggatgaaattcttgcttcaaaaataacggaatatccgatatgacatcggactatccgatcgatcggattgcccgaaattctccagaatttcgttctctatctgtggcttgcttgggggtcaaaacatcggactatctgatgtcaccttggactttccgaggtgggatgaaaagattctctctcaacggccacattttgggggaatctataaatacccctcacctaacccttttctagggttacccaactcattcattctcattcactttgggttgagcttggtgctaaggtgctttggatctttgagctctttctccctcctcgttctttgtgtggtggatccatgtggttgtggatttggtgtttgagggcctagtgtgtgtttcactcgatcttgagcactagggtttgaccaagagttgtgtggtgtcttttactcttggaggttgaggactcctagacggctaggtgtcactcccgagccaccgctctgcgtgtggttggccgggagaagtttgtgaaggccggatctcatctccgcaaggacagagataccccttagtagaaggaggagtgcttagtgcaacctcttgaggaaagggttagcaaagacccggctcttagtgagctcctcaacggagagtagaatcccctcaaggatttgaactccgggaacaactccatgaacttcatcgttggtgatctctcttcatcctctctttagctttgcttaattgtgctgctatagatctagtcgctgtttgcgctatactcttgtttgtgtgctagatcttcttgttgtgactctttagtagattagacagtctgatccaacatcagactatctattattttcggatagtctggctgtggatcaaactttccgaccctaattcagttttagcttctgcataaagttttaaattagcctattcaccccccctctaggcctaattgaccctttcaactggtatcagagcctaatctcctaattagccttaactgcttggagagatcatgtcgggccaaacgggggatggcaaagatggtgataagggagatacgtttccttatgactatccatccacatctacttcttatgtgagtacctatagcggcaaagctccgtacttcaacgatacgcgctatgtcgcttggaaacataagatgaagatgcatttgaagtctattaacccatctatttggagaatagtcgaaaaaggctatgttttgtagaaacccgaggatcccacgaaggaggacgacgagaacgagcacaggaatgctcaagccgctaatgcaatacttagcgccttgaggaacatacttggcactagcgatgttaattagtgcatgccgacaaaaatgtcataacagtcccttatgcttttacataagcagccgctcgtaaatctaagtattttttttccgcagtaatacatcctttttaacaattgatgtctctaattcatctttcttgtttgcagcgatcactatatactattcctagtatatccaaaggaccatttgttcgtagcattggacccaacacactacgacaaggaaacgttcatggagttcctcactattctgattttgtaagtaatgtaataatccatatgtgcataattgctattatgaaatttctaagtaactataacaaatgttttgttcgaacaacacacatatgtattaccgcaaaagaggtgggccagtaaaagagccgacaaggaataatctacacgccaagacaggcttgtcagtactgacaaatgatattaacacaatttttcgtagaatccttacttgttagtattgaccggtctcttattattatgttcacagtgttttaaacaaccccacagacttccctatgtaaataatacatgtgcgagatggttagagtcaataagaggtacacaacaaacagtgatgaagtaagtccggatattgcactccatacagggtattctgtcgaaaattactttgtaacatttattgtccactttgtccatagatcccgtcaatcccttacgtagcaaatcggttcgacgacacaattatatggaacatgtgcgctgagcactgccgtttcacccatcatgatgcctacaatgcacttgggctattctacgaaaaggagagtcaaatcgcaataaaagacatattcaacccactaggagagtgggaggaagaacatatatagtgaaaatataatatttttgttcgtgatgaaactgttgtttatttgtaatatatgtatgacacgtccataaatgttttgtgttatttattctaagactatttacatgtcaatgcaatattgtagttagaatgacaacttggttagctcctatgcgtagaatttcaaatttcgattatgaaattgcgggaaatgttgtattacatacgagacacgatcttcccaaatggccagtttgggaatgggcctcatggagcatgcggccggcctaacttgtctgcatgcgaaaaccgatctttgcatgcgggccacttaacccagttgcatgcaaagatcgattattgtatgtgctgattagggtgagcgcatgcgaaaatagtgatttttgcagacattttcgtgcatgcgtgctggccaaccgcatgccaggaccggttttggctcccaggaaaaatgaatttttttggtagtgggtgtaaattgtctagatataatggttgtcatatagtacaaccactattttaaaatgaagatgttttggtttttctaagtcaaatttctccatgtttgagcaagtttctattaaaaccattaataattaaaacatttttttttaaaaaacccccttgggggaaaaaaaaccccaattggggaaaaaaagtttctattaaaaccataataattaacattttaacctgaaacatgaatactatacaatagtagatttattttattaaattaatttaatgttggtgttgtatatgtgttgatgaaaaatccgcgctcggccgatggtgccagatctgtattggcgcgaactaactcaacgaacacaatagcctgggagatctgcttaactccagtgcaggtccaaaatattgatgagatgtaggcattccaatcagttttatcctgcaactgacaagacgtatgaaatgaagatcagagaaccactcggccaataagttgatagcaatgctagccaatgccaataccagctgatgtcgatatggttttgagcaaccggctatatgtccaatctagattatgatacttgagtaaataatgatataaagacaatcaattgatcacaatgtaataaaacagtaatataatccaatagaaaccaatcgaccaaaaattgaatgatagaataaatgccgatttgatgtttaaagcatacatcagctgatatttcaatgtcaaataattccacaagattagataattagtgaaacctttgttgcaattggctaaaaccaacttgtatgtaatccttgtaagccgatgcaacgtctatataactcatcggctaaaataccaatgaaacccttattgtcaatcaaaggcagattagcttttatgattctaagcacgactttgtaggtcaaacccaattgatgcagcattaagtctaaacaataaggcctttgactgattttcagggtggtggataccttaactaatctagatcgatgaaacaatttaactaataccaataaaaccctagaaaagatctagtcgatacaggtaaattcagacattgacttaaattaactaagatatataatgaatagatgtttacatcgacaagattatagtatcgaggccctagccctgccgatcaaacatccttaacaagccttacccctcatcggagatcgacgccaatgaaacctaacttgaaacaagaactcgttgagaaagaaggaaataaaaagggtgggatgcgccataattgtattgatcgagagatatattacaaggatacgggatgtacatatttatacacatgggtagatattagtccttgctggaaaaagacacaaactttcctaaagataaagtaaaatatacaagtcctgatcagactctaaacaatatttcctaaaaataaaaggaactaactgactctatctagttaatacaaaaattgccatgccgcatactctttaaacttggtctgttctcgataatcttcctgtaattgccatgccccgaatccactaagaatctgaccgctggcgagtgacatttcccattagccgattctagaactctgaagccgatacggttcctaggccgatgatgacctcggggcttaccaaattttggcgttaacaatttgtttctatattttcctataagctgggttaaacttacagaaagtttaatacaggataaaaccaaaacaccttatgttctaaaatggagggaatattaaactgataagaaacaacttaggtggtaaaatagaatttagttttcttttaatgtgtcaaatcatatcttactataaagttgatgcccactaactactaaagctccacatgcaagtgtaacacattatcatccactagcaattattatctagagtattttaaatcacatgcaagtgtgacagatcatcacccactagcaattattatctagagtattttaaatcacatgcaagtttgacacatcatcacccactagtaattattatctagaatattttaaatatcatgccaacataacatatcatttacaattttgttatatttttagaactcaatatgcaagcaatgtcaaattattatctccacatcattttcatattatttaaacatatacatctatcattcctataacgtataacatgcattcatctacatatcctgcagcaaagcatggggcataaactaattacacggctacagaacattacataggttagcatacggcacctatgcgaaaattagaactggcacctatagattagcatgagccagaaaagaaaaagagagccagctcgaatcgagccgaactcaccaacgtttgacaccgcgccatccccaaatcaaattgaaatccccaaatcaaaattaaattgtgaccatgatctattgacatcacagaatgaacatactcaacaacaaaataattcacaaaaacatttacaaaagagactggggattggaggggaggggagggcgagggctggccaccgggcttctttgctccaccttctgccccctcgccagcggacaagggagggcgctgcgccgccaccacggccgcctagtggggagcccactcccccggccgcgccctcccctcccgttggatctggcggaggggaagacgctgcagccgcccacgaccggatctgccgaatggggcgctgccgccgcccactccctcccctcccgctggatctggcggaggggagggcatngccactgtgtgcatacagagaggaagaggatagataaagaaggaaggggggttgtaggaaggaggaggaggaaagggattatagcacgccgggtagagaataagatttgggcgagtttttttatgtggttggcgcactgatcgatcgtctgggctgggtcaattttacaaaacggtcacctacagtttagtgccggtttttcctctagaaccggtacatatagtttttaaaggcacatgttttttatttttctcagcgtgtggcggtaaaaaacggcccttaggtgatggttttaaattaaggggcacctataagaccggtccctatgagggtttttatagcagtattaccttgtaagtggtggtcataagcaaatcaactagcctctcttgtgtcaagcttccacagactgagcggctcgatcggctcgtctccaccctactagatcaaatacgtaccatacatatgcaactattattaaatgtacttacagttattaagaggtggagtaatgtggaccgttgatcaagagaggggtaaggtatggaataaaaatatattgtaaccaatggtagaggagtaattaactagtgaaatattgccattatcgccgaattgaataccttgctccgttgatcggtactgtacgcttgtcgaaacaagatttcggcaatactaaaaggggtggctatcaagctggaaaagtggatgggtttagagacaaggaattttatacaggttcaggccttcttaatcaagaagtaataccctactcctgtccggggattgatccgccgagtgtattattgattatatgatatgggtgaaagtcgtgcccctagaggcacccggacccctccttatataggggaaggagtccgtattacaaaatacagtccatatccctaacggaatatgtagttacagataaaatacaatcgtaaccaactaggatctcggatatttccttgacatacaagtttagaatttaaccctagtccttttaaagacattctatctatacacggcaccccatacccagtcagactatacatgccgtgtaggtatggggtatccataaactccacagtagcccctgagacctttacagtcgacgaaacaatctcttctcgtagcacagaatgataatccgagtactccgacttcttctgccctgatctcccgagtaccaaaaatcaaagactgtgaaggtctaaaaatagaaaaaaccgggtgcatcgactagatgcacataattaggtgtagcccccgactacgtgattagttaaaaaactaaacatatagtcaagatgcaaactacattcaaccgagtggtttgacaaccgaatatcatatagtaaagcatatgcggcgttcaataaaacatccagccgactgcttttagctttaatataccaaaaatggagatatgaaaaggcctgagtgaaaaacactctaaagatccataaattcacacacttgataagaatccgagtaaaaactcttaaaaagatccatcaaacgtgatgtaaatgtgataacacaacaagtgatgagtctaaatagcctaggctatgactctcaccataaaaataagcatataacatgccgagtgaatgactgtattaaaaccagtcatcccaataaaacccaaacagcctttgcagcctaataaggcctacaaaattagtataacacctttctgtcgagtaccttttttatttgcatcatagtaattccaaggaatcatctaactgcgtcaaaaaggattttaacatcattgggccatactgttgtgagcaaaatttgccaaagcaaaaatgcctaagtccctaaggatcacaactagccacgctggcaatagcattgggctgaagtactgtataggcccaggtccatcaccactcctgaaaccctagcaaaataaacgccgaagtcagagcgtcgtttcgtcttccctgccaaaactctcgccattttccccattctctgctacagtgtaaactacactggcggaagctagggttaacaaatcctctccgatccatcctcctgagctccacaaaaaccttccgcgcaaccaccgcatcgattccccatccatctccagccatatcttggaccaaatcacaccatccaattcgtattcatggcagaagagaaagaaagcttcgagtgtcagtgggcgccctccgatgtaacagaggaaaacctgaaggagatggtggcgcacggtgttcttccggcgaaggagatcattggatggcgtccagcattcggcgaagcattcccgacccccgacacacatgaagtcgtggtattttctcatttcttctatggaggattttctcttccaacctcaagattcttccggggaattttggatttctacgggattagtttacatcacctaaacccgaactccatagttcgtattgccaacttcatacatgcctgcgaagcttttttgggcatcaggccacattttgccctattccgtcgcatcttcttcctcaagccccaaccgaacaaaagcaagccatgcgtagttgggggagctggatttcaacttaggggaactctgagccaaaagtatttctccatgcccttcaaaacctcaaacaaaggctggcatgcaaattggttctatgtacaaaaccccgagcctgcactccctgagtactcctgtcatcctccagtttatcaggacacttggaattcactaccaatgggagaagaagccgcccaggcgcttgccctgatggaccatatgctgaagctgaaggagcaaggtctgcaaggagaacagatcacccggcattttatcaagagccggctggccccaatcaaagaaagatctcgcacggccttcgaattcgacggcaaacatgaccctaaccgtgaagatcctgaatctcttgaattcaaggttatgaaggagagaatgtataagatcttctcaaatgcaatcgcagtcagctattcgcacttgctgccagtggtgccatacaatgccttcaacccccctccaccgatatgtatttaaaatcccagcctttctcaaaagcatgcttttatcatctacaaagttgatggaaaacttggatcatcatgcccaggaattcgccttgatgaagtcagaccccccaactgctcaacgccactcaccccgtcggcaaactagtcaagctaacggaggaccaaaaatccgatctgactctcaacccagcaccactcaatcggccaaccaatcagacttccgaaagaggaaattggttctgagtgacgaccaaaatgatgactctgaaaaagctggcagcaagagggtgaccggaaaatcaacaaggcaagctaacccgaagaagaaaacatccagtcgtcctatgccaaaaatcaggaagttctccaggtacaaatcatttagccattatccttgtattgatgcgcacttcattattgaaatagcactgatagcataactcaaattcgtaggaagccatctgacatagatccttctggaaaagactctgagccaactgacatggagatgggtccttcaaaagaaaccgggccgactgcagaagatcatccgagtgacaatcagtcggcaaccgacaatgtagaacccagcaacgagcccctgactggaaaccagtcagccgaagctagagtcggtgctaatcaggagcccccggctggaaaccagtcgggtgcagaactaaataaagatgtccctgaagtagaagctcaaatggacagccctcctagaaaggatactagtgctgatccagggtccagctctcctgttaaagtacaagagcctgctcgtccctgaccggaaattattataggtaaacacatcctctgaacccattttgatctgacaggctttcttcgattgtttcacctttattcatgaatatacaagggccaatgattggtgatgaagaagaggtccttcagatacgatcggctgaagattctcgcccacccattcaagtcaagtggtgggatgacgacatgcaacctcagggaatcatgataaacaagcaaaaggaagacgaggaagtatgtctgctgaaaaaggcactcgggcaagctactcgtatcgtaaacgtaagtctccctatacgcagcttcaaccatcctgtttgccgctttgcacaaatgccgacaaactcgccttgcagagaatccatctcaggaacgaggcgaagactgcgactcttgaaaggctagttccccatcttggaaccattgaggccaccagaaaccagctgcacgaagctaaagagcttgctaggaaaactgagcatgatctaagggatcggattgccgagctgcaagactccaactttgaactgagcggttcatgaaaaggtaaatacaacctctatccaacctacttatgctaccatccttgtaatatcaattaacaagaagaatacagtgcaagctgccaagatatttgaattggaaaagcggatccaagctctggagaatgacaaggccgaattggcgagacaaagggactcggctcggaaagacgttgaaggtactggtgactaatactccaaaaaccattcctttctttatgcccactcgttgatataaatctatttatgcagatcgcaaaataaagtcttaggctcaatttaatgtcttggtcaacaaaatcaagaggcttgaaggggctagggatgaagtcgccaacgctgctaccccactcatccaagccatgtttttcaataacaatggtccgagtacatttgatgcttctgagattttcgacaagctgagaattgctccggatacatactttaagaatatcaaggaagctggaagtatgggagcaagcctggcgttggcaatgaccaagtctttatacccgaagattgatattgacgccattgatggctttgcagatgggacgagcgaagaggccgcccttgacctcatcaacgatgcgcagaaagccgccaataagatagccgttgatgtagttgagagattctaggacaacgaccttcggccgactggatctgataattccaatgataaaaaaactgacaccgactgatgttgtattataacaatgattctgatgatgaagatgatggaggcacaatttgtacaatactgatgaatttatgctgtgcttgatatttcaaacttagctcctgatttcttaaaagcttttgtcaaaccttattgagcctaaaacccgcaaaagttattaaaaactttcagtcctcattgactaagccaaaaaatcaaacaaggcaatgataaatcaagtaagcaaattgaattgataaaaatcatactctattattattatagtagccctcgactgataactcaaggaaaaacatgatgttatcagtcaaagagggaaatacaaaagtaatgcctaagcataaaattgacgaagatgttcgatattccaagaattgtcgatggtagtaccatcttcacgcttgagtcggtaagaacctggccgagtgacttcggaaattatgaatggtccttcccacaagggagataacttgtgtcgatcccgtgtagtttttctcagaaccaggtcgccgactaaaaaggctcgtgattgaacattgcgattatgataacggcgcaacccttgcaagtaccgagccgactgaattaaagctgcttcgcgggcttcttccagtcgattgagatcatctactcagttatctccgtagcgctcttcgttgaagttacgaaaacgtaaagattcaaattccacctcattgggcaacatcgcttccgctccataaactagaaaaaacgtcgactggcccgtggcccgactgggagtggtgcacagggaccaaagtacagatggcagctgttctacccacttgccggcatagggatgcagtcggtcgaaaactcgcgcttttatcccttgaagtaccatgacattggcgcgttcaacttgtccattactcatgggatgcgctacggaggcgtaacaaatcttgatgccgaagtcttcacaaaagtctttaaatactccgccagtaaattgagtgtcgttaacagtgatgatccgattgggtaccccgaaccggtgcacaatattgatgaagaaatctctagccttgtctgccatgatagtgatgaccggtttagcttcaatccacttagaaaatttgtcaacagccacaaagaggtgagtataaccaccgactgcctttttaaatgggccgaccatgtcaagcccctaaaccgcaaatggcgaagacaacgggatggcctgcaactcttgagctggtagatgagtttgtcaggcgaaaaattgacaaccctcacatgtccgcacaattttatcggcgtcggccacagctgtgggccagaaaaaaccctgccgataagccttgccaacgatggttcgtgcggtagcgtgattaccacagatgcctgaatgtatatcttttagcaattgcctaccctcttccaaagacacacagcgttgcaggattcccgatggacttttcttgtacaacccggtctcatgaatgacatagagtctgctgtacctagagatccgctcggcttcatctttgtcttgagagagtttttgtttggtcaaaaatcttatgaggggctccctccagtcggcttcaatcatacttacgtcttgagtgtccgtggcttcaataaatactttcctcggtacggttggttcgtaaagatgttcaacaaatacgtcggaaggagctgcttctcgttttgaaccaaaattagccagtctgttggctgcctcattattatgtcgaagaacatgggtgtgttcaagtccgtcgaatttgtcttccaacttgcgtacctcctgtcggtaggcggtcatgttataatcaaggcaggaccactctttcatgacttgattaacaaccagctgagagtctccatgaactatcagacgccggattcccaaagaaatcacaatccttagtcacgttgtgagacacagaaaaatgtatccaaaatacgtagctcagtctttctccagtcggggaaattagaacaacccccgctccagtgtttgagagcctcttcgacccgttaaaatgcatggtccaatactccatcttcttctcaggcatgtcttcttggcactcagtccactcgtcgatgaagtcggctaaagcttgggacttgatcgaagttcgcggcttgaaagatatatccaaggacatcaattataaggcccactttgcgatccgcccatttgcttcgcgattatgacgtatatccccgagtggaaacgatgtgaccaccgtgaccgagtgaccttgaaagtagtgagatagtttcttgatagtaattaaaacaccatataatagcttttgaacctgaggatatcttgtcttggaattagccaaaacctcgctaacgaagtaaattagtcgttggactttttggacatggccttcttcttcacgctcaacaaccaggactgtgcttacaacctgggaagtcgccgacacatataacaacagcggctctcggatgtggtgaagctaggactggtggagtagtgagaagttgtttgaagtcttcaaaggctttttgtgcttcgggtccccactggaaattgtctgttttcttcaacagcttgaaaaagggcatcccccgctcgccgagtcgcgaaacaaaccagttgagcgccgccatgcaaccagtcagcttttgaacatctttctgggaacttggcggcttcatgttgaggatggcattgattttccccgggttggcttgtatgcctctatgagacaccataaatccaagcagcttccttgatggtactctgaagatgcacttttcagggtttagtttcatcctaaaagcgcggatgctcgcaaaggtttcttctagatacgtgatcaaatcatccttctgtttggtcttgacgactacatcatccacataagcttcaacattgcggctcatctgagttgaaaaacatctctggatcatgcattgataagttgctcctgcgttctttaatccaaagggcatggtgatgtagcagtaggccccgaagggcgtgatgaatgaagtctttaagcagtcggattctttcagtcggatctgatgatatcctgagtagcaatccaaaaaactgagtagctcgcagtcggccgttgagtcaactacctggtcaatgcgaggtaacccaaagggatctttggggcaagatttgttgaggtcggtgtaatcaacacacatgcgccattgtcccgtcttcttccgaactaagactgggttagccagccagtcgggatggagaacttccttgatgaagcctgctgctaacagcttggtcaattcctccttgatcgcatccttcctatcctgtgcgaagcggcggagtcgttgcttgattggtttagcgtcttccttaacatgtaaagagtgctcaatcacctctctaggaatactaggcatatcagattgttttcatgcaaagatatctttattattttgaagaaaggtgacgagcgcgctttcctatttacaatctaactcagtgcctattacagcagtcttagtaggatcagagggatctagaggaattttcttggtcttggcgtcgctttttccactctttggcatcttggttgcaggcacttctccttcgcttgctgtggacgcagccagtcggatttcttctcgggcgatcgtgatctcgcgggtctaggccatctcacagctttccttgtcgcatgtgacggcttgtttgatgtcacttcgaagggatatgactcctcgaggaccaggcatcttcatcatcatgtaggtatagtgcgggacagccataaacttggctaacgccgggcgtctgagtatggcatgatacgctgtcttgaaatcagcaactttgaagcaaacattttctgtgcggaagttctcccgagtgccaaaagtaaccggaagagtgatctggccgagtggtgtagcggatagccctggaatgactccgtgaaagggcgcattactcggctttaattccgtgcgagggatctgcatgtcgtccagggttttggtgaaaaggatgttgagtgcactgccaccatcgatgagggatctgcgaagcttgacgttgcgaaccactaggtctagtaccagggggtaccgccccgggtagaccactcggtcaggatgatcggagcggtcaaacttcattgttgtctccgaccaccaaagaaattggggcgtatcgggctgagcagcgttgatctctcattcggtcagcttttgcttactcttagattcataagccaggggtccgccaaagatgtggttgagttccttgtgatggtcttgaaaaccagtcggggcatcatcgtcatcgtccttcttcttcgacgtgctttgatctccgtcggaggccttacgtgcgttcttggcgtattgttctgcaaactgtttgtagatgaaacaatcttttgccacatgattggaattgggatgatgcggacattgggagttcatgatcttgtcaaaagtgttgacacgcgaacgttgtcagaaggatggtgttgtagttgtcacaagttcctcgggcttacgcttgcgatccttgtgattggcacttccactcccttctgtagtcggcgtatctttctttggcttctaagtggtgcccgactgcttggacgcgataatggcatcttcggctttggcatactcgttggctttttcaaacatctgtttgaccgtcttgggaggcttgcgcccgaacttgccgactagatcttcgtgacgaattcccttggtgaaggcggcgatgataacgtcgtcggtaatgtcggagatcttgttgcgttgctcagaaaagcatcggatgtaatcccgaagggattctccagacttctgaatgacgttgtagagatcaaaatgtgtatcagggcgttcaaatgtgccctggaagttggcgatgaagtggtcacgaagctccgcccatgatccgattgtgccacggggtaacccatgaagccaggaccgggcagaattcggtagagccacaggcaagtagtttgccatggctttgttgtctcctcctgctacgtgaattgcgagaccgtagacggtgagccaggactctgggttagtggtgccgtcatacttctcgattccagtcggcttgaaaccggctggccaatccactctgggttagacagcgactccatccacatcgtcgtcgtgatccggtgaatggtgggggacgtagcctcgtgccgcgtggcactggttgattgtatcgcgaagatcgacggggcgcctgcgaggtggggagcgtggccgttcaactcggtgctccctgtgtcgttcgggaggcgagtggacagatcgcccgtcgtgacccctgctcctgcgattggatcctgcgccggcgatgctgaaggctcggctggtgatagtcttgagatcgaagatggggaactcggctgccagtcggcgtgcggacgcttgcggagttaaccgggaccgaggcaacgatcatggtcttggtcagggtcaagatgttgacgacgtgattagcttggttgagtgcgtcttccttgaggagggtgtcgagaagggtgatcgctgcaaccgcgttctattgaggggtgcgaaagaccgcagttccctcgacgtcttgctgcacgataagttctcgtgctcgtcgcccggcgtccaaggcccgttgtcgtcggtcctcagcctcctttgcagcccgttcgcgttcctgttgctcacgctgccgccgttctcgctcttgtgcttggcgctcctcttccagtcggcgtcgttcggcttcctgttgtacgcgtagctcttctgcttctcgggctttgcgctgttcccccgtctcgttgtcagccatgaagatgccgaagtagagaggcgtgtagttatcttcaaagcccttgtcgaagtcgtcgaggttgcggttgtcgtagcgatagccgaagttgtcgtactccacgatctctgttggtcgtgagtcgacgccgggggagctgaggtagccgtccagttgttccgtcgaaaccgtgccgagcggctggagtatgacgccgacttccctggagctaggccggaccggggctgaagccggatcccgcctaggcctatggggagaagacacccttgtggtgaagacagtagccaaatcatcggggagtttcatcaggattggcggataggcccaatcgtcttgatcgggtcgtgttgaagtagattggatctcgtccaagtggtttgaagccaactcggtagagttgatcttggggtagaccatggccgagttcgggatgccgaacggagcggagatctggcctcttcccgactggttcgaatccgagtcgaggagagaaatcttaccgaagtcgttggtaatgaagtcgaggctgccgaaacggaacgcctgcccgggagggaagacgaagtcgtcgatgccagaaatgaaacccatcgcactagtcggcgaagaacttgacgctacccctagctggcgcgccaactgtcgaaacaagatttcagcaatactaaaagggggtggctatcaagctggaaaagtggatgggtttagagacaaggaattttatacaggttcaggccttcttaatcaagaagtaatacgctactcctgtccggggattgatccgccgagtgtattattgatcgtatgatctgggtgaaaatcgtgcccctagaggcacccggacccctccttatataggagaaggagtccgtattacaaaatacagtccatatccctaacggaatatgtagttacagataaaatacaatcgtaaccaactaggatctcagatatttccttgacatacaagtttggaatttaacccgagtccttttaaatatattctatctatacatgacaccccatacccagtcagactatacatgccgtgtaggtatggggtatccataaactccacaacgctagagaatgtaaatctacctaggcatcgatcatatctacacgggaaaaaaatcaggttgtgctttctttctcttctcccacatcgcttcgttcttacgagggtttgaattggttcactagaaaaatatcggagggagaactgccgacatggtcgaggattgaagcggtgatgaggtcagccggtcaatggcatggtgaagcgcatctgctaagattccatttacgcagttgattagtgatttacgtagctcacaatttcattcatataagagactagatgagttctcctcctctattcttcttcgagggtttgaataggtgcactcgcaaggagacacggtcatcatggttgagcatttttataatctacagctctgataaaaaacctataggaggcaaaggcgaacatatctctggatatttgtgttgggatacgcgtaggctacaatagcataaatcaaaattttctatcgcgtaaaccaggaaccatgcaagtattagatcatagatcgttaccactcgacgcgctgcgcagcggaagaagacgctgcaaagtcgaaggaactctcgcgaagtagcgcgcgtcgatgtagaggaagtagtcgatcgcaccggctcgaccttctcctcctcgtgcgttctcctcaccgtactcccacaccgatcagcaccgcaaaccagtggcgcctctaccggtatccacacgtacagggacacagaacgccgcacggagatgtgctagcacccgcgcgcggctagggttttgtgtggggagggaagtgacggcttaggtttctcacgtgatgcaatatctccgtcgttcgcaccccttacgaatatataggatccatcactcgggcctccaaggcctgtaggactcctattcggatccctatccgaattaagcttatattggatctccatccaatcgccttattccggcccattaagcgtgcgaccctgtaggttcatgtatactcggctgtaaaccaaaaactccttttcggtccacacatcaacagcggcccctagcagaacgtattgacccaccggacatacataatgatcatatcgactgaacctgtagtgtatacttgtatgaacccatttgcctcacgatatcgattaagctcaaggctagatatgtgacatcctctaatagctcaatcattcactcgaacctgttaatagattatataacttgtgattgactcctcattcacctttcgcatggccatgcacttccataatctacaacatcgaggggcccagagatatctctccataggaggggcaaatcccatcttaattattcatatcccactgcatgtttcatagcatacccgaaaactacttttataactacccaattacggagtagcgtttagcagtccctaagtaagctactacaaatgttgagaaccatgataatctcaggtctaaggattcaacaccaacactaaatgagatcactgatgacacaacacatatggctcttgcagtgtctcatgttgggtctatccaacaacatgttcaccaacatgtgtccacattattaatttggtatctctataccatgatccatgagacatgatcatcaattaatacatgtgctgataatataaacatatttattccacatatgatatttgatcagggatcctttagaaatagtaacaaacaacataaagagtctcatgaaagaatcacatattcattaaccaataaggagttatctatttcaaggaacaatgtcggataaatatgtaaacatagtatgtgatacaatcatctctatgattgcctctagggcatatcactaacagtctcccacttgcactagagtcaatcatgaatgtatcttatacccattgccctagtgtgtgcctcatgcttagggtgagggagtggctttgtcaacggatctgcaacattcaaatccgtatgtattttgcatatcttcacatctcctctacccactatcttgcgaatgaggtgataccgccgtaaaatgtgtttggacttttgatgcgatctagggtccttggcttgtgcaatggcaccactattatcgaatagaggtccatagggctagaagcactagtcatcacacctagttaagaaacaaatttctttatccaaacagcatcctttgctgcttcagaggcggcaatatattcggcttctgttgtagaatcagccactgtatcttgcttggaactcttccaactcacaacgcctccattgaggcagaacacaaatccagaccgcgatctaaaatcatctttgtcggtttggaagcttgcatcagtgtaaccatttacaacgagctcttcctgtcctccatagactaggaacatatcctcagttcttctcaagtacttcaagatattctttacagctatccagtgactctcacctggatctgattggtatcggtttgttgcactaagtgcatatgaaacatctggacatgtacatagcatagcatacatgatggatccgattgccgaggcatatggaatcacactcatcttgtttcgctcatcagtcgtttgaggacactgattcttgccaagattaatgtcatgtgacatcggtaagaaacctttcttagaatcttgcatgttgaacctcttcaacaccttgtcaatgtatgtactctggcttaatccaattagcctctttgatctatctctatagatccttatgcccagaatatatgctgcttcccctaagtctttcattgaaaaactatttttcaacaatgtcttaacggattcaagaataggaatatcattcccaatcaataatatgtcatctacatataggattagaaacaccagtgcgcttccactaatcttcttgtatacacaaggctcttgttcgtttttgaaaaagcctaacaccttgactacttcatcaaaacgaatattccaactccgagatgcttgcttcaacccatgaatggatttctgcaattagcatatctttttagttgattgtggatcaacaaaacctttgggttgtgtcatgtacatatcctcatcgagatttccattgaggaaagctattttgacattcatttgccatatctcaaagtcgaaataggcagcaatcgctaaaacaatccgaatatattttagcatggcgactggcgagaaagtttcatcataatcaacaccttgaatttgtctgaaacctttcgccaccaatcttgcctggtagatgtgaacatttccatctacatatgtctttttcttaaagacctatttgcactcaatggcttttacaccatcaggtggatcaaccaagttccaaacttgattgacatgcatggattctatttcggatttcatggctccaagccatttctcaaagtttggtcccaccattgcttcctcataggtagtaggttcatcgttgtctaacaacaatatatcacgttgtcctgtagttaacaatgcatacctcgcaggtgtacgccgtatcctttcggaccttcgtgaagcccgtgcttccacaactggttcaacaacaacttgttcaacctgttgaacaacatcttgctcatcttgttgtggttgtgtggacgttgaaccgttttctggtgtttcatgaatttcttcaagtcgcaccatgctcccactatcctttcttgaaataaactctttttccaaaaaaacaccgtgtcaggcgacaaacactttgcccttttcccgattataaaaataatatcctttcgtttccttaggataccccacaaagaagcatttatctgatttaggtgtgagtttgtccgattgcaaacgttttacatagacctcacagccccaaatcttaaggaaagacaaactgggacgcttccctatccatatctcatatggtgtcttatccactgataaccccaaaagcttaccgacagatcagtttggctcattattgatcgcaccatgtccaacaatgtacgattcctccgttcagacaccccattccactaaggcgttcctggcggagtgagttgtggaacaattccacactcctttagatgattaccaaattcaagtctcaggtactctccaccatgatcagatcgtagatacttgattgtcttgcccaaatga

SEQ ID NO: 8946 - DNA, 5348 bp, Oryza sativa
tgaacccctatattattatctccttgtactcccttgcattaatcatgcattctccggtgtgtcttgctgagtactgtggttgtactcattcttgctctatctttctcccctcttcagtaagagaagctttggagaagatgtcttaggtggagtcctggcttataccccagttgagcgcctgtgaagatggagccgtaggcccgctagtccgctgctgtttatttttgattgtcaggcctgaagtgcctttgtaataatgtaaatattatcgatataataaagatgtgtcctttatatcatgtttgtgtggtgtaccccggcttttcctgggacggggattaatacactggcgttcgggaaaaggcaattttcccggtcgcgacaagatggtatcagagccatctcgactgtaggataagccaagtggataaaacctaaggacatattttataaataaaactatttgcgaaagttccttttttctccttcccttaatgctatttgcaaaaggtttactcccttcttccttcttcggatttcaactagtactagttggtcaggtcagtgaagaagaagacatcgtcagttgtttgtcgaaactccagaaggctgttggatccgtcagcgcagcaaaggaagcagtgaagccagatgtgaagcaagagtgaagatcttggagaacccgtcgcagaacctaagccaccctctagggtagagtcgttagttgtgtgtttccttgcttgtgtgtgtagcgcgtggtttgcatcagtgggttgtgatgtaaccatgctaggttgtttgcttaatcaacttgcagaataagcctaacatacatcataacagcaaaagacttagatctgttaaggtcctatccttagtttctaatctgtctctcccctttgttttccctctctccctctccaaacctttgcaacagatggctgacaatgagaaaggcaataaggttagaagtcaggacattggtacctcaagctcccgagtgaatgaagcaccagacaccagttgtgtgacactggtccaacacctgattaaccagaaccgattgcttatagagatactacagcagcatcagacgccaattctgaacctgagtcaaatacaacctcaagtgcagttggaggcagtccaagcactcacaccacaagtcagcatgccgccagcatcccgaaggacccatggtgacgtgccacatgttgacccaaaagaagcaagtaacatttgctttatgtgtgatgagcaagggcactatgcaagggagcgtcctcagcagaaaagaaaaacaccaatgcgaaccgaagatgaagtccgtaagatgatcattaccagcacagaatggcctccaccaggaatgacaagacgtcagagaagaaataccttccgaggtgcaccacagttgacagagcatcttttagctaatggaggtagagtgtctgatagtgaagattcagatcaagtctcctcagatgatgaagatgaaatggaacgtaaggcatgctctcgttgtggagaaatcggtcatgtcgccagctcgtgtgccactatatgcgttcattgcgaggaagaccatccacccgacaggtgtccaacgagcaggatcacttgtttcttttgtgaaggaactgatcatgtaccaaaagattgtcaattcagttttctgctgacgaagaagatggctaaccaacccgccagttccaacggagagaagcatcaaggcaacaccaatcctcgccaagattacagtttcagcctaactccagtgccaggacagaggaatcaaaatgagaaaagaaaatgccgagtccgggaagatatctgttgcttcaattgtcaaggaatgggtcatttcgccgacaagtgcccaaaaccgagaaacatagctgccagcacgtcagtccacgcaactccctgcaatcggaagcttgctcctcagcgaattgtcatccatgcatcccgaagcagtcctatagcccgcgttgcaacagctccaactccagcgagtgcattaccacagccccagccatcagttgacaagacagaggccagtatcggcattgtacctttggatgttccagcacagcagccaagaaatcaagtacaggatgaagaacccaagcgtaagaaagttatttacaacggtagtacctgttaaggaagcagacgtgccaatcgccaagtggtcactggagcaaatgcagtacctgttaagcctagcgctagtcagaagcaaccataatactcttgtatcagtaatcatatacttatgttttatagttgttccccgtcaatcatgtaataacagagaaacatgagattatgaaggagtttgataagtttatgaaggatccatgttaagatcgcaagtgcggtgagttgtgtacactttgttgctgattagggagacccagggtctcatctccgtaagctcataatctattatgaatcaaataacctcgcgattgatggcgaagaaaatcaagtgatcaaccaaagagacatttgtttggactaagagtttcagatgtgtcttcttcggatcaaaggcatgcacccgttgtggagaaattggacacgttgctagcatgtgtctcacactctgcactccctatgaagaagaccatccaccaggggagtgtcccactcgcaaggtgacatgttttctgtgcgaaggagcaaaccgtgggcccaaggattgccaactcagtgtgttgttgaccaagaccgcagaaatccaacgaacaaccctacgattgtctcgtcagctagtcagctccaacaacaacatcgatgatatcatccacagcaccaatgctcctcttgctccacctaactctgcaataaatcatggcaataataccttcagcattaaccattctctgcaccgacagcctcagcaaggaattgtcgtcgatggaaaaagttgtgtctctccccgacctactccaggccaagcaaagggcaatcaacctccggagggcgataccaagcagaagaccgtcatccgcttcaaacagcaatcagaaggaagcttctcctgtgaatgatagcaatatgcagtcctatcacataatcacagaaccaatcaaggatgatgcagtcactagaacaatgccagctatatctctccagaatcaaaatgagcagccatgtttgtggttttcagttcgctacttatcatggtgtaatcgaaagtttgcagcaatcatgtaatacataaatatattcatgtctataaacagtgagcttgctatgcttatggatgattcatgttgaggatacaatgtaccgatgttaagcaccgtccctttttgtttaaggcagtgcctcgtattcatgtaatgagggagaaatgtgtaatacagacaagttccatgggattcttttggaagagatcggaaaagatgtttggttactgggaaaagaagtaggtcgaaaggtgattgataaaggataacgagaaccatgatttgtgtcactcgaggaagactcccgatagcaaacaaccctacaacagttgccctgtcattaaagtaggtgaattcacgagtaagagagatgaccgcaggtagaagtacttctatggggacaaggatggaaacttttgtgacatgaccaagaagtcaagaagtaaaacctgaacagtggaatctaaagctcggttcaaccttgggctttgtatcagatgctactagaataaaagcacttgcaatagtatcgctcaacgcattttcctagcaatcgatccatcgagaaagaacacatcaaggctgaaggtgcacaggaatacgttgaatgctaaatgatgacaacatgaagagaatagcggaaagtaaactgaacataaagaaagtgaatccgagctgcttgttcgtgagagccattcccagttatagaaccagtgatatgttcgaagatagtctacagaggtcagattaaaatcacctctaacaacgaagcttcagatctggcaggatcacgatcagacaataacaagtccagcagcaaagtcattcgggaagacgtcaaagcatgtcaagcgggataaattggttctcttgggaagcataacttatagttagagtggttgaccctggaatcgaatagcagaagtagctagcacccggagaccaggaaagctaatatgaggcagttaggggcaagttgccaaacatgatatcctagtaatgacaaagctgatgtcgacgcatgtcacgaaggtggtaactggtatgaggttgacgccaaagatatgaatgataagaagttctagaactgaagccccatcctcaaccaccgcagcctagtctgagtcagttaaaggtgcaaccagggacaagtcgggtgaagagaagatttcttctgcaacaggagatcgagccaagcagtccagagcggaagaagtcagacaagaagagaagaccgcccaacctatcttcttgctagcctcctcgaatctcggggacgagattcttgtaaggggggtggatttgtcacgtcctgataaattcatcccgaaattaaaaatcattctctaaaaggaataatagaattagttaaaattcgaaaagaaattggtaaacactaaaatacgtacaagaaaaattcaaatgtggcccggagaatttttgttaaattctccttggtctaaaaggagccctcaaattttagtggaattttcagagcacaaataataattgagaagaaataaacaaagttgaaaaggtttataaaaagaaaaatctctaaaagtcttcttttccccccttcctctcttgggccggctcggcccaactctccctccctctctctcctctccccgcggcccatcggcctcctccccgcgcgcgcgccgctgacaggcgggcccgcccgccgccctcgctgacgggtggggcccacctgtcatcgccttcctcccgccgctcccgccgctcgcccgtgccctagcgccgccgccgccgcagattccgccgcatcccaccgtccctgcgcgccataatgaggggggaatcattccccgcgattccctctcccgtttcccccgtttttccctctctctctccctcggattcgtccgatttcattcccgaaaccctcgccggcgcaatcaatggcggccgagatctccgcggccgattcctccccctccggccgttctctctctctcccggcgctatataagcgttccccgtgctctcctcctccgttttcgccactcgccgactatcctccccgtcggaatcgagcccgcaccgtcgcaccttctctccgccgtcgccgccgagctccagatcgccgccgtcgtcgctccggacctcctccccactcgg

SEQ ID NO: 8947 - DNA, 17591 bp, Oryza sativa
cagtagagttttctgcggagcaacgactcgcggcttaacgctccggaagaaagcttttggattttctttaaagttttccggcaagttgaaaccagtcatgcactactctgttttcacaacaaaaagtgaaaacaaccaaggttagcctgcaaaggaaatgattatacagaggtaaatataaagtattagttcaagtaatctctattatgaatcttccccgccaacggcgccagaattgcttgttggtatttcttaacggcattacaagaaatataattcccaacaatggcgcagaaatatttctggtatattatggttacagagttcatccgcaagcgcatggatataccattgtagcatttcaccttagagtattccaatggtatcgtatttattttatcccgtgggaagatcatgtagagagaactcaactaataatttatatattacttgtgataatcatattttaagcaggggttaagataatcaaagggtagagtgacacacaagcattaactactcatcctcataatatatcatctaagctaagtggaaagaaaagagaaaggaaatctattcctatacgtctaatatatatagtatacatacattctagttaactgatatactagctaataccctttatccgatgccctcctggtacttcaagaaggcacccctgactgccgagttccttacgacagcccgtcatgaccatacaaccggggctaaatacggaggaataccctccccaggaaattaacttaggattatatataggcgcggaggaatacccgtattgagctgtcgccatcagcggcccacctctcatccgcaatatataaccccaaataatgatatcccgtaatctagacaccacgtctaaactacccgatactactctaatatcatcgtcatgaccactctaatatcatcgtcatgacctagagtaattgcataagcaaacactatatccgcaccaaagcatctcctagataagctagccgtatatttagtataataagaacataatataaagtaggtactcatatactcggagaatatttcaataccataaatatatatagaagagtattctaataaaagtacaaagcatacaaaagagaagagaaaagctactagagccatacccgaactcttccgaaggcttacggaatcctgactcctattctatttctattccaccagctaggtactactaaactaaacttaagagaaatgagagagctattgcttgaggtgtgtgttgaagttaagagagtgaagcctttatctagaggtggttatgacggttgtggaagaggaattgtccgaagtaccctccaaccgtcattggggtgcaatcttggacgtccatgccaaaccctggcctcaacagtggagatgggggttcgcccgaactccctggttcggccgaaccatgggctggcccaaaccagcccatcttcgcctggcgaattcctctattgcttcacttcgtagacttgtgaattttggcctaattcatcgtgtcaattctgagttcttttcccattcatacataagtctggttctcgacattgtccgattgatttatcgtctatgttgatgccgattctcctccactttagtgtcattctctacaaaggattaatatacctaatactagtggaatattattattctaacaaacatatgcattgcaagcatcactagttctctcttaatttggtaatattgatggtcgaaactgatcgacaacgaccgtcaacagtggttgcggtatgactaccttaattaggagttgaattgttttctttgtagttgttttaattcagattagacaattgcacttaaattataatgtaataaagcttaggttttttagcagtctatattctttcctttccccctttttctgtccatccccattcagatggtgaacacaaggaatggcgaccatgcaacaggtgatggtagcagcagtgaggaatagactggaggagccaataccagtggtgcaactagcaatggtccacctccaccgctagagaattcaacaatcgctcaggtgttggccaattagacgcatatcatacaatgatatgcagcagatgcaaaaacaacaccaatatatgcaatagcagatgatgcaccatcaggcactgcagcagctgaatcagcagtttggtccaccaccaccacattagtccaaactactttagtttctccatgtcaggccacccactttctccagcaccatcaacccaatggaagccaatgactggcttcatgccattgagaagaagatgaacctcctccggtggaacgactaggagaaggttgtctttgccacgtacaaacttcaaggtcccgcttctgcttggtgggacaactacatggtcacccgctcagctgtgacatatgtcacttgggcggaattttgccgtagcttcaggaaggcataggttcccgatgggactgtagcacaaaataagagggagttccatgcgcttcattagggaaacaagatagctatagagtacctacacgagttcaaccgcctattattatttattacgacgacagaataatccgcaagcgcacaaatacagtcgtagccttcaccccaagagtattccaggatatagtatccacaggcaacgtatgtgtataatctaagaacgagattcttccaagggaaataactatatggtaggccaagaatagagaggattcctatgggttaattatcttaatcaagttaagataaaactctatcaattgcttcaagcatcggcttacccctggtctgccaaggagactctggctatggctctatgatgtacccgaatactgtcaccacctgttaactacctctacaacccgtggagcacacatcaaacaaaggtaatctctagcctagacatcgtgtctgtgctattgattactatcctaatcccaacgtcacagagaagattaaggtagtctacctaagcagagtgataaaactaaataaaattaaataccaaaggagatcacaaatacttacttataaaagaagcatccatcgaggtacaagatcggagggagtaccggcatcttcaggactccggcactcctccagaactcccctagaagaatgccaacatatccggcacttctccggaaccccggagagatgtctgaaatttggtgcactcctttcggagcttccccattctattcctacccttaaagagcaatgcctatgtatataagtgaagttgtagtctgcttgttggtgcaaatttgaagtgaggagtagaggggctacttataatgtggatacgacttgagagagtggagatgctatggaaatattctcctccaactcctctcaaacctccacatgtcctccagccgtcattggatggcagtttcttgcgttgagccttgtgccaccgacttcgggatagtgataactgtcaccacatggaagctgagcacgagggcagccattgttgacagtcattatagaccaatttcgaccgttaatacttccggaaataatggagaactagcaatgcttggatgcatatttacttagaaataatccaagtccacttgtacttggcaaagtatttgaatacagtagattacttcataaatggagaaatgatggaaattcaccgttcaaccaatcagagcccaacatgtggcagacatggatggatggatccacaaactcattagaacatcttcaaatgggcccaaccaccatgccactgggccaaggagtaaaatgtcagggcccaagaggaagtccacagccaggggggctggccaggggtcggcggacctctaggttctgctgaccccggcatgtcccggcccagccacaaccggctattacggtactactgacttttctatagtggttgtgaccggtattgtcgctcctaaccgtcattgatcagctataaaaggtcctcacctcctccatttcaacacacaccatgaatgattcaggtgaagaagctctctagtttacttactttgctccagtgctagtagaaattagaattataatagtcttctctagttcttcaagtcttccggagatttcgggtatggatctagtatctgttccctctcttgtaagactttatccgataatgaaatacttttctttatctagttttggtcctttactatacttgcataattattcgagtacgaactttagctcatacttgtctcgtattaaatatgtagttagcttaccagagatatgcaatagtattgtctaagtgtctatttatatagttgctctatgtcatctgtagagatgtagagtaatatttagtattgtaagcgtggtgcttagattattagatatcattaagtggtgctatatgccacggatctgtagaggtaggccgctgatggtgacagctcagtatgggtattcctccacgtgcgtaggtagggctaagagaggttcttgctgtgggtactcctccgtatctttaaccggttggatagccatgacggattgtcgtaaggaacccgacaatatggggcggtttctcgatataccagggggggcatagttagggagttattagccacagagttgtacaatagtaagtgtatactaaatgactatatactagaagtgcataaatgatgttgttctaatttcttctctatttagcctagacttataatttagtgagagtattctaaactgaaccttttatgtttcaaatctatccttatcctcaattgattaatccctgcataagactttgatctacataagtatgataagaatttatagcatattactatcctaccatatcttcccttgggattaaataaatacgatatcttggacgtacttccgggtgaaatgctatagcggtatatccatgtgcttgcggaattatttctttaacccatacgattaccgtttaatatttctgacaacattgcttgggactaagttcctagtaatgttgttaagaaatatcaacagccatccctagttcggccaaacctagtcgagccgcctcgtgccaccttgcacctgggtcactgcctagtgggtcttcatgatggtgtacggtggatggccttaaatatgttggttttactctgatttttgggccatccaatctgtgtattcacgtctgattagtatatttcatcgcatgtcagacggttttcctccataattcacatgcatacaaatattcaccaagacttgtggaactagttagtaatatccactacctctaagtttagtattcaattttatattctttaattttctttcttgcaggaattggcagtcggatttgacacttaaggatctacaaacatcgcctcacacgctactctcctgttgatgtgcgcaccgatgccgtgaggcaagagaagtttatgtttggtcttaatgatgaactaaccaaccaggtcatctatggagattatactgattttgagaagctatttgacaagttgatttgtcaggaggatcagcgcaaccagatggatcgcaaaagaaagggagcttagttcagggcgcgtcaggggaacaaccaaaagcctcgcttcatgactgataaatttttaagtttagatcagccatgcaaagatgataattcttctaattttagtaaaattttaggcttgatagaaattgaatctgtgatgtgttaatttgtggatgaacaattgaaattccggcacgaagcagtgaactggctgttgacggctgttaaataccaaattctcgccgtcaatacctacataaaactgaaagtataaaatatctgaaagtataaaatatccaaaatagtggtaggatatatttctaataatttccacgagtgttggtgtatatttagatgtaggtgacaaactacctaagttgagaagaaatatacatgaaggaggagaatcaaactcatattcaaacttatggagtttcggaccaaaaacccaattaaacacctccaaatgggcccaaccaccgtaccaatagaatgaggtacccaatattagtgctcaggaggaaaaacggggccaacggagccggccagggttcagcccaaccctgacagaggccactagcccaggcccaagttgagttcggtagcaaccgctccccaatgtgggtttctaccgttttcggctctccaactgtcatccaaatagacgcttggcttgaggagagtgaagatgctcatatgattccatggagggtctccacactccgaaggcacctccaccaataaataccactcctcatccttcattccaactcacaccaagatgtagcttgagctgaattataagaggctctttgtatgatttattttacacatagaatagggagagtatggtagaagaaatcggacgagttctggagttgtcggtaatctcctcttactttttgtacattgttaattactctggtttaatagaattatcttcctgagtaattaagatttacttcatgtgaataattcttggttattttctaattagcatgcgggatcattgttcactaaagtccattaatttattgtgatcgctttagaatttagctagcactaaagtagttattaattgaatagacgcagtatctgggtaattaatttccggtgattccttcgtatcccacagtaggtttgagatcggtgtagaggtggtgatagccctcaagtacactaaagtcctccatgtacgggtatgtagtagagtgacatttgggagtagcgagctggccagtgcctgaagtatcgcattaggattaaactgagctttctgtagacaccgtttctcactaggaaatcatctctaccctttgcctacattttctttgtgtccttggatgaacctgaagaggaactgaacacacacgttccctatggaaatagataccttggaatactgccagttgaagtgctgcatcggtatcttccgtgcacttgcagattttatctgtgacattaagaaataccaacactggcttaatgtgttcttttaaaagtaaatctcacttaaccctaggtactgtgatctaagttgcacaaaaccaaactattgatcattttactttgatctatccttttgagttctacaattacatcttaaattgataaatttatgagtttttttaatccatcatagaaattttacatggatgtaactaaatcattttaaaattttgaggagtatgtaaaattggttaatgatgtggtttcgtgaaaattggttaatgatgtggatttgtgtcgtgcaccaaaatccctatgattttgtgtaactgttgacagtcgttacagacaaattttgaccgtcaatataactaaaataatggagaattagctatgcttacaatgcatatttgttttcaaataatatagttccacttatacttggagaacaatatgttgcaggaatttatcaaataaaataaagagaaagtggagaaaacctcactcctaagcaagcttatggatgagagggctcagaagccaggtgtaaccgtcctggaaaccgccttaactacaaaaccgtcaataggacccacctgtcaaagactgtaccgaagctggaggcctgttgggctagcccaggtttcggccgaactggcggtgcccaatcagcctggccctccacgtgtacgatccggatgcactcttaatgacggttgtgagggtaaaatgcacaattcgcattggtacaaccgtcataccggccctataaaaggaggagctcattcactctctcaacacactcaagttagctcaaattcctcttcatactttagtattagtattttagtgctaagtggagtagaatagaatagtattcggagtcctcggagtcttcgaaagagtttcggtatggctctagcagctcttgtattcttttctgtaatactttcaattttaatgaaatattcttctttatatatcttcggtactttgtttagtctgagtactgttcttaccttatatctgtgttgtaccgattttgtgggtagccatccagagaggtgcaatggtgcgggtttaatgtctgatttatcagtttctatgtcatgtgcacgggtgtagagtagtatttagtaatgtaagcacggtacttagattattaaatatcattaattagggatatatgctgcgggatagtagaggtgggcctctgatggtgacagctcaatgcaggtattcctccacgttagtacatattcctaagagaaattcctggggagggtactactccgtatttagccccggttggacggtcatgataggttgtcgtaaggaactcggcaacccggggtggtctctcgaaacaccaggagggcactgttagggggtattggctacatagttgtatactagcagatgtaaactaagattgagtgtatagaagtataggaattgattgcttttctatttcttcttccacatagtgtaggattgtttaatgagagatatgagttctttgcttcgtgtcactctaccgttatgaatatatcaacccctgcttagactctgatcatacaagtagcatatatacattattagcatagttctctcttacaatgttcccttggcattaaataaatacgataccttggaatactcccaggtgaaatgctacaatggtatatccgtgcgcttgccgattccttctataaccatatatatactaggaccatttctggcgtcattgctgggaattcatatttctagtaatgtcgttaagaaataccaacaaggaccaaaactatataaagaagaatattttattactggataaagtcttacaagggccatacccgaattctccggagactcgaagaactaaggaagactattctaattctaatcctactagcactagagcaaagtgagtaaactaagagaactttttcttcttgaatccttcttggtgtgtgttaaaatgaaggaggggaggtcctattatagcttgagaatgacggttgggggcaccaaaaccggtacaaccgtcattgggaggtcggtagtaaccgtcattggcttgggccaaacaagaccctgctgaagcgaacaagataggttcaatctactcaaatcgtgtttgctcagtacaggtattcctccacgttagtacatattcctaagacaaatttctggggagggtactcctccgtatttagccccggttggacggtcatgataggttgtcgtaaggaactcagcaacccggggtggtctctcgaagtaccaggagggcactgttagggggtattggccacacgattgtatactagcagatgtaaactaggatttgagtgtatactagaagtataggaattgaatgctttctaattcttcttccacttagttagaattactttattatgaggatttgattagctttgcttcgtgtcattctacccctatatgaaaattaacccctgcttaggctttgacaattacaagtaacatatgtataaagtgtattagcatagtccactcttattatcttcccttgggattaaaaatacaataccgtggaatacttccgggtaaaatgctacaatggtatatccgtgcgcttgcggattacttctgtaaccataaatataccaggacaatttctggcgccattgctgagaatgaatatttctagtaatgtcgttaagaaataccaacagtaacttagatataattctataaaatttaccttttctcacagaaatcacatatgtgccgatttactcactactaccgaatcaatttttcagatgagaccgcttttaggttgtaggcagactataattatcaccgtatgcaaaaatcgctccccctcggatcgttcaaggacagcttacgaaaatcaattttcgcatccgggtgtcttaacaggtccaccctcatcaaaaaaatacccctctctcttggcactcttttttctcccctcccctctctctctctctcccccacttcaagtctcccctccactcaagtccggcatctctccctctcctctccccacactactacatataccctttttccaaatagtcaaaacacatttttgcaggcaagcaaagcgctcacccactcgtagatgtctatgaagattagtaattttcgaggcgcctagctgaaccgcatgcgaaaatgaattttgcaaaaaacaaaatttggcaaaaaaattccgaaaatatcaaaatctagaaaccctagccaacccaaccatactgctgtcgtcggtgtcactatcaacgtcaccacagactaaagcacgcttctctgcttccctcgctggagtggatggactggtctttgctgctcagcgacgtcctacttgccatcgtcattgtcgccatcgcaaccgaactcgttgcctctgctcccaccgtccccagcttgactggatgcatatgaagctcccaagggcgccggtggtggatctggccctcttgaggccgccgccgccggatggacgatggagaaggagaggcgagggaggccagcccctcccgagttcaacggcagtggatccgcacctcttgaggccgcatccgctagatcgatgatggaaatggagaagctagggaggcctgctgctcatctgaggctagtggaggcatatctgaccctcctatcaccagtaacggtagatccatcgaggccgatggtcacccctgtcaccaacattaacatgtgcctcactgctgaactcacctctacatcgcactgtcgtcgacgccgagcttctgccgagagagagatagaggaggctgaggtgagggagataaggtgaagaagaaaggaagtggaggagaggatagtagaggacgaggatgaggaaaggacttatgcattttaaggaggagctcgacctggagggctagtggtaggtgggcctcttaacaggcctgcccgcaaaaatatgtctatttcgcagttaggcatgttaagatgcccgcccgcgaaaattgatttctgcatgcggtccttgaagcgtcctcaggggagcgatctttgcatgtgagggcaattatggtctgcctacaacttagaggggttctcgttaggtaaaatcgattttgtagtagtgccacccccggcaacggcggtctcggatgagagcggcgatggtgggtccagcgggcaagggcggcagtctcaagcgagagctcgggtggtggcggtggcttgcaaccatgcgaatcccgtcgacggcggcaacagtagtgccggatccagcacctcctccccctcccgtgctgacctcgccgcctctccaatgacgatgacggtggcagcagcagcgacgatagtggatccaggcacgatgacgacgatagtcgatccaggcgtcgcatcggtgatacattctagggttttgattttttttttttttttttttttttttttttttgcagttggatggcttaagtgcccatatgtgaatgccctacccgtatacaaaattctgatactttcacagacacctgggtgtaggtgaaccacccacccgctgcaaaattgattttgactatacgaataaatcgttgacgtagtagtagtgagttaatactgttgtgccgcttattgagtaccggttgggaagactggtagagagttttccaaccggcattgcttacctcttttttgggtagtgctagcttggtcgaggaggttttgagaaatggtttcttcaccgtggtaaataacaaatgaaacagaaaatacaacaggacacagacatatcattgctactatctgacctcgttatgataaccgtagcccatctagcacgtcgcaacaagactccaacgtattatgaccatgcacatcttggtttgcaccatcctagctatagcacggctcatacaccaactgtctagaaacttccatgccttatgggcgcgcatcactgcataaatatcttgtctgctgtcatctatgaatatctactaatgtgtcatcaaaatatagtaatttttttctacgaatttgaatatagacatgaccaagtcgtagaaaaaataattagattgcataatcttttatgcagtatcatacaaacatgttaatttgattaatcgctaaatttgccgagtcacaccgtatgtctctaatatatggaatccttgtataacaaaaactaagccattgcataactatgagaaatgaattaaccaaattatacaataaattgaaacccatctaagctttggatgtacgcatcaaactaaaatactatatgtatattagtagcataattgatatgttatgacttccatttataaattaactttcgatctcttccgataatgtaagaagtgaaaatttctagaatttgatacactggaaaagagactaattcaacatacatctcaactagtcatagcaaaaccacaagtgccacagagaataaaggcattttataaaatacctatctgtttgtaaaggcgatttatataagccacatgtgattttataatacccctacaatgttaaagaggcattagaaaaaaaatgcctctacagtattagttaaacacctctaggttttttccttgtagtgattgggaaagataaaattatttaactgtgagagatgacatctatttatttgagtaagagcaaggatagtagtacactataagccaactatgaacagttggaaatattggttataattcgacatattttaatccataaaaacaagataataaatatgacatgtgaataacgaaatggtctagtgatagtgctaatcatgaacatgctaaaaacagtaatagtatcatctaagaacatgtttaacactaagaagaaaataatgatatacccagagaatgttctagaggatgatgagttattggtattgccaccgttgattttgaccttctcaatttagcctcgtccagtagcgttgtttccttctcatttagtagcatcggtgccggtgctagacattgtgatgtagaggaagaagaccttgacgaagagaatgcagtgccaagagcagtcgcgcgtagacgcgctcccgaaaaccttgatcgccctactcaggcgagcggagtcccggaggattgctcgtcccaagcactagtgcgcacaagtgctcgaaaccggggaagtagaggcttagcacaagtggggttcagtaacaagcaatctggcgatctaaccgatcacaggattaactcggcaaagtagcgatctaatctggcgacgctgtactttgatctaaacaaaacccaattgttcttggcggcggctaaaggtataagaagagggggagaacaaccacaggggtgctggggtcgtgctctaaccctagaacgcgcccctaatgggcccaacttgatacacagcccattgggcccaatgaggtgacgcagcaccgtggacagaaaaggactcagtagtaaaacgatgattatggccgctccaaatcagatatggacatgggttgttccatttgaaactagacttgataagctttccatgaagcaattgcacgcccaaattagagttcgcacgaagtcgtggcggccatcagaagttggcactgtgctgcagtccgagtccaccccacgcaaatcctctccccgttggatcctctccatcattcctgagtaaaacaagagtgcacacgtctccgtggtataaagaagaggatgagttgagcttgtggaggcggggatgtatcgatggtgttgatgtcctcatcactctctctctctctatcctcttttcttctacgccgccgcctatgcacggtggccgatccggccctcgcctcctccgccgccaccactctgaccccaagaggctcatcgcctcgctctccggctcgggcctcgaaccgacctcaccgcgcctcctcgacgccgtcctccgccgctgcggcgccgcctccgcgctcgcactccacttcttccactagtgctccctgtcgctgccgccgccagagccgctcccttcctccctcgcactcctcgccaagtcctttctcccgcaccttcgccgcaccatccccttccctcctcgcctcactcccgcccagctcctctccccgtccctcctctcccccgtcctccgccgcctcccgcccccgcgcctcctccccttcgcgacctctctcgctcttcctctccctcctcgagtccctcaccaagaccggccatgtcgctgccgccgagcaactcgtcgaggagctctagcccaggctcccgctctcgctccgccactacaccgcgctactctacgggtggtgccgcatgggcaagcttgatgaggccaagcacgtgctcgcccgcatgaaggcagcggaggttgcctcagacgtcgtcttcttcaacaccctcctcgctggcttcgttgccgacgggaggttcgaggacgcgttcgagctggcatggaagatggagcagcgtggctgcccgcccaccaccgccacctcgcctagccttcacgctgcctctggatctccgcgttgtgctcctcctcgctgtccatggccacctggagagagggggccggcgagcctcttccacaccaccaccgttgccaccaccgccacctcgccccgccttcgcattgccttcggatctccgtgcctagcccccgcgccgccaccaggagagagagtggggtgggcgcaggagaagaaggggagaagggtagaaggattggagaggggggatgacatatgggccccacatatcagtgggtcccacaatatattttttgtgtgaatgacaaatgggtcccacgtatatattttttaaattctaatgccacgtaagtgtcacgtgggacgaataccaagtcaacaccgccacgtcagcgccacatcaacaaaaccgctctccaaaaccactagatagaggagtcaaattgtactagttttagtagttcggggagtcgtcctatccggtttttcggttgaggggtatgaatcagattcgatgtatatttaagggagtcaaagtggactttttccaatttttttgacatatactcgtactacgcacatttcctgtgaggccttattcgagtgggtctcaatgttggcctacgtacgtacgggtgtgtgagcagggatagaggcccatcaaaataggcctaattaaactggatatataatatgattctggtaatcatgccactactagaaaactcattttcggcgtcgtaggggatcgattttcgcaggcgggcatgtaattcggagccaaaaccccgccggcaaaaaaagtacccagggtggagggggcggtccgcctgcgaagatcgatcttcgcaggcgccgcttatatggcccgcctgaaaagaagcccctatatagtcttcttcctccccgagccctgttcattctctctgaagtttctctctcctaaagtgacttaaatataggggggaggttttgaacttcaaatcttcgggggatttttctacggtacttcaaatcttcaaatctactcatttccacactaggtatgcaattttttaagcttttagaccttaatttgtgatggatttattcatgtaaaattgtgaaggaagagctccatgttttttaattttatttcttttgatatgttgatgttaaatgtatgtgtaatacttgatgcctcttgttgtagtggtttaatgtggtaacataaattctcaattttttttatttttgctatcacatccacctcctagttctagatctagatctagatctagatcttgtcatatatagagagaataaaatttttaatgtatatttattcggtgcaatcaaaaaatagttatagtattttgaaatatgccgatgatatgattttgttagattttcctaatgtactaatttggcatgtctgtgtaaaaaaaattgaaataaactttgattttttattaatttacacttaacctttagttaattagttttgaatagcgataagttttttcaataaaccctacaaatttggtattaattgtgcaaatattttacgtgtatttttttagagatatggaaagtcaggaatggatgtatcattggccgaggtttttgtctccatatagaaacgaagtgtctaaatttattggtattgccaatgcacacgctgagaagaacaatatgaggaagataatttatccatatgctgactgtaagaatgaaatagcctgggactttgacgatgcttttaaagtgaaggagtacttagtaactcgtggatttatgggcaagtacgaaatatagacacgtcatggcgaagaacaagtggacaggcctgaaaatgtagtttttttttttgactgaaagtactgccaggtctttgcccaacagtgtgattttcatttattgaaagaataattatagtaaaatttacacgaagaaacaaaagaaaatgaaaaaggtcctataaagtttgcaaccaattagaaacagattgcttcagtggatctttcattctgcaaagctgcagaagaatctcatttgtgaagagagatttccaagaatggaagaaaggctgaaaaatttctaaagatgagtccattatgctgtttccagatatgccatgcagccacgaagaaaatttccagaaaaccaggctggttggactgccatcttgcaaaagctattctttggtaaaattctagattaccattacatgaaattcccaaaaactgccaacaagctttgctaaatggacaattaaagaagagatgatccctggtttccctttggttgctgctgcacagtacacatgatagatcatcatcttgtttggcacagtgtcttctatccaacatatctcttgtattcaatctgtcccagaagaatagccaagcaaagacttttattttcattacacactcggtcttccaaatccagatgagaggtctgggtgcttgaatagaagcaaagttgaccttatagaatcttttgggggtaaaacagttgttattccagatgaagcaccataaatctccccttccttgttccagctgaaggtgtgtcagttcatcttgaagattgatgtattcacaataggcttgataagagagtggcagcatgaagaatcctccaaaggtctggcacacatagcttggactgaatcatctttgtacagagaggaggcaaaaagatgttgatattgctgacatttgaattgatcattccacagatctgtccagaaaagagctgtagtacctgtctttatgttgcatttggcaattcctctaaaaatctccaccagagcaataacatcttttaaccaaaaagatcctttgtttagaagatgagggactttagctgttaggtatgaattagtcacaagattgacctaggggatgtcagctgtggtgtagattttaacaagatgtttcatgagcagggcagcattttggacttttaggttaaccacacctaaccccccccccacttttcttttgggatacaaactctttcccatgaggccaaagattttctggtagattcagggttatttcctctccaaaggcaattccttcttgctgtatcgatagccttgatcacagagagaggtaatt

SEQ ID NO: 8948 - DNA, 21435 bp, Oryza sativa
ccctccctcgcccataaaagcactctcccgagccccctctttcgttttccctcattcgccgcgctctcccgtgcttcctatcgtcgccgcgccgctcgccccttacgccgccgcctaccgccgtctccggccgcgcgccaccgccgctaaagccgctaccgcgccgtgaagccgccgtcgtcgcgctcgcgggtgccgtccgctcctcggccgccgcttggttgccgccaatcacccccgaaaccccgtttccctcgctcgccggtgagctctcctttttcatccatctccggccggccactttggtcgttgcggtcgtcctctccacccctaatccctctcctcctttcctataggtgtcgcctccgcccgtccgcccctcctcgtcgccgtgtcaccgccgcctttcatcctccgctttggtcgccgtgctcgccggtgaggctcccctccgctccccttttttccctctctcccgtgtgcgccgccgtccttcgcgcgtgcgccgtcgccttcagccgctgccgccgcttttcgccccgtcatccgtcgcttcccacgccgccgattgccgtcgccggcgaccgtgcgcgtcgccgccggttgccatggccggccggccggttttgaagccgagccgagccgtgcctagccgccgccgtgccgtccgatcggcctcccggccgatccggaccgtcggtcccgtggaccggcggtggaccacccgcgtggtcccggtccacggtggaccggccaccttgtgccgctgacccatggggcccgcttgccggcgcctctctctcccctctcttgagccgctgacaagcggggcccgcctgtcggcgccgccccccccttggatgacgtcagccctgggctttattgcgcaataaagtgattaaggacttttctttattagtaaaaacacagtttatcttctaaaattcataagtaattcatccgagctccgtttaagtccattcaagtctcagtaaatcaagaaaaatgcaaagaatccattaaaaatggttttgttcctgtttctgtagtcttatagcatgttttgcttgtgtgctttgtttgtcgcgtaggtttcggccgtttcgtcgatccgcagtttctcgaagacgttgctgaggtctcatcagttcgagagcaaggcaagtcatgcaatacgtttgatcatattgtacccaatttacaaatatcccgcatttctattaaatgttgcattcttttacaatgtaacgtgggatgggtcctatttctcagccacatattggttaccctatgccattgataacttgggtatcaaaatgattagatgttggtttaggaaatgcttagccatgcttagttcaactagcacacaaatggggatcaccttattacatagactttgtctattggcatagctttagattggtgccaccgcaatggtgttagttaattaaaatacactgaatggtgggctgtgggtgcatggttttgctggtcgcacccatggcaattaaggatcggttcacgggaaaccctgggagacttaccgtgcttaccacaagcgggagtgggtaactgcttgatctgaagtatagctcgaccctttcctaggcaccggtggcgagggtgggcgtgacggagttgggtcggccggggtgtccggttgtccagctgccggattcaccgcggcgcaagaggggaccgcccactgccttttgaggggtgggggtgaaaccttagcgtggtgtggatggttaggggagggttatgtggagggtcttgtcacgatttccccctttgcagtatcatggtgatacttcggggcatgccgacatgtgtggaatcgtgtcttgtgggtacagttgtacacctctggccagagtaaaactattcgaatagccgtgcccacggttatgggcgatcaaccagattcaccgtgattagtctcacccctagtttagcttaatgaactggtgtagttcaggtggttggttgggcctgttgcaacgtggtgtagcgttggacagtgtttggttaatattgattaattactacaactgttttactgctttcaactactgcttttaaatgctagctttatgcaaaagaacctctagcctcctttggttatatcctgcatcatacctcctcttccggtatgacttgctgagtacagtgggtagtactcagtcttgctctcttttcccccaccccagagctgaagatcttcctagttggagctgttttgtcaaagttggtttcgtcgctgccgtcaaggattgcctgtggagtggagtcgcccgctgctgaagtcaagctttccggtttagctcgcttttatcttttccgctgcatttgcaatcttttccattttgtaagacgtggatctgtatgtcaacaattgtcgtttgtgtaccctggctggtcctggacagggatttaatgcacattcagcttagaaattctggttcgagaatttctgggcgtgacagtgtgccaattagaagttttaagagagaggatgaagaaaagatacatgaaaatgctttcggttgagcacccgaaccaggcccaaataccgggtgacctccccctgattccatcgctgtagcgtcgtctcatctgccgtgcctctgcatgcatgcatcataagattgtatcatgatctctcttccttctctctcctcctggatacatgtaaaacttttttaaactaaagtttaaataatttttatcttaagttactaatctgttttacgacctaagccaattgtttggtctgttgcaattaaatctttataacaaaatctcacatggctatattttattgtttttaactttttttttgtagtggatcttttataaatgttgcccatggtgttattgaatatttcaataagtatttgctcatgtttcacctggtcatttatagttgttgcatgtaaaatttcttttagatgtttcacgaagtatttttatgtttcaataattacaactcgatgtttcatacgtgatataaaaatattttaataaaaaagtgtttgaatatacattatatgtttcatatatggattttttttcatgttttactcgttgagacttaatgtttcgtaaggtaattgtcattgttgcatctatctcaaacattagttgaaaaatttgtaagtgatgaaattatgtttcataagagataaaacaatggtttttaggacatatatgtttttattaaaatattatcatgttatatcttcttataaagaataaattacaacgtacacaacggttttaagcggatcataaatcagatgctccctccatttcatattgtaagattttttttgacttttctctaagttaaatatggttttattaaatctaacattgaatatattttgattatatgtttaattggtgttggaaatgttgctatgttttgccataaacttgatcaaaattaaataaatttgatagcaaaaggtcaaaacatcttaggatatcaacaatgtttactaccaaccaaatgaaaaagagtatggtttagattagttgttactagttgttacgaaagctacaatggtaaaacaatagaagtgggtgtcaaacttgccccccccccccccataatccactagcaatacgagggggaaagagataaatcatattgtttatcctttattgctcggtaatagcactataacctgttatttgctagtatttcctagttctacaatgcttatagtttgattaaacctagtaaggcttcatttacttattgctttccttttgtactttctccgtttcaagttataagatattttgactttggtcaaaatcaaactgcttcaaatttgactaagtttatagacaaatatagtaatatttacattaccaaattagtttttattaaattaataattaaatatatttttataataaatttttcttggattgaaaatattactatttttttttctataaacttggtcaaattttaagtagtttgactttgaccaaagtaaaaacatcttgtaacacatattgtggacgtacttatgatatcaaacagatgaagtagtattctaggagaaaaacttgcttaaaattttagtaaaaatgtggatatacatatatcagagaagggggagatagaaaacagaggtggggaggggatccgaaaggcctatattagggtgtgtttagttcttgggtgtaaagtttttgaagtatacggacacacatttgaagtattaaacgtagactaataacaaaacaaattatagattccgcctgtaaactgcgagataaatttattaagcctaattaatccgtcattagcaaatgtttactgtagcaccacattgacaaatcatggagtaattaggcttaaaagattcgtgtcgcaatttacatgcaaaatgtgcaattggtttttttcctacatttaatgtcctatacatgtgtccaaacatttgatgtgatgtttttggccaaattttattttgatctaaacaaggcattaggagggtaggtatcatttatttttttttgaagaatcggataactaatttgtagtctcctccattcaaaaaactgatcatcacgggaaaattttggagcaggttaaaattcaaaaattgaagctcgatctcgaaaacaaatagtaaactccaactgaatctagggctgtgcgtgacggctccaacagggttatgatcctgccctcctgcaacaccgacggcggtgatatcaaaaggagaaagacgacaccgcgccgcgcgcatgtatggccggttgcacagttcgatagttgcggaatcgcagcatctgttgcggttcacgggactcaagttaatttttctcttctcactaattaacacagctacagtaattaaatcagcattaataaccaagaaaagaaaaagggagtctaagcctctaattaattaacattaaactgaaatgaacatcacgagccccgccgccatcagcccaacgcctgcgccggccaccaccgcgcagcttcccgccgacgttgttgtcccgtccgccgccgcacttgtcccgtttgtcgacggcgatgtcgtcttcgtcggcggcgtatccacaattcccggaccatcaaccgccgccggagcgatgggatcgtcgtcgtagtccgtcatcgaggaggccgacgcgtcgtcggcgctcttggccgtcgccggagaagacggcggcgtgccgccgccggaagaggggccgcccaagctcggcgccacgatgggggcgctgacctgcatgacggagaggttgtacggccggcacgccacgaccttcaccagctgcgacccgatcggcgcgccgggctcgccggagccgaacgccatctggtcgtcggcgacctgggtgtacttcacgagccccacgcctccgccgccgccgccggcggcggtcggccggagcagcgtggggaggagcgccgtcttcgccttgaggctgtacagcttgacggggtcgtagtagtcgaggagcacctgcagcgccaccacctccccctgcgtggcctccgggagcgacgtgatggcgccggcggcggcgtcgtcgacgacgaggacggtgacggccggccgcaggttgacgtcctcggcgagcctcgtctgcgagaggaggccgttgaacacggagaactccgggaactcgtgcaggatctcggtgacgttgaacttgaccgccgcggcggcgggcggcgacgacgacgcgaaggcgagagctaggatgagtccggcggcggcggcgacggcggccatggttgctgtgctctccgcggcggaggaggccgtcgtgcacgtggagatagtgaaattgggaagggaaggaacgtgagggctaaactgggggtgtacgtacgtgcatgggagtggattgcatgcatgcatgggcgcgccaaaaaggttagacgttgttgacgtacggtccatgacactttgaccgagtctctggtgggtccatgtcatgaagccatgaagaacgttgtgcacatgggctgatgataaggctgataaactttctcatgctccaagtccaaggctttttgttgtcattaaatcagttttctctcccttgtctatttatatgtatcctgtttattatatgtccatggtttttttattatgaaaactattatatctcttaaaatatagagttttagctatactagtaattacctatgcattaactatgcacatgctcatcatttaaacattatctagtctgtctctttccaacccctgtaactatatgaattccttcactacatgtaagaccataccaaataaaatggacattattttgtgtagacattatttttttatgaaacgtttaaatttattgagcatgtgagtttcaccgacaaggagaccatacgctagtgctaaaggtagtggtagcagattcactactactacctttaaattagtatagaaatctaggcacttgctatatttcgagaccgaggtattaacttcaaaattaacttctatcatttgagcttttagatggtctgtttggtgtaccttcaactctcaaatccacttctgatcaagttagagcacaaccaaatgtttcatgagagattgccggattgctccacaaaaatgaactagcagcgtggagtggcattctcgccactgcactactccaaagacaacaagatttcaggagttaaagtggcaatcccgcttagtatatactagtataaaaattaagaaaataaattgctagtataaaatttgagagaaaaaaaataactagagtggcgaattcgaagcgaggggaaaaaaccgtttatccgctctaattgcatccctagccgacatcaggaagagaatcaaagaaacctgtttgtcttagaacttggaagtatatttaatttgtcgtcccattaaaggaggacttggaataataagagatattcaagctgttaacaaattaacctcatcctcaacactgcttggagagtatccacctcagatgattgagttgccaaaatcactaaagccaatgctatattaagaacgaatgtatggtgggaggggaagcagtacaagatgaaatccttgatgcccacgtctgaattcttcaaaattttaaattttgagccaaagattttaaattgcatcatgtcaattcttcactttctatttttaacttttttttatgatttcttgaatttagtgaaacataaattatttttgaactctaaaaagttaatttcagaacttccttctttttaatgtctctgatttgaatatttgaatcttaaacctttgtagaatcatgtgatgattaatctttgtgatgaacaattattaaatgtaagtgcttgttgaaaatatggtgatgtgtttttggacagtgaatagtgtagtggtcggcattgtgaggccggtcagatcgggggttgccaccagttagaccggaggtgttggtgcggactgacctagtagcccgacggtcaagttggtgtgaagttgtactcagatatgaagtttcttgttgtacatgtgtaggtgttgcttgagaccatgggagtataaatgttaatgaatcgggaataggcttggtagaagttgaggttcagacggtcaaggatatcacgcgggatacttaggttacagaataatgcacgtcgaggtgaaggtttccatatggtatacacgtggtgttgtgtgcatgtggaaagaggagtcaaatttcaattggactccaagtttggaaagattggagtgtagagttgtatggggatattgtttccctcgtttggtaggtttcctatgtgattaggagtcctagttctagttggatttgtggctaggggcagccacaatgtgggtataaatagatgatgggttgaggctagaagatatcgactttttgggagagaaaaattagggtttctttcgaggttttagcactaggtcaagagttgagagatgattgctttagatgcacttttaaacacatattgatacaataaagttaatttactttcttgagttttgtcggtacatgtttttctggatcccaacggtgaccagagtttattgggcggcctaactggcggcgtgatggcggtgtaagtgatagtcagaggtggtccaaccggcggcaaggtggcggtcagacaagcggcatgcatgcggttagaccgtggcaatctaatggtgccatcggttgaacttcatcaaatatgagggtaacttttatccccgctaaaagttttggtttttggtggtcctaccagtcatccctcccctcttgtaggcttgatttttgtctcgatcatacaacattttcttttctatgtgtgacatccttggatttaaattctttggatttcaaacttttcttattttcaccaatctctataaaatacctcaaaattgacaaaattagcttaggagactctagctttgtggcgtttgcttagttttatggtactttgccaaaagacattcaatatattattttaatatatcctattcaattgtagagataaaacttttcaaaaaatgattttacccttggttcacctagcatattcaaacccaaacaaattctagttggttctaaacatttgcaaaaatttaaaagctgtcccaatttctggaaatcaaaatgttttacaaaaaagtataaattcagaaaataatatttcaattttcattttttttaaaaaataatgtatttgatttcagtaattttggatcaagttttgaattttgcaaaaatatgtttaaattgtacaaaaaaagtgtttaaattttaattatgcttggcgaaccaaaggtaaaatcatcttttacaaagttttatctctctatttgaatgtgatatattaaaataatagatggagtgtcttttagcaaagaactataaaactacggtgtcgtatgggaaaaccacaacctagaatgccctatagaaaatgtcacaaattaaagctagagtgtcctagagcaaattttgtcctcaaaagtctataacatgctttattcttactaattcaagtgtaacctatcaaactaaacgaatttactgttaataatatttaacccttttcttcattttggagttctagattcaaattcttgatatatattgcaaacgattagttctgtctttcgctaaaaaaaaaaatccaagaatccatatcataatctccactaacaaatttcagatccggtcctccaaattgaatgaaactaattccgattttcatagtttaccttttctcaaaattaaagtttatttatccaaattttgtaatccaaaaccttttatattcccgtatacccatgttggtatttgatattgtcacagataaatcagcaagcacacggataccactgtagcactttagctcaaagtattccaagggtattgtcacgccctgaagttttccccctttttgcttgctttaaaaatttggctaaataaatcgtccgaagaaattatcttaattaacctagagctaattccctaattaataaatgcaaataataatcggaatcggcatgtggaatttttcttggattctacatgtcacaatatattaacaggatttttagtggaattttcagagccttggaaataattttaaccaattaaaaatcaccaaagtgcaatttttaatcccaggaaaaatcctttcttctttttcttttttcctttttccttctttttcctcttcttgggccgtcggcccagtccaccccgtctccccgcgctcggcctttctcttgtgggccggcccgttctccttcccctctctccgggacgctgacaggtggggcccacctgtcaggtcgtctccttcctccagccacccgcctccgacggccgtccgccgccgaatccgccacgtcgccgcctcctccgctcttcccgcgcccacgccgcgccgctcccgcgtccccctcccacgtcgccgcctctcccccgcgtctcccgccctcgcgcgcctcgcaaatgggcgggattcgaatttgaatcccacccctctctctctcccccaccttcccacgtcgccggcgcaatagggtgggttcccggccacgtccgcctccccctccgcctataaatcgttccccgcgtcttcctctctcgtttttcgcactcgccgcgctctcccgtgccgtctaccgcccacgcgccgtcgcacccgagctccgccgcttgccgccgccttcggccgcgagccgccgccgctagagtcgccgccgcgccaaaccgccgccgccgttagcttcgccgctgcaagagctttcccggccgccgcctcgcgtcgccggaatcccaccggagcacctctcccctcgcgagccggtgagtttttccctcccctccatctccggccggcaatccaagccgccgtggtcgtcgtctcctctcctaacgcctctccatcttctcctagggtgtcgccgccgcccgtccgtgcctccgcgtcgccggtcatcgccgctcgtctcttcccacgccggtcgccgccatcgcctcggtgaggaatcccctttcctccttcctttcctctcccccgtgagcgccgccgccctccgcgcgtgcgccgtcgtcttcggctgccgccgccgccttcgcgccggccgccgccgtctccccgcgccgccggtcaccgccggcggtcgtgcgccgtcgtcgcctcgccatggccggccggcttgagccgtgccgagcatgccgccacccactccctcccccttgagccactgcccgtggggcccacatgccggcgcctccctctcctttccccttgtgccgctgccagtggggcccgcttgccagccgcccccttcctctctcttgaaccgctgaccagtggggcccacctgtcggcgcagccgccccctcccctcgctgacgtcagccctgggccatattgcgcaataaattgattaaggacttttctttattagtaaaaacacagtttatcttctaaaattcataagtaattcatccgagctccgtttaagtccattcaagtctcagtaaatcaagaaaaatgcaaagaatccattaaaaatggttttgtttcctgtttcagtagtcttatagcatgttttgcttgtgtgctttgtttgtcgcgtaggtttcggccgtttcgtcgatccgaagtttctcgaagacgttgctgaggtcccatcagttcgagagcaaggcaagtcatgcaatacgtttgatcatattgtacccaatttacaaatatcccgcatttctattaaatgttgcattcttttacaatatcatgtggaatgggtcctattactcagccatatattgtttaccttatgccattgacaacttgggtatcaaaatgattagatgttggtttaggaaatgcttagccatgcttagttcaactagcacacaaaaagggatcacattattaaatagactctgactattagcatagctttggactggtgccaccgcaagggtgtcagttaattaaaatattctgagtggtgggctgtgggtgcatggtttagctggtcgcacccatggcagttaaggaccggttcacgggaaaccctgggagacttaccgtgcttaccacaagcgggagtgggtaactgcttgatctgaagtatagctcgaccctttcctaggcaccggtggcgagggtgggcgtgatggagttgggtcggccggggtgtccggttgtccagctgccggattcaccgcggcgcaagaggggaccgcccactgccttttgaggggtgggggtgaaaccttagcgtggtgtggatggttaggggagggttatatggagggtcttgtcacgatttccccctttgcagtatcatggtgatacttcggggcatggcgacatgtgtggaatcgtgtcttgtgggtacagttgtacacctctggccagagtaaaactattcgaatagccgtgcccacggttatgggcgatcaaccagattcaccgtgattagtctcacccctagtttagcttaatgaactggtgtagttcaagtggttggttgggccttttgcaacgtggtgtagcgttggacagtgtttggttaatattgattaattactacaactgttttactgctttcaactactgcttttaaatgctagctttatgcaaaagaacctctagcctcctttggttatatcctgcatcatacctcctcttccggtatgacttgctgagtacagtgggtagtactcagtcttgctctcttttcccccaccccagagctgaagatcttcctagttggagctgttttgtcaaagttggtttcgtcgctgccgtcaaggattgcctgtggagtggagtcgcccgctgctgaagtcaagcttcccggtttagctcgcttttatcttttccgctgcatttgtaatcttttctatttttgtaagacgtggatctgtaggtcaacaattgtcgtttgtgtaccctggctggtcctggacagggatttaatgcacattcagcttagaaattctggttcgagaatttctgggcgtgacaagttggtatcagagccgaccttgaccgtaggacaagccaactggaaaccctaagagccctctgaacccctttttcatctgcatatgcctttttgcacttggattttgttttggaaaaatttggagttttgcctctttggtttgcgggaaaaatcttggtcgttctttcggatcggatttttttttaaaaaaaaaattagctcagtctagggctttagaaaaattttagttggagtttattcgacagtcagtcgggaatttattgggggttatgcattaggtcgtgtctatattcgatgggggcaatgttgcgcatcattttccatgcaactagtctatgcattaatttattgtttagttgcattagtgtctttatttgggttcatgaaaaatgttctatgcataaaaatcatcatgttcagttattcgtttgagtcatttgttgcttcgtttaatttggatttgagcatgaattggttcctatcccttgtctactttagatgtcagtcctatccctcgtttgcaagcgccgccccgagcttcagagtcgccgcccttagctttatcgccttcttagtctatttgcttgctagttttcgtgtttaggtttgttgcttgtgggttagtcggcggtcgatatcatgtgtcagtggtatgactgcctcaattaggagttgcgtgcccctttttcagtgttttaatcaagattaagataattgcacttaaattcataagcaagattagtttctgagccccctgtttttcttccttttctcatatttctacctatccccttcagatggagataaggaatggttcacgcgactcgaacaacgccagtggcagcgaagagccgatcaatggagcacgtgccaacggtgcatctgacaacagtccgtccccaccacccgagaacccaacaattgctcaggtgttggacaatcagactcagatgatgacaatgatgatgcaacagatgcagcaacagtaccatcaggtgttgcagcaggtgcagcagcaagcacagctgcagcagcagaacctgcagtttggtcctccacctcctcagtccaaactgttagaatttcttcgtgtcaagccgcccactttctcaagcaccaccaacccaatcgaggcccacgactggcttcatgccattgagaagaagctgaatcttttgcaatgcaacgagcaggagaaggttgcttttgctacacaccagctacaaggtcccgcttctatttggtgggacaactacatggtgacccgtccagctggggcagaggttacttggacagagtttcgtcatagtttcaataaagcacaggttcccgagggaattgtggcacaaaagaagagagagttccgttccctgcaacaaggaaccagaacagttatagagtatttgcatgagttcaaccgcctcgcgcgctacgcccctgaggacgtgcgtaccgatgctgagaggcaggagaagtttctgtcgggtcttgatgatgaattgaccaaccagttgatctctagagattatgaggactttgagaagcttgtggacaaggctatccgtcaagaggagcagtgtaacaaaatgaaccgtaagaggaaggcagcccagttcaggactccccaggggaagtgtcagaagcctcgtttcacgatgggacatcagggtggaccttccaccatgattatccggcagcaccgtccctaccacccgggtaatttcaacaagaacaacaacagtggcagtcacagcagcctcaacccgactccaagtccattaatgattccagctcagtcagatcagtcagatcagctagctcagccagctctgccagaacagcccaagaggttgggagaaaaacccgaactctgcttcaattgtaacaaacccggacacacggttggaaagtgcccgaagccaagacatgctggacccaagttcgttcaggcccgtgttaatcatgcatctgcagaggaggcgcagtcagcaccagaggttatattgggcacattccccgtcaactcgacaccggcagtaatattgtttgattctggtgcaacccattccttcatttccaagcgttttgctggtgcacatgggttatccttagtgaagcttaagataccaatgcgagtgcatactcctggaggtggcatgaccacaactcactactgcccatctgtgacagttgaaattcaagggttgatttttccagccaacctcattcttctcgaatccaaggacctagatgtcatacttggaatggattggttaacaaggcacagaggagtgattgattgcgccagccgcaccatcaagttaaccaatgcaaaaggagaggtggtaaccttccagtctctagtgccgcggaagccagggatcagtttaaaccaggctgctggtgaagaacaagaggtagcagtggagaaaaccactaagaagctggaggatattcccatagtcagagagtatccagaggtttttccggatgatctgacaacaatgccaccaaaaagggatatcgagttccggattgacttggtacctggaactgcaccgatccacaagaggccttacagaatgggagccaacgagttggcggaagtcaagaagcaagttgatgaacagttacagaagggatacatccgcccgagcacgtcgccttggggtgctccggttatctttgtggaaaagaaagacaaaaccaagaggatgtgcgtggactaccgcgcactcaatgaggtcactattaagaacaagtaccctttgccaaggattgatgatctgttcgatcagctgaaaggagctactgtgttctctaagatagaccttcggtcaggctatcaccagttgaggatccgcgaagaggatattccaaagacagcattcatcactcggtacgggttgttcgaatgcacagttatgtctttcggactcactaacgcacctgccttcttcatgaatttgatgaacaaggtgtttatggaatttctagacaagtttgtcgtggttttcatcgatgacatacttatctactccaagtccgaggaagaacatgagcagcatcttcggctggtacttgaaaagttaaaagagcaccagctatatgccaagttcagcaagtgcgacttctggcttaaggaagttcagtttctcggtcacatcgtgaatgctcaaggagtagctgtggatccagcaaatgtggagtcagttaccaagtggaccccaccaaggacagtcactcaggttcggagtttcttaggacttgcgggttattaccgccggttcattgagaacttctctaaaattgctaagccaatgacacagctattgaagaaggaagaaaagtttatctggtctgctgaatgcaataggagttttgaagaactcaaacgacggttggtgtctgcaccagtcctaatcctgcctgatcagacgaaagattttcaggtctattgtgatgcatctcgccaggggctaggatgtgtgttgatgcaggatggcaaagtggtttcttatgcttcacggcagttgcgtcctcatgaaggcaactacccgacgcatgatctggaattagccgcagttgttcatgctttaaagatttggcggcactatctcatcggtaaccgttgtgaggtatatacagatcacaaaagtctaaagtacatcttcacccaacctgatctgaatctccgacaacgaagatggttggagctaatcaaagattatgatatgggaatacactatcatcccggcaaggctaatgtggtagcagatgccttgagcaggaagagttactgcaacgtcgcatgggtagaggaactatgctgtgaggttcaacgtgatttggaacatttgaaccttggtatagttgagcacggattcgtggctgccctagaggcacagcccacactggtggagcaggttcgcatagctcaggcaagtgatcctgaaatagccgagctcaaaaagaacatgagggtcggaaaagcccgaggttttgttgaggatgaacaaggaacaatctggatgggagaaagattgtgtgtacccgaaaacaaggaattaaaagacctgatactaaccgaggctcatcaaactcaatattccattcatcccggtagtactaagatgtaccaagacctcaaagaaaaattctggtgggtcagcatgagaagggaaatagctgagttcgtagcactctgtgacgtctgtcaacgagtaaaggcagaacaccaaaggccagcaggtctgctacagccacttcagattccagaatggaagtgggaagaaatcggaatggatttcatcaccggtttgcccaggacgtcatcggggcatgattctatttgggtagtcgttgaccgactcaccaaagtggctcacttcattccggtgcacactacctactcagggaagaaattagcagaactctatctggcaagaattatgtgtttacatggtgtacctaagaagatcgtgtctgatcgaggaagccaattcacttcaaagttctggcagaaattacaagaagaattgggaacccggttgaatttcagcaccgcttaccatccacaaacagatggccagaccgagcgagtcaatcaaatactagaggatatgttgagagcctgtgcgcttgactttggtggagcatgggacaaaagcttgccgtatgctgagttctcttacaacaacagttaccaagctagtctgcagatggcaccgtttgaagcactgtatggacgaaggtgtcgtactccgctcttctgggatcagacaggggaacgccagttgtttggtacagaagttttaaatgaggcagaagagaaagtcagagctgttagggaaagattgagaatcgcgcaatctcggcagaaaagctatgcagacaaccgccgaagggagctcgttttccaagtaggggattatgtgtatctccgtgtcactccgctcaggggagtacaccgcttccaaaccaaaggaaagttggcaccacgctttgtgggaccatatcggattttggaacgcaggggtgaagttgcttaccagcttgagcttccctccaacatgcttggcatccataatgtgttccacgtctcccagttgaagaaatgtttgagagttcctgaggaacaggcaagtccggatcaaatcgaaattcaggaagatctgacgtatgtggagaagccgactcgtatcctcgaaaccagcgagagaaggaccagaaacaaagtaataagattctgcaaggttcagtggagccaccactcagaggaagaggccacttgggaaagagaagatgagttgaaggccacccacccgcacctcttcaccagctcttccgaatctcggggtcgagattccgtttaaggggggtaggtttgtcacgccctgaagttttccccctttttgcttgctttaaaaatttggctaaataaatcgtccgaagaaattatcttaattaacctagagctaattccctaattaataaatgcaaataataatcggaatcggcatgtggaatttttcttggattctacatgtcacaatatattaacaggatttttagtggaattttcagagccttggaaataattttaaccaattaaaaatcaccaaagtgcaatttttaatcccaggaaaaatcctttcttctttttcttttttcctttttccttctttttcctcttcttgggccgtcggcccagtccaccccgtctccccgcgctcggcctttctcttgtgggccggcccgttctccttcccctctctccgggacgctgacaggtggggcccacctgtcaggtcgtctccttcctccagccacccgcctccgacggccgtccgccgccgaatccgccacgtcgccgcctcctccgctcttcccgcgcccacgccgcgccgctcccgcgtccccctcccacgtcgccgcctctcccccgcgtctcccgccctcgcgcgcctcgcaaatgggcgggattcgaatttgaatcccacccctctctctctcccccaccttcccacgtcgccggcgcaatagggtgggttcccggccacgtccgcctccccctccgcctataaatcgttccccgcgtcttcctctctcgtttttcgcactcgccgcgctctcccgtgccgtctaccgcccacgcgccgtcgcacccgagctccgccgcttgccgccgccttcggccgcgagccgccgccgctagagtcgccgccgcgccaaaccgccgccgccgttagcttcgccgctgcaagagctttcccggccgccgcctcgcgtcgccggaatcccaccggagcacctctcccctcgcgagccggtgagtttttccctcccctccatctccggccggcaatccaagccgccgtggtcgtcgtctcctctcctaacgcctctccatcttctcctagggtgtcgccgccgcccgtccgtgcctccgcgtcgccggtcatcgccgctcgtctcttcccacgccggtcgccgccatcgcctcggtgaggaatcccctttcctccttcctttcctctcccccgtgagcgccgccgccctccgcgcgtgcgccgtcgtcttcggctgccgccgccgccttcgcgccggccgccgccgtctccccgcgccgccggtcaccgccggcggtcgtgcgccgtcgtcgcctcgccatggccggccggcttgagccgtgccgagcatgccgccgcccactccctcccccttgagccactgcccgtggggcccacatgccggcgcctccctctcctttccccttgtgccgctgccagtggggcccgcttgccagccgcccccttcctctctcttgaaccgctgaccagtggggcccacctgtcggcgcagccgccccctcccctcgctgacgtcagccctgggccatattgcgcaataaattgattaaggacttttctttattagtaaaaacacagtttatcttctaaaattcataagtaattcatccgagctccgtttaagtccattcaagtctcagtaaatcaagaaaaatgcaaagaatccattaaaaatggttttgtttcctgtttcagtagtcttatagcatgttttgcttgtgtgctttgtttgtcgcgtaggtttcggccgtttcgtcgatccgaagtttctcgaagacgttgctgaggtcccatcagttcgagagcaaggcaagtcatgcaatacgtttgatcatattgtacccaatttacaaatatcccgcatttctattaaatgttgcattcttttacaatatcatgtggaatgggtcctattactcagccatatattgtttaccttatgccattgacaacttgggtatcaaaatgattagatgttggtttaggaaatgcttagccatgcttagttcaactagcacacaaaaagggatcacattattaaatagactctgactattagcatagctttggactggtgccaccgcaagggtgtcagttaattaaaatattctgagtggtgggctgtgggtgcatggtttagctggtcgcacccatggcagttaaggaccggttcacgggaaaccctgggagacttaccgtgcttaccacaagcgggagtgggtaactgcttgatctgaagtatagctcgaccctttcctaggcaccggtggcgagggtgggcgtgatggagttgggtcggccggggtgtccggttgtccagctgccggattcaccgcggcgcaagaggggaccgcccactgccttttgaggggtgggggtgaaaccttagcgtggtgtggatggttaggggagggttatatggagggtcttgtcacgatttccccctttgcagtatcatggtgatacttcggggcatggcgacatgtgtggaatcgtgtcttgtgggtacagttgtacacctctggccagagtaaaactattcgaatagccgtgcccacggttatgggcgatcaaccagattcaccgtgattagtctcacccctagtttagcttaatgaactggtgtagttcaggtggttggttgggcctgttgcaacgtggggtagcgttggacagtgtttggttaatattgattaattactacaactgttttactgccttcaactactgtttttaaatgctagctttatgcaaaagaacctctagcctcctttggttatatcctgcatcatacctcctcttccggtatgacttgctgagtacagtgggtagtactcagtcttgctctctttttccccacacaagagctgaagatcttcctagttggagctgttttgtcaaagttggtttcgttgctgccgtcaaggattgcctgtggagtggagtcgctcgctgctgaagtcaagctttccggtttagctcgcttttatcttttccgctgcatttgtaatcttttctatttttgtaagacgtggatctgtaggtcaacaattgtcgtttgtgtaccctggctggtcctggacagggatttaatgcacattcagcttagaaattctggttcgagaatttctgggcgtgacaagttggtatcagagccgaccttgaccgtaggacaagccaactggaaaccctaagagccctctgaacccctttttcatctgcatatgcctttttgcacttggattttgttttggaaaaatttggagttttgcctctttggtttgcgggaaaaatcttggtcgttctttcggatcggatttttttttaaaaaaaaaattagctcagtctagggctttagaaaaattttagttggagtttattcgacagtcagtcgggaatttattgggggttatgcattaggtcgtgtctatattcgatgggggcaatgttgcgcatcattttccatgcaactagtctatgcattaatttattgtttagttgcattagtgtcttta

SEQ ID NO: 8949 - DNA, 11755 bp, Oryza sativa
gagcacatgtagtaagtgggtattgatgataggacagagtttattaaagtcagtctacctccttgaggtaagaacattgaactaactgtcagccttctttcgactctatccaccagggggggcaaaatcaatcacccttggccttgtagttcctagaggaagccccagataggtgaaaggcaattttccaacagaacatcgcagaagtcctgcaattaaatcagtcttttcttcagatagattgagtgggtaaaggcttgattttgcataattaacctttaagccagtcgacagagcaaacatgttgagtagtgccttgaagcagaagatttccttttgtgaagtttttaacaaaatcaaagtgtcatcagcatattggatgattgggaacccacttccatcattcgcattgattggctttgaaattaatccaaggttgaaagccctgtttactattctttgtaggagttcagctcctagaacgtaaataagtggagacaaagggtctccctgtctaactcctctcttgcaggtaaaagaattacccggaaccccattcaacagaactgcagtgcttgctgaggaaaaaaccatttgcacccaattgagccatttttgtgggaatcccatgctttgcattacagataggatggctgtgtgttcaattgtatcaaacgctttttcaaagtctagcttgaggatgattatttctctttttgactgctgacattgatgaatatactcaaaagcccatgctaaacaatcctggatggttcttcctttgatgaatccatattgatttttactaaccactttgagaatcacaccttgcaatctatctgccatcaactttgtaagaaacttgagacttcatctcattagagaaattggtctgaaatcattaactgtttctggagagagttttttcggcataagagtgataaaagaactattcaagacctgtaaatctgtagactcagcatgaaaatgagctacaagtctgtagaaatcttgtgcaatgatatgccagcacttcttcatgaaaaaaccattgaaaccatctggaccacgggccttgtcagcagggattatagagatgaggttgtcaatttcttgcgtgtaaaacatgtcgatcaggcactccaaatctgttctaggtacaaaaagctcagtcaaattgaaatccattgttggggagcaagagatacccatcctgttcttgaagctgtgatagaacaagtttgccttctggtcatgtaagtaaactatctggccactttgattcgaaacttgtgaaactatgttcattctgtatctttctgtggcaatagattgaaagaatttggtgtgctcttctcccagcagcatccatctgttagtgcaacgttttttccagtaaattttcttgtattctagaagtttgaggatctgatgtttaactacctccctgaaattccattcaaataaggagaggcttctatcttcttccaacagagcaagaaaatcaatcactttattgcaattgttcaagagaagcatgattcttgatagatttttactccagagtttgagttttttcctcataattttcaacttgaaggatatacatttagccggatcatcaaaaccaggatccagcagccaaacttgctgcaccacatcaaagaaaccctcagcttccacccaaaaattttcaaatctaaaaattggagatttggggatttttgtatcaatctttactacacaaggaacatgatcagagatattcctggtcaaagggatcactgttgtattagggaaggttaaagtccaggaagcagaggtgaatacccaatcaagcctttccagcaaaggattttgttgcatgttgctccaagtgaaccttctcccttttaatgggatttccaacagtcccagggagctaataatctcattgaaaatgaaaatatcattcatatcggctcccactttatttctgtcataagtagatctgtagaaattaaagtcccctagaaagagccagttctgttgagcatcgatctggatgttttttaaccagcccacaaagtctggtctttcaggcccattgcatgggccatacatgctagtcaaggaccaaacttgtgaagtaaatgtagaagttaattctactgtcacagagaaagggttaacttctttgagaatcccactaaaggtccttgaagcccagacaattaaaattccccctgaagcacccatggagggggaaaaagcaaaagagtcaaagcgcttgggagcaaattttttgatctcagaaaggtcaaagttctcttttttcgtttcttgaagacacaaaacccggcaatcactcttatcaattttctatcttaaagacaggagcttattctcagcattcattcctctaatgttccagcataaaacattccaggatttaaaattactagtcatttacacaccattgagaatggggcaaaaataccaaggctagcatagctaaccaggaccaatccaaaagacaaacataccagtgttgacatgctgacaggataaaattctggtaaagcaactttgacagcatacagattacagacccttgtaacatgataactgtaaaacataggcctgccaacagaacaaaatattgcttcatcaattatcttccatgtttagcctggggatcttctgccttctttcaccccccaggctagattcagccacctccttaggagagaggccgcacatgtccacccccatcttttgtatgaccgaaagtgaacaatcagagggagaggagtcagagttcatatcactataagaagtttcattgaaatcagactcgtgcaaactgctatcaataaagagttttgcaatacctgcaaattcttttagctttttagcagactttccccttggcttcctaatccccattcttgggtccatctgcaaatccttggttgcatttccttgcagaagtcttgagctttgtcttctgtagggactgtagagaatggtcttcccatctcacttctttacaggtgccttggggggagcagggccacaggtgccatactgatgggactagccacagtggttgggctagtagggggcatcacactgattggaatgacatcttcaatcatcctttcttgagggggtaaaatagactcaaaaggttgcagagcccatttagattcatgctggcccacttaaggagtggaaccatagatggactttcttggcaggaccaatgccgaaaagttggatatctttaaagcagcaggaataggcttgtcgtggatcaaagtttgcatgataccctttgctttacagagcaagtcaaacttgtccagtatacccttcattggataaaggtaggggtgacttggagattctgttttggcaattctattcaaccgagctaaaaattcctggacttgcggctctagaacaggatcctagattggtgtcatcatagaagaagggcaaggtgtggccatctgctgtggtataatcaattgtcctgggttctcctcaatctgccccattggatgatcttggccccatgcatcttcttgttgttcatttgcagcctgttgctgctgcactgcctcatcccaacctccagctccctggttaccagggttgccaaactgccaaacattgccagcatcggggtcatcatcagttgcatcatcagggcctggctgaggaccagcaggggggaggtcctcttcaggggggaatttataaaatctccctgaagcatgaaaaccgaaacagtccaagattctcccccacccccagcaccaagaggatcaaagaggacaatctttctcggcacagaatcctggtccctgtacttagctctaacaaaaaacccttcccaacattctgtccgcatccgcccaaaaagttaactgaccaaaagaagcaactgccaggtgcacatgatggagatcaataaaatctagcgggaaatctaggaacataaaccagccttctctatgaaagtttgccgccctccaattaggaccttggtcatgattaacaaaagtaccagggtgaaccccatcatagaactcaggcaaagagaggaccaaagcatccctattcatggcagacctcatctggaaaaaacctaccgcaaacgggtgccggaagctgttacgaacctcgtagtgaagttcatcttgaatgaagttggcaatgagggcccaatgatgatcccagtcttgctccaaggggattggctcaacaatggccacacaaaagtcttcatggcaccgagcagggcactgcgggacagtgaggtcaacccgcgggatgcatgaacagcgagcccctgccttaggaagcgcagcggattagggtttagattggccattgggggaagagggaagctatgggtgggaagcactgtgcattcaggagaggaagggtttctagaggaagaaggcgagatttccggaggaatagttttggccttccaaactgcagtagtccgagccgacggtttcggattgttacggtgcggggcttttgtgggcttagaggccaaacaggaacgggctaaatggcccggcatgagacaggccttacatctaagaggcctagagcaagaagccctcgaatgacccctttccaggcaacggccgcaaagattgatttccaaattcaaattgggtgacaaattaggatcccgcgtacctctggtatgcgaaattaactccgttgccggaatgggcagcggcgagacgtcagccgccttggagttcgccggagaagagcctgaacccatttccctctgctcaagctggtggaaaatagagattcttcattggtcaggcttagaggcacacagggagtcttttaaacaagaaaaaacatgcttgattgagatatcatgattctgaacagcttgagcataagaacgatccggccgccttaaggaagacgaagatcttttcttgggagccacaagcacccattccttttcctgttcccgactccaagagtcaaactcccactgccaattcggccccccatgtctccagaggaagaaacgaagagcaaaatcatcgcaagtataagatttaagacgataaacccacaaacccacttgcttcgatgtcacaccctaaaaattcaaattatataaattgttgtttaattggaatttctagaatttattttaaaaaaaagtcttgaaaagaagatatagttctaattaataaaatccaatataaaaagtggccagataaaatttcattaaatactttgcttaattctataattcctagatttttctgggatttatttgagctaaggaagtattttaataaatggaattgcatttaagaaataatttaaattgaaaaaggttttaaaaagtcttcttttggctttgggccgaaagtcggcccaaaacctctcttctctctctcctcggcccagccggcccagtccgcagccgcccgcgcgcgcgcgcgcgttcggtcgctgacaggtgggtcccacctgtcaggcccgtcgtcttcctcgggccgaaaccctagcgcgccgccgccgagccgccgccgctgtttccttccaatccggccgtttctttccttctccggtcgaatcaaaagaggagaaacaatctccgggatctcctctaccttttctcctttggaatcatcggttaaatcgctttggaaagctttgggatcgagttcgattcggatcggttttctttctctccaagccgaggtttccttcgtcgttgccgtcgccgtgggccttcgccgccgcctccgagcccctttaaaaggacccccggagtcttctcttttcgccgccaccctcgccttcacctctcgtcgccggaagagctctagcgccgtgtgccctagctttgccgtcgccgccgccgctccagccgtgcgccgccgtcgtttcagccgtcgccgtcgctcgggaagaccaccgtcgtgctcgccaagtcgtcgccgtcctcgtccgccccttcgccgtcgccggagatcaccggagcagcttcgccgtcgttgacccgaaggttcccgccgcttcctcctcgtcgccgtcgccgtccgttggtcttccgccgccgtttaggtcaccggtgagttcgccgtgttgtcctctacgtcttggtgccctccgtttgcgtcctggcgccgccgttcgccggcgagcgtgcgccgcccgagccgtctcctctgccgagccgccgccgctgtcggtgacgtcaccgctgacgtcatcagggtcgtccgccgtgaaccgccgtggacccgatcgatctcggccgtccatcttggatcggttagatctcggccgtccgttcgcgtgaaccgccgcccgtgcgcccggtccaccaaaccctagcccgctgacgcaataaatccccttttccttttcaaaaataattcattattgcgtcataattcaatttaaaccgatttaagtgttttaatccgatttaatctttaaaaattcataactaattcatcttagctccgatttagttggttcaagtctctaaatttttctaaaattgagatctacacattaaaaatatccacatgtactgttcatgcttgtttatgtgctgttttggtgattttgctcttttctgcttagattccgtcgtttccggagagtccgttttcgcagaagaagagtttgaagagttccaaggccagcaaggcaagtcacacagatcctaaacacaatcctttgagcatgttgatcctatatttaaattctctatttatttcaactgtgcatttattttcgaatgtcaccgggtggtgtgaacctgttcctttgttatggcctgttcgcattgattactctattccttgataccttgggttattacaatttgactagttgagctttatttatattggttcaactagatattagatataattgcttagccctgcttagaaacattagtacacattcgggataactaatgacttactaatatttcatgatggcttattgatagttcacgatggtcaatcgtgattagttaattaattaatgtgccaactaaaacctggtaatggtgggttgtgagcacatggttttgatggtcgtgctcatgacaattaaggaccggttcacgagtttcggttgtgaaacatttatcgtgccaaccacaagccagcatgggcaacggctttatcttttgtatagcatggttcattgcggggcaccagactgagaagtggcggagataagcccacgggggtcgctggggagtccatgccttgtttataagggggtgattatgatccaggaaggtgcgctgtaatggattgtgttatgcgaggggtattgtcacaactcctttccgagataccgtggtggtattgaggcacatggtgacatgatgtggggttgtgtcttgtgggtacagtggtacacctctggccagagtaaaactattcgaatagccgtgcccgcggttatgggcgggtctaacaatgtctttcgtgattagtctcacacctctcatcattataaaagatgctttaactggtaataatttgattagctcctggtttggaatggtatattcctggtttggagatagaactgtgcagccggggtggttgttcagaatggttgggcctatacaacagggtatgttgtatagcgttggattaatattgtttaattacttaactgttttatcaaattctcaaatgtttgctaaatgctgcttttgcaaatgcaaccctattatgccatcctttgttatcctgtgcacttgcatatttgctgcgtggcttgctgagtatgtcatatactcaccttgcaatcattcatcagaggaagagttctacaatgaggctgatggtgtggaggattaggtgtagccttggtcaagctgcctgtggagtggagccgtctgcgccgtttatttattttccgctgcttagatctttattgattgagaggaactatctacctctgtaatgacattttattcgcttattaattagagtaatatttgtactctattatcaatttgttattcgaacagaccacaaaggagtaggagcgatccttaagatgagagatagcgagattggcaggagatcagccaatggccgccctaagggccaaagccaccgaagaagaagtgagatgaaagctagcacggggaagatccacaactaatcggaaaggtgttgaactgaatttcgaagaaaaatggaccggcgaacggaagcgacgccaggcctcctcacgaatagcatcgccgggagagattccatcctcccggtggtgccggcgtcaccatggacgagatcaccggagatcgcccatagtcgcacaccgagaaaaccggagcctagcccagtcccctgaaaatgtagttccgacacaagttgaagacatggtgcatgacgatggttctgttgaggacaaaatcgacctagaggaaatgttacgtcatgcagaacccgaggtgctgatgggatcggctagagggttaaataactttgaagctttacaaaaggcagcaaaggaagttttgtacaatgagtcgaagggctctgacagtgagttcacaacactccggtcagttcttgaacttatgaggttaaaggtgaggcatggatggtctgataccagtttcgacagtctattagaacttttgcagaaaatgctcccgagacctaactcactaccatccagcacatatcaagcaaagaaactcatatgccccctttcacttggtgtggaaaagattcatgcgtgcgtaaatcactgcatactgtacaggaaagagtacacttctttagatgaatgtccaacatgcggtgcaagccggtacaagtcgaatagcaatactggcctaaaaccctctgaagcaactgagggacgacagagaaaaatcccgcagcttgtgatgtggtatcttcctgtcaaagaccgcattaaacggttatactcaaacccgcgagatgcggaactaatgcgctggcatgaagaagggcgcaagaaggatgggatgattcgacactcggcagatgctcgtaagtggataaactttgatgcttagtatagagagtttgctaaagacccacggaacattagattttccctgagtacagatggagttaatccttttagagacatgagcagctcacatagtacttggccagtgcttctcaccatgtataatcttcctacctggctttgtcaaaagcgaaaatacgtactactctgtatcctcatacagggaccccgacagcctgttattgatattgacgtatttcttgaaccattgttggaagagatggctgatttatggaaagagggattgaaagtgtgggacgagtacttaagggaatacttcacagtgaaggccatcatcttcgtgaccatcatcttcacagtttcaggtcaaattaaaggtaaaacaggatgtgtgatctgcttgaatggaacgtactataggtatctcccgggttccaacaagcttgtgtacatgcggcaccggcggttcttgaaagttcaagtgccttaatttggtttcggtgattaatgacaaatctatttatatgagactaacgtttttatgagcctttatttgactagtctcatttggatatgaaagtaaaaatgatgagaggtatgtattaaacttcacatattctaacttggtctctcttgtggatccaaaatatagtgtgagcttcctatttgatctttattgattatgtgcatatgcgttccttcatatccatatgtatgcacatcttgagggggagcttattctatattttgtttattataagatttctatcttgatttgaaatcatttttcatgtcatctctctatattgtttatatcgggttattatccatcaccaaagagagaaaagaatgaaagatcttggattaaacaatttgtgtaattgttactttggtgatagatgataaaccgatgtttatgggattaacctctcttttgcataagttgtctactaggttatttcccgataatgagatgtggaagacatgcattcttttgtgatggaccttaatcatgacaaggatgaaatgcatggagataaaacgatatataccacttcttatctcctacttttggataggttcatatatatgatttccatgttattgatatataagtgtgagactaatgtttactcgaatgttatcttatttagtctcatttacattgagaacatggagatcatgaaggtatatgttttatgttggtctacatcattactacatatgccttcactatatgtataggataaacccccattggtcattctctaattatgcatacacttgcatctcttgtatatttatttgtatgcatatatttagggggagcaaatcctatatatttattgtgcatgttctagatccatgttgttcacctattatttatatcgaatctttgcacttgagcttgcatacgagtatatgaaacttgtgatgttaatgaatactcaacaaacatatccatatctttcatatgcaaccggttggtcatcaagtgaaggatgacaaccgatttgttgagactaatgttctcctttgaggtgtgaaaaggaataggtcccactacgatgaggctaatgaatgacaccatgggttagtggtcaccaagccaaggacatcgtcatgttggcaagaatgaggtcaagcttgttatgagaataaagtcttgacaaaggatggacaagacctcggcataaacatggttcaaccggatggtcacaagtgttgatctcggctcaagcttgaccccaagatggatggcgcaaggcaaaggtataatgtagctaagaatgttttcttagtcttttcccggtcttggtgtttggtgtagaccggatttgctagatagacgtcgtactatcaagaggggtctatgaagcgagcttgtggatgatcttgtgccatattagttcatatgcatgtaggtgcattttgtgggcttgtctaaccaagtttgatgagttttctcaagtcctaaaccaagagagaagtgggcatgtccaataggagtgagtgacatcttgtgggtatgtccggtggatatcctttggagtgtgagccctttatccttgacttaagttgtgtttattgcatgtatttttcatgggttggatggccctttgaataagctttccatagagtccaagaacgccaaattccgagacccgagtcaagagatatcgccgttttactaacggtcagttaagctgaaaagtgacctgcggtctgaccgtgggccttaggccggtctgaccggtcctgttagccggtctgactggcgtgataaggccggtctgaccggccccactggtctgttgcattggtctggtttttggtggcgatacagagccgccagagtcgcaaccggtcagaccgagccgatggcggtctgaccgagcggtggacggtctgaccggctactacactgcggtcagaccggccaggttgagtgggctcaatgattgccctgtaacggctagttttctagccgttacaaagtagtccggtctgaccggccactctatggcggtctaaccggcagagcacagagttggggatttcgacataacggctagttttggtggttgggggtatatatacccactccccagcagcaagggtaaggttttggcactccattgcattatcttgaacccttgcaagagctttcacacccttgtgcact

SEQ ID NO: 8950 - DNA, 20500 bp, Oryza sativa
catggtgacatgatgtggggttgtgtcttgtgggtacagtggtacacctctggccagagtaaaactattcgaatagccgtgcccgcggttatgggcgggtctaacaatgtctttcgtgattagtctcacacctctcatcattataaaagatgctttaactggtaataatttgattagctcctggtttggaatggtatattcctggtttggagatagaactgtgcagccggggtggttgttcagaatggttgggcctatacaacagggtatgttgtatagcgttggattaatattgtttaattacttaactgttttatcaaattctcaaatgtttgctaaatgctgcttttgcaaatgcaaccctattatgccatcctttgttatcctgtgcacttgcatatttgctgcgtggcttgctgagtatgtcatatactcaccttgcaatcattcatcagaggaagagttctacaatgaggctgatggtgtggaggattaggtgtagccttggtcaagctgcctgtggagtggagccgtctgcgccgtttatttattttccgctgcttagatctttattgattgagaggaactatctacctctgtaatgacattttattcgcttattaattagagtaatatttgtactctattatcaatttgttattgtgtgcctcggttgattcctggacgagggttcacacacaagtaagcgtttggaattttggatagaaattccgggcgtgacaagttggtatcagagcatctttgaccctaggttatgccaaatggttacccatagaagccctctgaaaaatattggaaaagtagaactgttctcctccctttctcttttaattaaaccaaactaatggcacatgcacttcataatctcttttaatggttctcattaaaaatttattccagtgttattagtactgtacatctactactgtactaatggctcatttaccagcaaaagttttacaatactgttttatttaatcttgctgcaataaaataaatttagcatgctgattttataattttctttcatttcttttgaaaccagttattcaaaattacaaaatttgtgacctcgtttccaactgttttaacttatctcgcaaagcttggtttactttatttacttacctttttactctgattttctaactttattcaaattaatccaaaaacttgtgctattaattggataaaggtcttaactccctcctttcacttgtctttagatgccgcgttacaagcctgagtacctgtttggtgttgagggttttgtctaggagttgcgtacgatgtcctttgtcattggatttgggactgctcctttttatgcccagattcctcatgatcgtcatgaagagaagtgacgagtcaaagtcaccttgaacagtaatagtgaagatatcccctcagtgatgtttgaagctggaggaagaaactatatccatgcatgtcaggaggtggcaaggatcgccataggagagctccgtgatcgctacagtgatcaattggccgacactgagtatcgccaccatcctcgccaacctcagggaagtgaccgtggcagttaccttgagactgaaggaattgagaatgatgctaccacgaagcatttggtggagatgttgtgggctatggatgaaagtcgtgcggagactgtgttagcagctcaagatcgtgaagaccggaatcgtggtaagatttgcaagctagaagacaaggtggatcgtttggagaaggaattagccgcattgaagggagaagcaccgccgcagaaggccaggattcgtctcaccgcaaggaagagagctctatttgtccctcgctatcaactggcgccaaaggttcgtgtggtggagaaagaagttgctccagctcaagcggatcctccggtcatcatcataagtagtgatgaagaagaagaatccaagcgcaacaattctaagattgagtgggtagcaactcaagatgatgaagacgagccttcaatcgacctccgatgcttggaagaactagagtgactagttaagtcgttgtcttagatcgttgtgttagtttgcttgcttaaagtttgcttgtgtgtgtgggtctcgcatgtgatttacatcagtggtgggatgtaattgcatgtgtttgtttgcttttgagtgttaggaagttggtgagtttagtggtgtgagagtcttcagtttgtaataatgaaactcagttaagatcaataaaagttaaagtaattctctgtcctaagtagtttccccggtttctcttcttgtgccctgtccatgccagatggtgaacactcgcagcaatgggaatggtcccaacaaccccaataacaacaacaatggagagaatcccactcttgctcaagttcttgctcaacagacacagcttatgaacatgatgatgcagcaatttcagaatcagcaaaaccaaggaaataatcatgtacctccacagaataagttagcagaatttcttcgtgtgaggccgcctgttttctctagtaccactaatcctgttgaagctagtgattggctgcatgccatagagaagaagttggatttacttcagtgtactgatcaggagaaggtctcatttgtatcacatcagttgcatggccctgcctctgaatggtgggatcacttccgccttaacaggactactgctgaacctatcacttggcttgaattcaccgctgctttccggaagacgcatataccattgggagtagtgtctctcaagaagaaggagttcaggtcgcttactcagggatctcgctctgttacggagtatctgcacgaattcaatcgtcttgctcgttatgctccggaagatgtgcgcaatgatgaagagcgccaggagaagtttttgggaggacttaatgatgagctttcttacccactcatggttggagatcatcctgatttccagaaattagtggataaggctattcgtcaggaggacaagtacaatcgcatggagcagaagaaacgtcggattgctcaattcaagacacaacagggaaataatcagaagccacgtcttactttaggaccccagtctatgccacagggaggttcttcgtctgttgttcgtccgcaacgtcagttcttcaacaacaatgctggcaacaacatccgtaatcaagctccacgtcctgttgcagctccagcacagcaacaacctgctaagagggagcaaggcaacaagcccgtggtgtgtttcaactgtggagatccaggacattatgctgacaagtgtccgaagccccgacgcgtgaaggttgtccctgcccagaataactctgctgtaccagcatccaaggctcgtgtaaatcatgtcgctgctgcagaagctcaagatgctccagatgtgattttgggtacgttccttgttaactcagttcctgcaacagtacttttcgattctggtgctacacattcattcctatctatgagttttgcgggaaatcatgagatggaagtagaagatcttagacgtcctttgatggttagtaccccaagcaatcaagcactctctttgcaacgtagcccctctgtcaaaatagaaattcaaggagtaccatttctggccaatcttatcttgttaaaatccaaagaccttgatgtcatcctagggatggactggttagccagacataaaggtgtgatagactgtgccaacagaaaagtaactctcaacagctatgatggtcgagttgtaactgttcatgcattgtcatctgagtctttaaggtcaagactgaaccaaataactttggaagagattcctatagtccgggagtatcctgatgtgttcccagatgatttacctggtatgccgcctaaaagggatatagagttcagaatagatttggtacctggaacaactccgatccataagagaccttatcgaatggcagccaatgagttggcagaagttaagaggcaagtagatgatttgctacagaaaggatacatcagaccgagttcatcaccatggggagctccggttatttttgtggaaaagaaagaccatactcagagaatgtgtgtggactatcgtgcactaaacgatgtgactatcaagaataagtatccactacccaggattgatgatttgtttgatcagcttaaaggtgccactgttttctccaagatagatcttcgatcagggtatcatcagttgagaatcaaagaggaagatatacctaagacagcttttaccactaggtatgggttgttcaaatgtactgttatgtcttttggacttaccaatgcccctgctttcttcatgaacttgatgaataaggtgtttatggaatacctagacaagttcgtggtggtctttattgatgatattcttatatactctcgaaccaaagaagagcatgaggaacatcttcgccttgcattggagaagctacgagaacatcaactgtatgctaagtttagcaagtgtgaattttggttgtccgaagtgaaattccttggtcacgtcatctcagccggaggagttgccgtcgatcctagtaacgtggaatccgtaaccaattggaagcaaccaaagacagtttcagagattcgcagtttcctaggcctcgcaggatattatcggaggtttatagagaatttttccaagattgctaagcccatgacacgactgcttcagaaagatgtgaagtacaagtggtcggaagaatgtgagcagagttttcaagagttgaaaagtcgcttaatatcagctcctattttgattttgcctgatccaaagaagggttttcaagtgtattgcgatgtgtccaaacttgggttaggttgtgttctgatgcaagatgggaaggtggttgcctatgcctctcgacagttacgtccgcatgagaagaactaccctactcatgatattgagttagctgcagtcgttcatgcattgaagatttggcgtcattatcttttcggtactcgtacagaagtgtacaccgatcacaagagtttaaagtatatctttactcagccggatctgaacatgagacaacggagatggttggaattaattaaggattatgacatgggaattcattatcatccgggaaaggctaatgttgtagcagacgctcttagcagaaaaggctattgcaatgctacagaaggacgacagttgccattggaattatgcaaggaatttgaaagattaaatttgggaattgtcggtagaggtttcgttgcagccttagaagcgaagcccactctaattgatcaagttagagaagcccaaattaatgatcctgatattcaagagatcaagaagaatatgagaagaggaaaagctatcggtttcttggaggatgagcaaggaactgtatggttgggtaagagaatctgtgtccccgacaacaaagatctaaaagatgcaattctgaaagaagctcatgatactttatactccattcaccctggtagtactaagatgtaccaggatctcagggaaagattttggtgggcaagtatgaagcgtgaaatcgcagaatatgtggcagtatgtgatgtttgtcagcgagtcaaggcagaacatcagaaacccgccggtttgttgcagcctttgaagattcctgaatggaaatgggaagaaataggtatggattttattactggtttacccagaacgtcatcaggccatgactctatttgggtgatagtcgacagacttaccaaagtggctcatttcattccggtaaagacaacctattccggaagtcgcttggcggaattgtatatggcaaggattgtgtgtttgcatggcgtccctaagaagatagtgtctgatcgaggcagtcagtttacttcaaatttttggaagaaacttcaggaagagatgggttctaagctgaactttagcactgcttatcatccgcagacagacggacaaaccgaaagggtgaatcagattttggaagacatgttgagagcttgtgctttagatttcggtggaagttgggataagaatctaccttatgcagaattttcatacaacaacagttatcaagctagtctacagatggctccttacgaagcactgtatggtcggaagtgccgcactccgcttttgtgggatcaaacgggagaacgtcaggttttcgggacggatatcctaagggaagcggaagaaaaggtaaaggtcattcaagaaagattgcgagtggctcagtctcgacataagagttatgccgacaatcgccgtagagatttgagttttgaagaaggagactatgtgtatcttcgtgtcacgcctcttcgaggggttcatcgttttcacaccaaaggaaaattggcaccgcgttttgtgggaccttataagattgccagtagaagaggagaggttgcttatcagttagaattacctcaatctttggcaggagtccataatgtgttccatgtgtcgcagttgaaaaagtgtttaagggtacctaccgaagaagctaatattgagcagatagaagtccaagaggatttgacttatgttgagaaaccaatccgtatactggaaacaaatgagagaagaaccaggaatcgagttatccgtttctgcaaagttcaatggagtaatcactcggaagaagaatcaacttgggaacgagaagatgaattgaagtcagctcatccgcacctgtttgccagttcttccgaatctcgaggacgagattctgtttaaggggggtaggtttgtcacaccctaaaaattcaaattatataaattgttgtttaattggaatttctagaatttattttaaaaaaaagtcttgaaaataagatatagttctaattaataaaatccaatataaaaagtggccagataaaatttcattaaatactttgcttaattctataattcctagatttttctgggatttatttgagctaaggaagtattttaataaatggaattgcatttaagaaataatttaaattgaaaaaggttttaaaaagtcttcttttggctttgggccgaaagtcggcccaaaacctctcttctctctctcctcggcccagccggcccagtccgcagccgcccgcgcgcgcgtgcgcgttcggtcgctgacaggtgggtcccacctgtcaggcccgtcgtcttcctcgggccgaaaccctagcgcgccgccgccgagccgccgccgctgtttccttccaatccggccgtttctttccttctccggtcgaatcaaaagaggagaaacaatctccgggatctcctctaccttttctcctttggaatcatcggttaaatcgctttggaaagctttgggatcgagttcgattcggatcggttttctttctctccaagccgaggtttccttcgtcgttgccgtcgccgtgggccttcgccgccgcctccgagcccctttaaaaggacccccggagtcttctcttttcgccgccaccctcgccttcacctctcgtcgccggaagagctctagcgccgtgtgccctagctttgccgtcgccgccgccgctccagccgtgcgccgccgtcgtttcagccgtcgccgtcgctcgggaagaccaccgtcgtgctcgccaagtcgtcgccgtcctcgtccgccccttcgccgtcgccggagatcaccggagcagcttcgccgtcgttgacccgaaggttcccgccgcttcctcctcgtcgccgtcgccgtccgttggtcttccaccgccgtttaggtcaccggtgagttcgccgtgttgtcctctacgtcttggtgccctccgtttgcgtcctggcgccgccgttcgccggcgagcgtgcgccgcccgagccgtctcctctgccgagccgccgccgctgtcggtgacgtcaccgctgacgtcatcagggtcgtccgccgtgaaccgccgtggacccgatcgatctcggccgtccatcttggatcggttagatctcggccgtccgttcgcgtgaaccgccgcccgtgcgcccggtccaccaaaccctagcccgctgacgcaataaatccccttttccttttcaaaaataattcattattgcgtcataattcaatttaaaccgatttaagtgttttaatccgatttaatctttaaaaattcataactaattcatcttagctccgatttagttggttcaagtctctaaatttttctaaaattgagatctacacattaaaaatatccacatgtactgttcatgcttgtttatgtgctgttttggtgattttgctcttttctgcttagattccgtcgtttccggagagtccgttttcgcagaagaagagtttgaagagttccaaggccagcaaggcaagtcacacagatcctaaacacaatcctttgagcatgttgatcctatatttaaattctctatttatttcaactgtgcatttattttcgaatgtcaccgggtggtgtgaacctgttcctttgttatggcctgttcgcattgattactctattccttgataccttgggttattacaatttgactagttgagctttatttatattggttcaactagatattagatataattgcttagccctgcttagaaacattagtacacattcgggataactaatgacttactaatatttcatgatggcttattgatagttcacgatggtcaatcgtgattagttaattaattaatgtgccaactaaaacctggtaatggtgggttgtgagcacatggttttgatggtcgtgctcatgacaattaaggaccggttcacgagtttcggttgtgaaacatttatcgtgccaaccacaagccagcatgggcaacggctttatcttttgtatagcatggttcattgcggggcaccagactgagaagtggcggagataagcccacgggggtcgctggggagtccatgccttgtttataagggggtgattatgatccaggaaggtgcgctgtaatggattgtgttatgcgaggggtattgtcacaactcctttccgagataccgtggtggtattgaggcacatggtgacatgatgtggggttgtgtcttgtgggtacagtggtacacctctggccagagtaaaactattcgaatagccgtgcccgcggttatgggcgggtctaacaatgtctttcgtgattagtctcacacctctcatcattataaaagatgctttaactggtaataatttgattagctcctggtttggaatggtatattcctggtttggagatagaactgtgcagccggggtggttgttcagaatggttgggcctatacaacagggtatgttgtatagcgttggattaatattgtttaattacttaactgttttatcaaattctcaaatgtttgctaaatgctgcttttgcaaatgcaaccctattatgccatcctttgttatcctgtgcacttgcatatttgctgcgtggcttgctgagtatgtcatatactcaccttgcaatcattcatcagaggaagagttctacaatgaggctgatggtgtggaggattaggtgtagccttggtcaagctgcctgtggagtggagccgtctgcgccgtttatttattttccgctgcttagatctttattgattgagaggaactatctacctctgtaatgacattttattcgcttattaattagagtaatatttgtactctattatcaatttgttattcgaacagaccacaaaggagtaggagcgatccttaagatgagagatagcgagattggcaggagatcagccaatggccgccctaagggccaaagccaccgaagaagaagtgagatgaaagctagcacggggaagatccacaactaatcggaaaggtgttgaactgaatttcgaagaaaaatggaccggcgaacggaagcgacgccaggcctcctcacgaatagcatcgccgggagagattccatcctcccggtggtgccggcgtcaccatggacgagatcaccggagatcgcccatagtcgcacaccgagaaaaccggagcctagcccagtcccctgaaaatgtagttccgacacaagttgaagacatggtgcatgacgatggttctgttgaggacaaaatcgacctagaggaaatgttacgtcatgcagaacccgaggtgctgatgggatcggctagagggttaaataactttgaagctttacaaaaggcagcaaaggaagttttgtacaatgagtcgaagggctctgacagtgagttcacaacactccggtcagttcttgaacttatgaggttaaaggtgaggcatggatggtctgataccagtttcgacagtctattagaacttttgcagaaaatgctcccgagacctaactcactaccatccagcacatatcaagcaaagaaactcatatgccccctttcacttggtgtggaaaagattcatgcgtgcgtaaatcactgcatactgtacaggaaagagtacacttctttagatgaatgtccaacatgcggtgcaagccggtacaagtcgaatagcaatactggcctaaaaccctctgaagcaactgagggacgacagagaaaaatcccgcagcttgtgatgtggtatcttcctgtcaaagaccgcattaaacggttatactcaaacccgcgagatgcggaactaatgcgctggcatgaagaagggcgcaagaaggatgggatgattcgacactcggcagatgctcgtaagtggataaactttgatgcttagtatagagagtttgctaaagacccacggaacattagattttccctgagtacagatggagttaatccttttagagacatgagcagctcacatagtacttggccagtgcttctcaccatgtataatcttcctacctggctttgtcaaaagcgaaaatacgtactactctgtatcctcatacagggaccccgacagcctgttattgatattgacgtatttcttgaaccattgttggaagagatggctgatttatggaaagagggattgaaagtgtgggacgagtacttaagggaatacttcacagtgaaggccatcatcttcgtgaccatcatcttcacagtttcaggtcaaattaaaggtaaaacaggatgtgtgatctgcttgaatggaacgtactataggtatctcccgggttccaacaagcttgtgtacatgcggcaccggcggttcttgaaagttcaagtgccttaatttggtttcggtgattaatgacaaatctatttatatgagactaacgtttttatgagcctttatttgactagtctcatttggatatgaaagtaaaaatgatgagaggtatgtattaaacttcacatattctaacttggtctctcttgtggatccaaaatatagtgtgagcttcctatttgatctttattgattatgtgcatatgcgttccttcatatccatatgtatgcacatcttgagggggagcttattctatattttgtttattataagatttctatcttgatttgaaatcatttttcatgtcatctctctatattgtttatatcgggttattatccatcaccaaagagagaaaagaatgaaagatcttggattaaacaatttgtgtaattgttactttggtgatagatgataaaccgatgtttatgggattaacctctcttttgcataagttgtctactaggttatttcccgataatgagatgtggaagacatgcattcttttgtgatggaccttaatcatgacaaggatgaaatgcatggagataaaacgatatataccacttcttatctcctacttttggataggttcatatatatgatttccatgttattgatatataagtgtgagactaatgtttactcgaatgttatcttatttagtctcatttacattgagaacatggagatcatgaaggtatatgttttatgttggtctacatcattactacatatgccttcactatatgtataggataaacccccattggtcattctctaattatgcatacacttgcatctcttgtatatttatttgtatgcatatatttagggggagcaaatcctatatatttattgtgcatgttctagatccatgttgttcacctattatttatatcgaatctttgcacttgagcttgcatacgagtatatgaaacttgtgatgttaatgaatactcaacaaacatatccatatctttcatatgcaaccggttggtcatcaagtgaaggatgacaaccgatttgttgagactaatgttctcctttgaggtgtgaaaaggaataggtcccactacgatgaggctaatgaatgacaccatgggttagtggtcaccaagccaaggacatcgtcatgttggcaagaatgaggtcaagcttgttatgagaataaagtcttgacaaaggatggacaagacctcggcataaacatggttcaaccggatggtcacaagtgttgatctcggctcaagcttgaccccaagatggatggcgcaaggcaaaggtataatgtggctaagaatgttttcttagtcttttcccggtcttggtgtttggtgtagaccggatttgctagatagacgtcgtactatcaagaggggtctatgaagcgagcttgtggatgatcttgtgccatattagttcatatgcatgtaggtgcattttgtgggcttgtctaaccaagtttgatgagttttctcaagtcctaaaccaagagagaagtgggcatgtccaataggagtgagtgacatcttgtgggtatgtccggtggatatcctttggagtgtgagccctttatccttgacttaagttgtgtttattgcatgtatttttcatgggttggatggccctttgaataagctttccatagagtccaagaacgccaaattccgagacccgagtcaagagatatcgccgttttactaacggtcagttaagctgaaaagtgacctgcggtctgaccgtgggccttaggccggtctgaccggtcctgttagccggtctgactggcgtgataaggccggtctgaccggccccactggtctgttgcattggtctggtttttggtggcgatacagagccgccagagtcgcaaccggtcagaccgagccgatggcggtctgaccgagcggtggacggtctgaccggctactacactgcggtcagaccggccaggttgagtgggctcaatgattgccctgtaacggctagttttctagccgttacaaagtagtccggtctgaccggccactctatggcggtctaaccggcagagcacagagttggggatttcgacataacggctagttttggtggttgggggtatatatacccactccccagcagcaagggtaaggttttggcactccattgcattatcttgaacccttgcaagagctttcacacccttgtgcacttagtttatctagtgaggtgttagagagtgagttaagccaatccaagtgcaatgcttcattgttatagctagtgtggcacttgatcatcctcggcaagcatcctagacttgttactcttggaggttgccgcctcctagacggcttgtggaggagttgccccgtgacctctccgaggagattgtggaggaggcccggcaccgtttgtgagtggtttggagttcgccaccttcggagtaaaggaagaactaccccgagtgatcgaggcttgggtagtcctctccgtgggccggctcccgccttgcccaccccttgacgaagggggcgtgcggtggcttcgtggttgagcggtggagttgggctcgcctcaacggggattaggaaaccggcgagtttccgaacctcggtgaaaaattccttgtctcttgtctcatttatttgttgcatttacatttgtgctatttacattcatatagacatatttgagcccatatcacttaggtttgcaaaacttaacttagttgttagttaaccttgcacctcaccttgcctagcaacttaggttagttttgtttaagtgccattaagttttaaaaccgcctattcaccccccctctagtcggcctccttgatcctacagttcctacgcacaaatcacaagtaccgcaagatgaaggcggagttcgatggtactaaagagactgatcctgcaccaaaacctacatcgggagaaaaggtgtgtgcaatgacagagaaaattgtttgcgagtttggaaaaatgacaaagaaaccatcaaaggggacaaagcgcaagaaacccgagaagaatacgaaacaaggggatagtaagaagcaagatgatagttcaaagccagatgataaactccctcccccattcaagaagcattccatattttttaagtacctcccgtactggaaagatctggaggttcggcatgccatagacgtcatgcatctagagaagaatgtgtttgacaacatagttgtaacattgttggacatgccaaagaagactaaagatggtctgcaatcaagaatggacctagtcgagatgggaatcagggaagagttacaccctcaagaaggagaaaagaatggcaaagtttatcttccactagcctatttcacactgacacctgaggagaagaagtcattttgcaactcactccgtgatgtcagagtgcccataggtttctcatcaaacatcagtcgactagtttcaatgaaagatttgtcggtatctggttataattcacacgactgccatgtcttgctcaccgtgtttcttgcaattgcaataagggccataaaaccggagcatttaaaggttgctatcacaaggttgtgctactttttcaacgcagtgtcacagaaggtcattagtctcgaagagttaggaaatctccgtacattcgcacatgagacatagtgccaacttgagatgtgtttccctccgtcattttttgatatgatggagcacctcattgttcacatagtgccgcagatggttgcgcttggcccattgtacctccatcaaatgtggtcatatgagcgttacatggcagttctgaagggttacgtccgaaatcgtgcacatccagagggatcaatggttgagggttatagtactgaagaggttgtcgagtgctgtatcgattacctcaaagatggatatgcaattggagtacctatgccccgacatgagggcaggttgagtggtaggggaacaataggaaagaagagatttgtcacccatgatcacaaatcattccaagaagctcacttcagcgtgcttcatcagtttgctatcgttgagccgtacatcgatcaacatgtcgaactaatacgcgttaacaataagggtcgcaccaccgagtggataatgaaagaacacaagcgtctcttcatagattggttgcgagacctagacttacctgagggacaaactaccgatgaaataactatgaagcggttggcttttggtccatcaactacagtaaattcttggcagggatatgacattaatggatactcatttagcacaagagcccgagataataagacatgtacgcaaaacagcggtgtccgtgtggagacaattgatgaagccggggaaaaacaatcatacttcgggtttattgaagaaatatgggaaatcgactatgggcacacaatgcaattccccatatttaagtgccagtgggtaaaatacccgaacggagtcaatgttgataagttcggtcttactgttgttgacctggcgagtgtgggtcacaaggatgacccttgggtactcgccaatcgcgtggcacaagtgttttatgtgaaagacccttcaaatttgaagaaagatatagtgctaccagggaaacaaaagatattgggagtggatggggttgaagatgtcgaagattacaaccaatacgatagtatgccactttatagtcagtttgtacagaagattaagaatgtcgagacatctactcagaagaccgtgaagccttacatgcgcatggacggtgtgggcaaaaatgttaaagggtaatgattgttgagtggcatgtaagcatctaagaagttagtagttatgtaatggtggtatgtaaggtgatgtgtgatcatatcgcaaattgacgaacaattgtacttatcattttggtggtatataattagtttgtactaatttttatgtgcaattaccatttgtagtgtaaaaaatttgttaaaaaaattaaattagtaatatttgaaaagtgtaattatttttatgtgcaattaccatttttaccatttgtagtgtaaaatatttgttaaaaaatttaaattagtaatatttttatgtgcaataaccatttatacatttgaaaagtaataatactaaggtttgtatattttgtaataatattaaggtttgtatattttggaataaatatattcaactatgtaccaattttcacaggcgggcggtccgcctgcgaaaattgttatacagagtagggtttacatcttcgcagtcggacggcccgcttgcgaagatcgttgccctatataagggcaagcccgaaaaaccaaaatttctaagtccaggcgggaaccttagaaattttggcgccgttaggctgccgaattttttcgctgccgcacgcctccgccgtccgtcgccgtcgcccgcctgcgaccttcactctccgaccatcgtcctccgccgccgctgaccgtcgtcgtccgcgcgctgtcaccgagaccgccgccccttgctgccgctccaccgcgcgtgagctccacaactctgccgccgccgccgccgacccatccaccgcgcgcgagctatacgccgcccgctccaccgccgccggcccctccaccgccaccgggccctccaccgcgccggccactccaccgcgcggcagccgctggcccctccaccaccgccggcccctccaccgcgccgtcggccgcccctccaccgccgccggccaccacctctctctctatctcgctcgcggccgaacggcttcatcggccgatcgtcgtccacgagcgaagacgtcctcggccgaacgacgtcttcggccggtcgtcgtccacggccgaacctcgtcgtcggcccttccttcgtcatccacgaccgaagctcatcgtcggctgttcgtcgaacacggacatgtgtgcatgtgggtgtttctttttatgtgtgtgcatgtgggtgtgagggggtatatatgtgtgtgcatatgggtgtgaatgggcatgaggggtgggtgatatgtgaatgaggggttatatgttgattgtgaatgtgaatttgggaatgtggatgatatgtgaatgaaattgggagggtatgttcaattttgcaggatatgtgaatttgtcaaattttttaaataacatgtgggagggtatgttaacattttttttaaaaaaaatgtggaggatatgtttgccttttcaattttttttaatcaacatgtcgatgaaatgtaactgtcaattagtgcactacttgataataacatatcaaattttgtacattgtatgtactaattaatttagcataatagtaagtagtaattagtttcgcaatttaaatttgtttgtattaattaatttagcataatagtaagtactaattaataatatttcacaatttaaaattgtttgtactaattaatttagtataatagttaaatttgggaatctcagagaatttaaatttgatcatacgacatattgttaatatacagtttatttttgtacaaagttgtttgtactaatttgagtaatttaaaatgtggacgataactcttttttttatattagaggtttgaaacgatggccgatagaactaaagggactgaagagaagggtttaggggagcaagagcagtcccttgctgttgtggttgctctggaaccaacggtcccaccggaaggtagttccgacagcgacgtagctgacgaagacgaggagtactcgtcgccaagcgatccttgtccaagcccaagcccaaagagaagaaaaaagggcaacggtgaagaaggcgacaaggactacattccccctaaagaaggggtaagtaaacttaatatgtaaaatgttcaccgtgataactattagcccgagctaattcgaaacttccatgtataccttctcgtaggaaacggcgccacggcgatcaaaacggcagccgaagaaaaaagttccgtcgaaagatgacgacgtaccagctaacacaaccggcacaaagaaaagcgaacggtcagcaaaagcgaagaaaaggaagggcgagagaagcgtgaatagaaaggatgaagggttccatgttgttacccatgtttcgcctaaaggagagccgctcgcccctaagacggcacgtgcgaaattcatttcacagtgtggcataatagtaagggaaaagatccccatcacggtcaaggactgtcattatgtatcgaatggggataaggaagtcctatggaaagagttgaagaaaatcttccagttcccggatggatcagaggcagcagtgaggaattgtgcactgcaaacaatggccaagtcttggtgtggttggaaaaccaccttgaacaagaaatttgtgaagacgggacgcacaccattttcgacgtatgccaacataaccccgaatcagtggaacgactttctgacgttgaagaactcctcggaagaaattcgaaggagccaaaagtatgcagagttggccaagaagaacaaatttcctcatcgcttaggctccgcgggatacgcaccaaaggtggagcagtggacaaaagaggaggaggaaatgaggaagaaggggcaaccggtaccaatggaggagtggacacagagatcaaggaactgggtaagaactagaactccgaagatcacggatgaaggaaaagtatcgtttgaaaatccggagctgcagagtgttgccgataaaatagaaaatttatccagttcacaaaaaaaagatctttcaagcctaaaagggagaaagatgtgctaagtacagcactgggtactcctgagcatgggggaagagttcgaggtatgttgagcaagatgagttggaaggaagggttcaaaaatgacccccacaagaagcgtgaagcgtacaaggataaacttagagacgaaggggctgcggagtttgaaaggcaaatgatggatttctgcgtcaagcacatgcttttgcctcaccccgaaaccaaagaacctgagccagattaccccttcaatgacctcaaggagaatacaccctgtagattgcacgttcccagattagaatgtcgaacaagctttgacgataaaggtatcacaaatgtccagcgtgatctttgccacttcatccaccatgagtgttgtcgtgtgaaaggacatttctttgacccagagggtgccctagcagcaagtgacgaattcaaggatcttcaggagtggaacactgctatgccataatgtaactagatgacgttatttgaagtgaaaatgtaaaaaagtattgtaatatatatattttggcaacacttttgagttatgcaatatatgtagatttctctgtaccaaatgcttgataatcttccaatatatgtatataataatctacctgcaagaatttctattaaataatttaaaagtaatttacgggcaaattattattaaatttcaatattttctacctatcttcgtaggcggaagtttttttttttgcaggcggccgattcctatttttgcagacggaccggactagccaatgtccacctgcgaaaattatcttcgcaggcggacggccgccccgcctgcgaagatcagcgatcttcacagtcgttggcttacaggcggacggtcgcctcgcctgcaaagacccttttcggctgcttgcgataacgcttttcctagtagtgtgcatttgccttttttattattatttttatatagtcgtgtgttttctattaatagagctgacagatctgtttcaacaaaacgcatcatgtataagaagtaaataacacacaatttttttagataataaataacacacaactaaactacacactagactttttcttaataaaacatgcataacttttaactttttgcctctacaccaatatttaagaatacacaggggtgaagctagcatcaaaacaagagaggtgcactaccattgaaaatctagaaaatttcagtataacactgtatattctagtattttcaagtgagaaattaaaaattgggggggtccatgtgcacccaagcacaatatagcttcgcccctgagaatacatgtttcactggtggagaaagcctttttactccctgttggtaacccccctatagtcccggttttccaactgggagtatcaatcgatgaataaagatagttatctttagtcccggttccaccaaccgggactaaagagatagtagcgcttttttttcttttgccagatttaatctctatattttctcccaaatctagtgccatgtatatccctaaatcaatccccaaatccctaattcaaagtaacatcccaaatcttaagttacttataaacataaatcaaatacatcacaaatcctaaaaaaaatacactcaaatcaa

SEQ ID NO: 8951 - DNA, 31889 bp, Oryza sativa
atctgtgaagtgtaggagaggataagggatagggattatatactacgtattaaattttagtctcggttggtaatactaactgggactaaagatcaatataatttttagtcccggttagtattatcaaccgggactataaagatgatctttactcccggttggtgtcaccaaccgggactaaagatcctcggccccctgacagactactgacacgggatgaaccgagagtaaagatgatttttagtcccggttgatgttaccaaccgggactaaagatcataaaatatcaagtgtggtggtgaagtagtgtataatataactccacttagctgggtttgagtccataattatgactaaacactggtggagaaaccatctttcgtcggtcagccgaattccacaatagtcccggatgcaataaaaaccggggctaaagatgatctttagtccctgttaaaaagggtaatgggcatatttgatctttagtcccggttcaaatgctgtcaggtcctgtcaggccccccgggatctttagtcccggttggtacaaccgggactaaagatcatacctttagtcccggttggtagatctcagggatctttagccccagttggtaacacaaaccgggactaaagtcccacccctatatatatgtcttcttcctcctccagctgcccgagcaagcttcaaaatttcttcacaaaattagacgagatgatccaggagaagttgacgggcagctaacgaagaagagaattcctgctaaggtgatgtggtatttccctataataccacggctaaggcgtttgttcaggaacaaggggaatgctagaatgatgggatggcacgctgaagagcgtcaacaggacgggatgctgagacaccccgccgatggttcgtagtggcgaaacatcgacagaaaatttaaagactttggaaaggatgcacgaaacatacggtttggtttgagtatggatggcatgaatccttttggagagatgagcagcggccatagcacttggcccgttacgatgtgtatctacaacctccccccatggctatgcatgaagaggaagtacataataatgccgattattattcaaggccccaagcaacctggtaatgacatcgatgtgtacctaataccactggtcgaagatcttaaactgttgtggaagaaggaaggtgtccccgtgtgggacgaggacaaacaggaggagtttaacctacgagcgctgttgttcgtaaccatcaacgattggcttgcacttagcaacctatccggacagtccaacaaggggtacaaggcttgcactcactgtatggatgaaacagaaagtacgtatcttaagcactgtaggaaggttgtatacatgggtcatcgtcgattcatactgttgaaggcgatgacccatgtatacatgaatcgacgatgacccatgtctacaatagaaacagaaagtacgtatcttaatctcatccatctcctgaaggcgcagcattacaagacgttcatactgttgccgtacaacacagagttagtttaattttactgtctttctataccaaatttcattctcgtacgaacatgctaagtgtttcatatgtaatgcatcccacgcacattgctgattcaactgggtgcttttactcttcgacctggaggcctgcaccgtcaacgtatatgactcaacggataaaaagagtctacgtttgacaaggttttcgaacttatagacaggtactgtcataagttcctatgttaattaagaatcttgttatagttaattgctactacaaatcatagctttaaactccatgtagggcttggtatcggctccgtcatttggtccgcggcaaatggagagaaagacttaggcggaagttcaaatttcctgtgagtacacatactctacatttatatttctccgattcaaatacatacaagtgtacattaattagatctctcgtcgtttgtcatttatttatagtgcgcaaagcaaaagcagggaactaacttgtgcggctactacgtgtgcgagtattgccactgccttgtagaccaaatcatcaccacaagagagctcgatgtacgtacaaataaattcaaaatttcattacgtatcgatttgttgtttaattactaatcaatttcatacattcatatagtttattcgcatgagggataacctgatcacacacaaggaatttatcgcggcggttcaagaacaactcatgggattcatcaatgaacaaatccttgatcccaagggtgaattctactacgacggaaatacaattcatatgtccttagcttctgagatagcgactactactacatcgaaatcgtagctagataggacatataatggattgtaattaatacatgactatgtttctatatgcatgtgtacacattttctataatgtaaatatatattttggtcatatatatatatatacatatgcatttgcataacatatatatgtataaatacatatatattatgcatgtacatatgtattgaaacatatataaatataatataatatatatatatatatatatgcatatatatgtattgaaacatatatatgcatggtttatatatatatatatatatatatataaaccatgcagcaacagggccatgcaaaaaaaaaaaaaggtcagctcgatctttagtcccggttggtgttaccaaccgggactaaagatcgagctttagtcccggttatttcacccgggactaaagatctatctttagtcccggattggtagtcccggtttggaaaccgggactaaagggggttacgaaccgggactacacacgctttctccaccaatgtcattgaaaaagaatggggtaaaatgtccgatcatataaggactacatactatttaaaatataggttgtttataaatgataaattgtgtaaacaattttactatataagtgttctcgtaatatcacagtgatattactgattttgatatttataggaaaaacctaagtagacaaagttgtaccttattgtccttgtccggtctctctatgatctaatcattttgaaattgtttataaataaacattgagcctaaaaactggggcatgtttttatcctcagaggttgggtgcggtggcaggaagcggaggctgaaaagcaaaactgtgtgtcccagcgaagactgtggccaagaatcgggttgggcttggcagccatggtgtaagggaaggatattttgtccccagttacccatggctgtgctagcatgagcttggttatgaacaacggagaaacgtgaggtgggggaagtcgggctcgacaccatggtaaagcgcatcactgtgattggggtaacaggtagagtttgggacatgtgtttagtaaggtggcggggctccgcttggcttgagccgtttggaatgtgataccattaggccttcttcggttaattctcaagagggaaggactgacggacgggattgacgggataaattccacatctcaataaaattgggaattattccccctccaaatccttctcaatccccttgcatgtgggattaactaaacaagaccttaagcactcggttagtgtctcgtgcagtattactcgatctagaataagaagggtagagcttcaggatatatttatttaaggataaatggtggatgatggcgagaagcagagaagaggcatggggtgctatttataggatgctatggagattgtcaacatgtcaaggcagtgaccgaatggaagggatgaactcaatctgagctcattcatggctacagcggtacgcgagctgggccgtggacacatgctggctcagccaatggcaacagacggctgaagcagtagagatggtgtcattgttgatgttggttgatgttggtatttcttagtgaggatttcctagtgatgaacaatatctacataagcttaatttaatcatatcgtaatacttcaggcactggcttgctcgctactaccagaacacgctctactctgtacccggatagggaggactgtgataatctcaagggctgtcaccacctctacaccaacctctaatgaactatgggatatgcagcaatcactagtaattaataacctagacaccatgtctatgcaattaattactactctagcgctagctaaacactaaagtactcactctctattaatgaacaatagtgaacaataatccagtatgttaatagaaactaactaagagataatcctcacaaagcaaatctcaattactcaataaagataatatcaattaaagcagaataattgacaaggtacaaaaggtaaagaggaaagtaccgacaacttcggaatccatccgactcttccttccttactttctccctattctattgtatataaaagatacaatagagcctcttataattcaacttaagctcggtgtgtcttgaaataaaacatgtgagctccttttatagccttcgtatgagggtttggtagttagaattgtcccaactaccccttcaccgtcattaggacgctatctggatcgtccacatggaaggagatggcgaatagcgccgatgttggtttggacgaaccacgtgagtttgattctcctccttctttatgtatatttcttctcaaccttagtagtttatcacatgcatccaaatatataccaacatttgtgcaatttgttagaaataaaccctgtcacgatgttggatattttaaattttcaggtttatacaggaattgacgatgttaatttggtatttaatagccgtcaaacagtgggcagcatgaataagcagccactcgtagcaagaagcaacacagtggcagcttgcatagccctatgggcgctagtgcgctgctaggcgtataggaggagcggccacagctgtccggcgcattgccttgcgctggcgctagcaaaggctagggagggtgagtatatgtggccaatggttgagccacccatgccagcccaggcacgtatcaactgttcatgatgcatgcacggcccggcccgtctggccgtgttgtgcttgtgctgccaccaaggctcgcatgctggcatgacatagcacggttgttctagcaggccgacatggtatggactgggcgtctgggccacatggatgatggtggtaggcaccaagaataaagaagagacggtgatgcttcttggtgtaggaatggagggcgagaagcttcttggcggcaaccggtgaacgtggaggttgtcatggtcatcaacgaggaataagaggatgcggaggcgtggagctggtaggaagcagcgaccaagcagtgcaaccgggatgcccattgttgagcatgcttcgagcaaccttgcaggcggcggcagtcgatgatacaggagtcgacagcagccgcagacgatgcgagagtcagcggcggggatgaacaatgcaggaggcggcagcaaacaaaaccctaatcatagccatctccatgatttcgtttaattgtttttcagcaatcgtccaagccttatacgagctaacatgcctttcttagcccacgtgcctaaaacaaggttgtgacggctccacactgcttggctccttactgtgcatagcctgggctccgactttggaacggctagcatgacactgccaatttgggcctcatcgtcatgggcccattccatgatgggccaggcctcgcctgttttggctagctataaggctgagtgatctggctaggctttgggtcaacttttttttttagaatttcacagtataaagcacactcacccctatgaacacacgcacgcaaaccctacccctatgagcatcttcgaagactgggccggcaaatcctagagattgacgaagtcaccataggcgcctcgctgttgacgggtacgtcgcctaccactgaaagcacaaatgccgttaaatcctggaaaatccgctcccatggagagtcgaacccaagacctaaggtgctacggaggctcttgtaaccactaggctacaggccctttcgcggctttgggtcaactttggataagagtggacatggatggagttgtactagggtttcatctagttcaggtgggctagaacctactactagaagattgatcgaaccattggcaggcatgaacagtgaagtttcacattatgtaaaacgtccaatgtaactccctcaacaataggtctataggtagaatttgtttcgcatccttcaagcacaagaacgggtatttcacacacctcaagtattaaaaccagtgcaaaattactccgtcaaatgtattactgacatggcatccacgtggcagctaattattaaagaatacattaaaaagatgtgggacccacctgtaagtgattctctctatcttcttcgtccaccctccccctctcttctctttccccaccagaatgctagtgcctagcaccaccacaagaacaccgatctctaccattgccaatgactccatcctcctggtccaccaccacggctagcggaacagaagaagtggcccagatgcagtgtatatcaacatgggtgcggctaccggatgagttggcgacaaagcatgtggaggagggggaggcaggcaccgccacaaccgctgctgaatagagattagctcatctggcgaggcaacccaggatacactcattagaagagattattttgatttggttggatttgttctgattggtttgctttggtcattgttgcaccgtcgatgatgaagctgagcaaggtgaccctcgcagcaaggtggggccagccggatctggtgaccgaacatgcatctggtgatggtatgagagagggcagcagtggaggaagaagatgaggagagagaaagtcacatgtgggccctatatttatttctaaaatttcctttatgattgggctaccacgtggaagccacaacagcgatagcgattaccttcatttattgtgtacttcacaaaaagtgaggtaggcggcaggtggtgataaccctgtacccatcctttgtatccatccacattcaagtatatcatagagccgtaggccggactcagcttgacaaactaggggagagccggtgcccaaatcaatattaacccatagaaatcctctgtagcttaagcctaccatttgttgttgtccttggttgaatcttattcctagatatacacacacgttcccaatgatttgatacctgtcacgcccagaaattctcgaaccagaatttctaagctgaatgtgcattaaatccctgtccaggaccagccagggtacacaaacgacaattgttgacctacagatccacgtcttacaaaaatagaaaagattacaaatgcagcggaaaagataaaagcgagctaaaccgggaagcttgacttcagcagcgggcgactccactccacaggcaatccttgacggcagcgacgaaaccaactttgacaaaacagctccaactaggaagatcttcagctctggggtgggggaaaagagagcaagactgagtactacccactgtactcagcaagtcataccggaagaggaggtatgatgcaggatataaccaaaggaggctagaggttcttttgcataaagctagcatttaaaagcagtagttgaaagcagtaaaacagttgtagtaattaatcaatattaaccaaacactgtccaacgctacaccacgttgcaacaggcccaaccaaccacctgaactacaccagttcattaagctaaactaggggtgagactaatcacggtgaatctggttgatcgcccataaccgtgggcacggctattcgaatagttttactctggccagaggtgtacaactgtacccacaagacacgattccacacatgtcggcatgccccgaagtatcaccatgatactgcaaagggggaaatcgtgacaagaccctccacataaccctcccctaaccatccacaccacgctaaggtttcacccccacccctcaaaaggcagtgggcggtcccctcttgcgccgcggtgaatccggcagctggacaaccggacaccccggccgacccaactccgtcacgcccaccctcgccaccggtgcctaggaaagggtcgagctatacttcagatcaagcagttacccactcccgcttgtggtaagcacggtaagtctcccagggtttcccgtgaaccgatccttaattgccatgggtgcgaccagcaaaaccatgcacccacagcccaccattcagtgtattttaattaactaacaccattgcggtggcaccaatctaaagctatgccaatagacaaagtctatgtaataaggtgatccccatttgtgtgctagttgaactaagcatggctaagcatttcctaaaccaacatctaatcattttgatacccaagttatcaatggcatagggtaaccaatatgtggctgagaaataggacccatcccacgttacattgtaaaagaatgcaacatttaatagaaatgcgggatatttgtaaattgggtacaatatgatcaaacgtattgcatgacttgccttgctctcgaactgatgagacctcagcaacgtcttcgagaaactgcggatcgacgaaacggccgaaacctacgcgacaaacaaagcacacaagcaaaacatgctataagactacagaaacaggaacaaaaccatttttaatggattctttgcatttttcttgatttactgagacttgaatggacttaaacggagctcggatgaattacttatgaattttagaagataaactgtgtttttactaataaagaaaagtccttaatcactttattgcgcaataaagcccagggctgacgtcatccaagggggggggcggcgccgacaggcgggccccgcttgtcagcggctcaagagaggggagagagaggcgccggcaagcgggccccatgggtcagcggcacaaggtggccggtccaccgtggaccgggaccacgcgggtggtccaccgccggtccacgggaccgacggtccggatcggccgggaggccgatcggacggcacggcggcggctaggcacggctcggctcggcttcaaaaccggccggccggccatggcaaccggcggcgacgcgcacggtcgccggcgacggcaatcgacggcgtgggaagcgaccggaggacggggcgaaaagcggcggcagcggctgaaggcgacggcgcacgcgcgaaggacggcggcgcacacgggagagagggaaaaaaggggagcggaggggagcctctccggcgagcacggcgaccaaagcggaggatgaaaggcggcggtgacacggcgacgaggaggggcggacgggcggaggcgacacctataggaaaggaggagagggattaggggtggagaggacgaccgcaacgaccaaagtggccggccggagatggatgaaaaaggagagctcaccggcgagcgagggaaacggggtttcgggggtgattggcggcaaccaagcggcggccgaggagcggacggcacccgcgagcgcgacgacggcggcttcacggcgcggtagcggctttagcggcggtggcgcgcggccggagacggcggtaggcggcggcgtaaggggcgagcggcgcggcgacgataggaagcacgggagagcgcggcgaatgagggaaaacgaaagagggggctcgggagagtgcttttatgggcgagggaggggaggacgtggccgggaaccctcccgatttggccggcgacgtggggaggagagagagagaggggggtgggattcgaaatcgaatcccgccctctcgagcgcgcgcacgggccgggagatgtggggaaggtgggcggcgacgcgggcgcggagtggggcgtgaagagggacggagaaggcgagcggcgtggggaggtggggcgccggcggttggggctcggctccaaccggctagaggaggaagacgaccgacaggtgggccctacctgtcggcgcccgaaggagagagggagggagggaggacttcggggaggggagaaggaacgggccggcccaggaaaggggcgccgagcgcggggagagagatgggccgacggcccatctagagaaaaaggaaggaaaagaaaagaaaaagaggggaaggattttcctgggattaaaatattgcgcttgctcatttttaattggttaaaattatttccaatgctctgaaaattccactaaaaatcttgttaatgcattggagcatggggaactcaagaaaaattccaccacgccgaattcaattattaattgcatttattaattagggaattagctctaggttaattaagataatttcttcggacgatttatttagccaatttttaaagcaaggagagggggaaacttcagggcgtgacacacactcagctcatcatgccaaccccatattagatacttcggtggtgactcctcgaggttacggtatcaactatcggccgttgctattgccatgtgaactccactgtctttatcatagcccgccgccacatgcccagcttctctgaagtaagacgagcaacggaagagcacctgtagtgtcactgtggctatggtgacgattgagacaaatggtttgagtatttagatgaaggttttagattttctttttaattgattgaaagtttattatttatttagatgaaagttttatatattaattaaaagttctttgatttgattcttagagttttagatcttgaattgggatttcctccctctagcttgtctgtctctctcctttccttcttccccctctatctttccttttctttttattattatattggaataagttcatctaaggtcccttaacttgtcaacgaatctgattttcatccttcaatcacaaagccagatacaacgggtccctcaactatcaaaaccggtgtaaattaggtccctcggcggtttcgatagcagttttgactgacgtggcgcctacgtggctaatttgactcggtctcgatctgacgtggcactgacgtgacgcatacgtggcaattcaattcagaaaaataataaaccccgtgagacccacatgtcaatttcacacataaattaataaaaaatggcagggcccacgtgggccccacatgtcatttcacccctcttcttcctcctctctctccccatctcccatctcttcatctctctcccctttcctctctcgctttggcgctcgcgccgctctcctcgtccccaggcctctccgaccgcctcctcgccgcccgcgacgagctccacgagcggcaggagcacctcgccgctgcctcctcgtagcccgacctcgccgctcgacttcgtgctgcccgcgcctcacccgaccccctcgccgcctctgccgagctcaagcctctcttggtggatcccaagggatctgaatctagtccagacgaacccatcgccgtcatcggcgtctgggcacggttcatgagcaaaggcggctgcgccgtcgctggtccatcaccagcttctcgctgtccacgctgaccaactcgctcgtcgtcggcgtgcccatggcgcgcgccatgtacggcgagtgggcgcagcaacttgtcgttgtcagctctggccaaggattacagcaacacgcgcacttcaactagctggagcgaaaatctttgtggacaaacacagaagaatttctcgatgatgaacgccttatctagtttttctcattcacttggcacttaactcaggagattacatgacttctgtagcccagcagacacaccactaagaaaaaaacttcggccgcatcgtacgcgcacgcagcacgcgatccaattaattcggcagccactagctagccgcatgcacgaagctaactgccacacaaaaataatgctaacaattgtccagctctccgtcttccaggccatcgtctggttcacgctgctgctgttcgtgctcgagatcaggaaggccgccatcggaatgtacgtcgacggtgcgtcgtcctctgacgagtcgtcattgtcgtcgacgatgacgccggccagcaaaggacgtcgaggccagcgctggcgccgccgcatccacggtcatcgtcgtcaccgcggcgagcggcgccggcaagtcgtcgctgtggggcgctggtgaaagtagtggcgccgctccctcctctccggccgacgccgccgcgctccgctccctcctctcccgctggcggtcatcggggagaagggcggcggacggccggcatgttagggactctcaagaacaactcagatatatgcgaaattgtggcaactatgtggtatttcctctcagatccgacaggatcgagccgccgccgcctacgcctccagttgccaattcatcgttcatacaagtgttcatcgtttgatttaatacatccctctccctcacgtgacagctcacaggcgagctggtgtcttacgccacccattcagggcctaacactcttgggttgggcctacgctcccgaaccggccgatgaccattgcatgtggagatgtcgctttgagaagtatggacgtcctcctcctcttctgcattcagatccttcccgccaatggcaccaccctcaacagttgacagtggagagtccctgacaagccccaccccttgagaattggcttgcccccaagccaatgcagcaggaaatcgagcatgcaattcttcatagtcttcccaagtggcatcttctggaggggactcagaccactgcaccaaaacttgagagatagtagaattacccttcttagcaagccgcctgtccagaatgcgccaaggaacttgcaaggcagagatagacgatggcagatgagactgaacatgtcctgtaaagccagtagcagatttcaattgagacacatgaaaaactgggtgtatagaactggtgggaggtaactgcaatttataagcaacagttccaatctgtgctgtaatttgaaatggcccaaaatatttgaaagccaatttgtgattagctctgacagccacagaagtttgaacatagggctgtaatttgaggtacacccagtctccaatagcaaaagtacgaaaactccttttcttatcagcaaaatgcttcatctgctgctgtgctctgtgaagatgctgttgaacaagcttctgcatcaactgcctttcctttaaccaaacatgtaaatcaggaatggcacaatcttgtaaactgatgccaaaatgacaaggggaatgaccatagagcacttcaaagggagtagactggacagcagagtgatatgaggtattataccaatattctgcaagatgtaaccaagctgcccacttgctaggagctgaatgaacaaagcacctcagatagatctccagacattgattaaccctttctgtttggccgtctgattgaggatgataagcagagctaaaatgcaattttgtaccagatccttcaaacaaatgttgccataactgactggtaaatactctgtccctgtcagagattagtaccagtgggagcccatgcagcctgaagatatgcttcataaacaatttagcaactccaagagcagtgaaagggtgatttataaggaagaaaatgagcatatttggaaaacttgtccaccacaactaaaatacaagaagcatgatctgaaacaggcagaccttcaataaaatccaaagagaccacctgccaagcaccctcaggaacaggtaaaggctgaaggagaccaggatatttagctctatcaggtttagcctgtaaacatatctggcactgctgcacaaatagtttagtcatttttttcatactgggccaagcaaaaagttgctttagtttcctataagtaacagggaaaccagaatgccccccaattggattggaatgaacttcagttagtaatttcaattggagctgtctgttattcccaatccatatccttcctttatatttaagcaacccagcatgaagagagaaatgttttcttgcattgggctgtacagttaattcagtgagcaactgactggaataagaatcactggcataccctgtggtaacttcctggagccaggttggagtacaggctgaaatgtggcataattcttcctcatcatgctgaaatttcctagataaagcatcagctgccccattatgagacccccttctgtaacaaatcttataagatagacccaggagtttggtaaaagctttatgctgccatggtgtatgcaaacgttgatccgagagatgcattaaactatgatgatcagtgagaataataaagtcaccaagttgcaaataagatctccattgatcaactgccagtaaaactgccatgcactctttttcataagtggaaagacctttagttctgggacctaaagccttactgatataagcaactgggtgtccatcttgagagagaacagctccaatgccggaatcagaagcatcagtctcaactgtaaacaccttttgaaagtcaggtaatgccagaacaggagcagaaaccaaagcctgtttaaggttatggaaagcagcatcagtttcaggagtccaaatgaaaggaactccttttcgcaagagattagtcagaggcttactgataactccaaatcccttaacaaatttgcggtagtaaccagcaagacccagaaaacccctaagttttttcacagtagtgggcaccttccagttcactacctcctgaatcttaccttggtcagtatgaactccagctgcacttatagtgtgacccaagtatgtcagttgtttctgtgcaaaagaacacttggataacttgacataccactgatgcttggagaggagtgagagaacttgagcaatatggtccaagtgagatgagaaatcagggctatagataagaatatcatcaaaaaacacaagtgcaaacttcctaagcacgggactcaatgtctcattcattgccccttgaaaagtggcaggtgccccagtaagcccaaaggacataacggtatactcataatggccagtatgagtctgaaaagctgttttatactcttcaccaggagccatgcgaatttggtggtatccagctctaaggtcaagcttagtaaaccatttagcatgagcaagttcatcaagcaactcatctataacaggcataggataagtacctttgacagtgatagcattcagctttctgtaatcaatcaccaatctccaagtaccatctttctttttgactagaagggctggggaagaaaaggcactatgacttggttggataaccccagacttaagcatatctgaaatctgttgttcaatttcatccttgagagctggattaaatctgtaaggtctcaagttaacaggggctgctccagggacaagaggaatggtatgatcacaatatcttttaggaggtagtccattgggttcagcaaaaactgcctgaaatgaatcaataagttgctgtacagcagcaggaatgggttccttagtcacagggtcagaagaagtgagttgaaccaaatacatgagagatccttgtctgaccatacccagacattgttctgtggaaataggagagcaatgagaaacctgggatacaataccttgcaacctgacaggctgtccagaaatagtgatatccatccatttgtccacccagttaacctgcattggactgaattgttccagccaatccatgcccagaatgatatcataaccaccaaggttcaggagcctgaaattgttaataaagttatgtccctgcatccaccacctacaattggtaacttcatatgagcaagaaagagtttcgccatcagccaacttaacagataacttgcttctcaagggtttaactccagccaatttgagaccaatactttcctccataaaggaatgggtactaccagagtccacaagcataagtaattcagtaccctggacccatcctcttaatctgaatgagttaggagattctgtaccccagatagcctgctgagagatagccattaaatcactggtgtcctcacagtgcagaaactgttccccatcagacacctcaacagttttaacatcttgcaaggcatctagcaattcttggaccacatgtaattgcacagcagtactacacttatggtctctactccacctttcaccacaagtaaaacagagtcccttggatcgtctgtaagcctttagagcagagagcttatcatctcttgctcttgctgattcagtgcccctcctatcttcagattgtggtgataacaattgtttaggtggcaaggtggatggaagaaccccagcacccttgtgactattgcgaataggtattgaggtgtcaggttttttatactgagtagactgaacaccctccaaggcctcttcctgaagtaaggccacagcacaagctgagtccatatcctggggtctctgaactaggactacaactctgatatcacttctaagcccttccacaaatttagtgacaaaatagactggcaatagagaattatcataagcaaggagctgatgcattagactatcgaatttctcaacgtattcagcaactgaaccatcttgtctgatatggaaccattgtctaataagagcttgttgtctatccttagagaatctggaacacactaaatcacagagacccacccaagtaataccaccaagctgatttcggacagattgcaaccaaaatgcggcattaccacaaaaattgagagtagcaattttaacccaatgaatttgctggataccaaacacatcaaaatattgttcgcaattaaccttccacatctgtgggttgtcaccacaaaactgggggcatgtcatgggaggaatagtgctactcaaattgtaactagcaattccactgtcaagagaaggtgttctaggttcaaatccaaaaggagcacgggatagagaaaaattttcattcataccgaaagaaggggaagtcagatctgtgttgggttggttctgctcttccttgataattccagatcccccagtcttggcagtactagcatctggctccaacttggtgtgacgcatcagactgccctcgaggtgctcgaccttggtactcagcgactgcagcgaggcgcccagatcttctaccctcttctccaccgccggaatacgagattccaccgacttcttcagatccaggtactccgccctggttcggacctccgcttcctctctcttcctttcattctctgcaatagttttgaacaagagatcgaacttggcgtctaaatccattggtgtgtgactctggatcctaacccgcgctagcgctccgaattcagccaaccagattgagggagccgaagcttttgtggatcacacgccaccaaggtagcaggatcccacctctctcccggaaattttacggctaaaccaagaggattttgcagcgcgaatggctctgataccagattgttagggactctcaagaacaactcagatatatgcgaaattgtggcaactatgtggtatttcctctcagatccgacaggatcgagccgccgccgcctacgcctccagttgccaattcatcgttcatacaagtgttcatcgtttgatttaatacatccctctccctcacgtgacagctcacaggcgagctggtgtcttacgccacccattcagggcctaacactcttgggttgggcctacgctcccgaaccggccgatgaccattgcctgtggagatgtcgctttgagaagtctggacgtcctcctcctcttctgcattcagatccttcccgccaatggcaccaccctcaacagttgacagtggagagtccctgacacggcagccatcggggacaagggcgacgaccggtgggaaggagctaggcgagctccctagtcttaccggcgagcgcgtgcaagagcgagatggccggcggccactcttctccattttcgccccgccgtcgtcgcaagagagagaaaaagaggggagatggggagagaggaagcagaagaggaggggtgagttagactgacatgtggggcccgccattcttttattaatttgtgtgaaactgacatacgagtcttacggggtttattatttttccggatcaaattgccacgtaagcgtccacatcagtgtcagatcgagaccgagtcaaattagccacgtagatgctacatcagctaaaaccgccattgaaaccgccgagggacttaatctgcaccggttttgatagttgagggacccgttgtatccggttttgcggttgaaggacgtaaatcggattcgttgacaagttaagggaccttagatgaacttattcttatcatatttcctctggttttcctggccacagctatggcccatttccctgtctctgtggccggcccaactcgcgctgtgctcccaggcccccatgccacgctgtccgtacccctgcctgcgtgcgcaccgtcgtgagcgccatggctatacggtcctttccttcctcctcttcttcttcgtcgccggcggcccggcgccatctccgttctgccgccgcaccgtcgaacagaacaccacctcctcgaagacattctgcaatggagtacggcctacggcaacattggagccctccctctcaatcctttccaattatggacatataccgcctccaactccaaatcggactcggactcagcgttcgagttcgactcggattcggagtcggagtacgtcgccgctccttaaaagcacggcggcgctcaccagctagagaccatccaacgcatccattccgtcctcttcgattgctgctttcccgtcgcgaccatggctcccgccggcgactacggcgcctcggtgagcatgatgatcagctacggcggcgcgatcgtccaggccgacggcaaggccaaggcggcgtactacgccggcggagtccaccgcatcgtcaaggtcggcatgtccgagcggctgcccggcctccgcgcgcggctcgcggcgctcgccggctgcgccgacgtgttcatccgctacgcgctccccggggagggcctcggcgtcatccgcgacgtggcggacgacggcgacctgtggggcctcgtgtcgctgctcttctactacaaggaggtgcccgtgtcgtccaagcccggccgcatcagggtcttcctgttcgccgccgatcacgacgcgccgccgcaccgaaccgcgtcggcgccgtcgttaccggtgctggtatctggaagtgcctctgctgctcctcccgttacactggggttgccacgcagcgcgtcttcaccgtcgctggcgacgtcgggctcgggcaccgccgtgaggatgaaggtgagctacggcggggagatcatccagcagcagcgcggcggatcagcggcggcgtcgtgctactacgccgggggagttcaccggatcgtcagggtcggcctgtcggagcgcctcgccggcctccgcgcgaggctggcggcgctcgccggcttctccgactccgacgacgtccgcatccagtacgcgctcccgggagaggagggcctccacctccacgacgtggcgagcgacggcgacctgtggagcctcgtgtcgctgctcttcttccacgaggcggtgatggcctccagcaagcccaagcaaggccgcatccgcgtgttcctcttcgccgcccacgacgccccggcgacgtcgtcgacgtcgcccaccgcggcgccgctcaggaggagcgcgtcgtcgccgttcttgccgacattggtggaggaagacgaggacgacgacgacaacgacggcaacacggacacggcggctgcaactcagacgagcactagccgtgtcaccgccaccgtgggcatgcggcggagcgcctcgtcgccggcgctggcgacgacgtcatcgagctcggacgcggcgactgcctcgacgtccggtggtgcaacatccggttcatcaggagacagcgacacaccggcgatgacatcttccacggcagcggcggcggcggtgcagttcggtccggtggtgcttgtgccggtgatggtggtgttcccggtgatccccgtgtacgcgattggcgtggtagattatcgtagtgtgctccttgtagcgtagtgaaacgccttgtttcctactgccaatctgagctatgtacttgtctacttgattttgtacaattcattcaaggttattattgtaaaccacattaccaatgtactcatcgtgtgttcactgttcaacggtattatatttcattcacagaacagattgcaacctaatcgccattagcatcgaaataaagcttatgtattgtagtgataaatgaatatatagcacagaaaacgtgaagtaaagcgtagctcaagttcgttgtgatggaccgggttcatccgggtcaaatcctggaccagtttcagcccacccaaatttaaattctagactttaaaatcgataaatatgctaattatatttttaatgatatgtatgtcaatagtgatggcttcatgaatgcaagatataccagtgaaccagtccagtttttcagaaatgctcagaggtagcttgttgcacatgttgtgaccacatgcgtttgaaaaaatagcacagaaaacattcgcagaatattagcaccatgcaattacaacgcaaaatgttgtaaagaatacgtagggctacacattggtgcgaggagccaacaaaatgctttttgccgcactggacttttttcaacgctttggcacgaacagattacagattgtgtccgggcctgctagttgcagcagaagaggtatcaacttcccagtgaaacttcacacagttctctagcttagctacacaaatgaagcaaacaaaggaattgctgcatggtagacagatacgacataaaatcgaactgaattggcgagaatcgaagagatgtccccattgacatatacagatgtaatccagctttttagacctacattttactaccgagttccttcggcttcgcagctttccctgactccatatcctgcaatgcagttagaagggggaaaaataagtcaaatggagagcccaaatataccagttgtctaaagaaaaatatagcaacacttgattatgctaaataacagtgaaccaaaggattgcaaagccaaatatttaattacaagacaagaatgtctcctagaccagacaaactgcatgggtaaataaactcagcgacattccacttcggcattgatgtcagattgtcaggtcaagtctgtctggtgtgctcagtgtccacagttcaataatgcacgaattactttctttgtgactgtcacaggctcacagcacatagatcagaatgcagagcggctctggtcatacagtagtgttgtaggcaatcactgaaggtagataggccactgaaaattaagaacaagccatgtctgcatccaacacgaagcacatgcctaaatgttggcagtttggcacctacaataacaaaactataaaagttcaaagtgataaagaattaaagagcgtggcatgtctattttcttaggttgagggaagtatagactaggcaattaactttaagcctaaagagatactaacatatcctataatagcaaaattcattttccagatgttaggaactggggttgatccaaagctcctaaggtagtaatggtgctccatgggagggcgaggatggtgcatccaccgaaccatgacagtgaacagctgaacaagagagagagagagagagagagagagagagtttggcgataattctacttatccttcttattgatggagttctgccttctaaaatcgattaataaccttgctaacaaacagaaaatcttaggagctaaatcttatctagcttaacattgaaattaatccaaagctaatcctgattgaacgaaaagacaaggatgacttctggcgcacctagcacctggcatagggaattcccaaaataagaccagatctttccacaaagttttttcctaatttggatccccaccacacaatagtgaatttttcttttgttcaaaagaaaacacatatctgtagatatatgttctaataagaagtctggtaagaaatgataggacctgcgtgctttggcttgataaaaataacagacgatatgtctgcaactgcatgttcacacaaccttgtacgaagttacaggctatatgactggtgtcaataaatacttctatattatgttaagcattttttacaataatcagatctcttttgtccatgttagcaagaaaatttgatatgtacaatggcatgtattgccacgccaaataaattttataccagcttcacaaagaagtccaatttgataattggtatggaaagaccttttctttgcggggatggataaaaagactctgatctacatttagctcatcatatccagatttttaaatgtaaaattcgtgctcatgttagcttttcaaattttgatttcagaaaggtattttggaagcctggttctttcaatgatggaatccatcaatgtcatctgagactttttattggaacacactaattggtacatcatagaaacattatgaccaacactagcaaaagagtgtgttaccatatcacagtgaagactaattgtgaaaaaatagaattagtatggtttgctgctatataaatacacaataaataccaatacttaggcaatgacagagtacaggaattttgaagaatctaatattgcaaacagttcaattcctaaaagcacgaggtacctgtccctctgcattctaaatagggacttaactcttctacatatcccaacatgtatgctttaaatagaagaaattgaccatccgtaattaagatatatagtctaatccccataaacaaggtgataaaatgtaattatgtgtaggtgacaaatcccaagatacatgtggagattgtcaaaggaatgaaagtgtgcaaacaaccaatgcaaattactacctttcttattaacaaaggcagtcaacaatatctacaggggggaggacatagatgaatctaaagcaacatttcaacttaaatctaaatcagtttcaccatacaaacatatttaagaaccaatttagcaagaactaataataatcagccaatcaggtactagtaagtaacacatccagtggcaaacaagttgtgcttccagtactgaccaagtgaccatacattacttaatccagcccatgcatggtagaccaccaagaaaagaatattaggtagatcaaaaggggaaaagatgatgtgcaatgcaatacatgtgtcagaaaacaatacggggaatagggagatgcatgatattttagtgcagtacatgggtcagaaacaatacagggaaagaaaaatcacaattgactagcaccaccaccatccaaaaactacattctccacagaagctttgggcttgattaccaaccataatactacccacccactactaccagcatcctgtaatgttgtaacccttaagtagcactaaatcgccgcacttaggattacaaacggtgacagctacaggcctaccaccaccgacaattataaaccacacggaatcacgaatgggctacaagattccactccagtacaggatcagagacagctgcatcccaactcccaacgctgagccacaggacagatggatctttgctaaactcacgctcaaatcaccacaatttcgctatccgtgcaaagcattgatgcagtttacaccatcaaattgaaagtaacaagactgaaagaacaaaaaaattttgcagaaggggtagagtggaggcgagaacctttccgttgctctcatagtactcgttgagagcccactggtacttggattgatccagcccgaaccagttcgagatgtactcgtccaagctggcgtgcgctgcagcgataaatgctcaccaaatcaatttcaaaacccacgaatcgaattcgaatttcgaaaccacacaatgaggcggccatcggagagaaaatcaaatctctcgcgcccgggggggattcaatcaatcacccaccttcttgcacgcgcgcgaccgtgtcccagaacaaggcgagcatggatccatcgggcctcgcctccgccttctcgaactgcggcggcggcacctgcaccggcggcggcgtcggcgggggcctaggggccgagagcttcgcggaaggcagtggcacctgcaccggcggcggaggccgaggggcggcggcggaggagagcttcgcggcgggcagcggcggtgagaccgtcttcaccggcggcggggtggccagctgcggggaggccgccggcgcctcctccttgaccggcggctgctcggcccgcggcggagagggaggcggcgtcgaatcctcggccgcgcggggggatccgctgggggtggtgaactccgaccgcggggagtccggcgacccctccgcctccgcctccgccggcgacggcggcgtgatgaagaccgtgaggttgcccgccttgcctatcaccggcggcggcggcggggtcgacgccatcaccggccgcgcggggaggaggtagggttcccgggggggatggggaggcggcggagctcgtgtgggggagtgaggaggaggagaaggctgcgagtgggagacgccattgcgggcgacaagggggagaagcttttgttccgcgctttttcgtgattttttttctcctttttcaaatctctttttcaacttttcagcggcgtatttctagctcaaaatagtactcgctccatcctagtagtattttaagtgtagttgtaagggtttatgtgacgttcattttatttaaaaactttataaaaaaattaaaaaataaatcacgtatagagtattatttatattttatcatctatagcaataaaaatattaattataaaaaaattaataaaacaggtaatcaagtgttgagggagtaatacagtagaaaaaggtttgtgaaaaggtatagctgcaccgagcttttcgtgcacccggtgaaggggttgacttgtgggcccacaggtcagtgggggaaggggtagtgaaccaggtgtaggtacatgccagaaggatttcacgagagagggagggaaagggcctcccgttgtcctcggatccctttagaaaaggcagtacgcttttactgttttgcccctgaatgaggggcttaattctgcttgttcacactctaacgcctgttgactttggctaagagcctgtttattttcttgactctaaactactccctacatcctaaaatataagtgatttggttgaattggacatattataatactataaatctgaataaaactatttataatagtaggatatgtctcatctaacagaaatctcttatatattaggacggaggatgtacaaatttcttgttttctgttagagcttggaacaattctaacatatagaaccgaaaatgttttctgtgaaagggcatgtagcctagtgattacagtaagcttagtagaaccctaagattctgagtttaaatctccataggagcgaatttcatattgggttatttgatagctaagttatgtatttaataggctaagttcctaattaaaaaaaggttgcatatatccggttggatatagaggccaggtaaaaaatacccttctctaaaaaaaatatagaaccgaaaaagtagcatatatccggttggatatagaggccgagtaaaaatacccttctctaaaaaaatatatagaaccgaaaaagtagagtaatataaatgttgcacataagaggtttgagtggatagaaaatttcatatgttttcttcctttgacttgtgggaaagaaaatttcctttggtttttttatacctacatttctataaaccgaatgacactcatataaattaatccttaagaatctaaatcctttggttttcctcctaaatgaataggcttttttacgcttttcaaaatgttaaacaacacatttttttgaaaaaaaaatatataaaaagtttctaagtccatcgagttttttaatagttaatactttaattgattagtacactaatttttttttcttgtttcgtgtgcgaatgaaaatatccttcgaatgcagcctaaggctgagttccaactgaaaactgaaactttctcgttttctctttctcgttttctcttagtaagtatttttaggaagatttttaaagttaaataaatttatttttgaaatactcaattaatcacgtgctaatttctaatataggtcttgttcactttgtagccattttcaacatttccaaaatttggaattggtaacattaataactttaggtaagattggctaaatatgatgttgtcaaaatctctagctatgaccaatatttggtaataaactaatattgttatatgtttgtcaattttaagaaataatggtatggttcagaataacatgaatctaaacatgcccctagtttcgtatgccattgagttgctctgccaaaagcccaaaatgctatgtcgaacgcagcctaagcaataccttttttttaaagaaagcctaacaatacttcatctttcttaaataactgacactaggaccgtctcactttaactacaaaatttcttttaagtaactactctctccgtttcatattataaatcttttttatttttcttcctagttaaacttttttaagtgtgaccgagattatagaaaaatttagcaacatctacaaaaccaaattagttttataataactagtatctaatatattctgatagtatgtttgttttgtgttgaaaatattgctgtatttttctataaatttgatcaaagtttgactagaaaaaagtcaaaatgatttgtattatgaaacagaggtagtatattttattatattgtgacgagtgaaagtttcatggttatattagcagcactacacagttcaatagtataatatattttcaagtatttataaattctttaagaaaaaagaaaaagatcaaagttgaatagtggtagtgacaattattaaaacgaagtgagtattttatttttgttttaaagctatactaaattactacctctcttcttaaataattgacaccggcactatttgctttcatatttcacttttttttttaaaaaaaagatatgaacacttaaaaatatgtagcgtcacaaataaccacacaactttcattcatcaaaattcaatcattcaaaagtaatttacagtctaataagtaacacggtaaatagtaatcattgtcaaattgttgcactatcttattttcattccagttggcacgagaaaaaaaacttgtaaaaagtgtgtgtgtgtgtgtgtgtgtattcaggttcgtctgttaggatgttctattccactatccaaatttctatgtggtgaatttacttataaccgttagtcattagagttacagctttggtaggtacaccactccaggaaatacctgacaaatgaatttgttccgacttatatctggggaatccttctactcgtgatttgatggtttaccacgcaacggttgggatgaaacgttgaaaggttttaccactaaatttcgagcctcgtcagtatcatggtttttaacaaatttctattgcttttccggccgaattttgaccaaatttactgtataatatttgaatttgtccgaaagcatttgaaattcctatcgaagccttgtcgaaacatcgaaaaaccgtgaaaaccgatcgcctttcgttggctttatgaaccctgcatgttggtacttcacatacaatactcctgtcatggtatgaaatctgcttccgtgcttgctgtgcacgaatattacatggatggttgaaagcagtgtttcttgttatccaactggcttcgcagcaatcgcattttctagacagtaacaactgtacactacaatattctaaacaatactgccgaacattttgtatctcgtcagtaaggtcaccgaatactctgcatatagcaccgaaagcttctgcgtccatgagtctcattaccaaaaactcctagtacacgcatcaatcactttcctgagaagagagtatccgcttcagagcacggggtaggctcagcacaatctccgcaaacgctgaatcggagagcgagaatacagatcaagataagttcagcacaaaatatcacctgctataacgattggggaaaagtaatatgcggaataggatgtaccttctggcaaactcaaggtcttcagcgcatcctcggcgtagggaaggcggaacggtactagttgagcagatgctgagcgactagctctgcgctcagttactgatattccccgcgaagagcgaagtggccaagccaggaccctggcctgacttggcagggtgaacaatagatctgagtatcggatactgactgtaaccttgctgctcaaggggaaaaaggggggaaattttcagtgtctggaagaggtataacgtgcagcctataaagcaaatggactggacatttggacaatgaagtcaaaatactccaaataatacaggcaactacgttgcatgcttacgttcagttatacattagtacgaacaagctaaaagaaaattagcaaagtataaattatccttaccactcaaaatcctccattacaaattctatcaaattgtaagagagactgtggaacagttctccaatttggttcccatatagttccttgataagccgaaccttgaaaatgaaataataaaaatattagaattgacaatttactgttaaagttatgtaatgtaaataactgagtagaccagcagagcacacttttttttgtcaaaataaataaataaatgcataatttttgttcaaagatggttcccagctggatgtccaaaaaatagtttgcattaatttgtacataagaattaaattcacatatctgtaaattacgtacggaagaagataaagagaagttcccacataagtagaatgaatgcaactagatagaagtaggataatttccaattttacgtgttcttcagtaaggcctagtttagttcccaactatttcttcaaacttccaacttttccatcacatcaaaactttcctacacatacaaactttcaacttttccgtcacatcgttccaatttcaatcaaacttccaattttggcgtgaactaagcacagcctaaactagctgcaatggtgcaaaggtccaaaaagctgctaaagctataccttagattttgcctatctaattttctggtaataaaagcatgttaaacattaaaagcagaacaagaaatattaaggttcactttgcaacatgtcctgtgttatgcatatttacaaactgaacaaatataaacatgaaccaagtaatctttcaagttgtcaattcagcaaaacgaacattcagaaaccacatttagttatgcttcacagagaaagatgaactgggcccacttttaaacatcagtatttttttaactccaactatgttattttagcacaatgcacaaggtcatctgcttttagcatttcatagtggaagatatgggaagtaataatatatctatatatctgacctgctccctcctgtcaacataagactgcaaaatctcttcaagatgatcaataaatttctgtaagaaaaagctccatgtaagtacaaagacgtgcaaataattggcatataaaaagcaagttcagttagaaaacatacaatagcattagatgatagaaattcactttctacttctcgtattggcagaaagaaaggtaaggtgtgctcaatcacagtcatcttttcaaggaatgacttgctttccaaaacacaatgataaatttcacaaggttctcctgcaaaataacatgtttatttagaacagcaaataatgtggttagagatatgacatatgctttatgtaccagttttccgtataactatatcagagtttccaaaatgccaaaacaaagagattaaaacagtttgatgcaaagtaaatgtgctctccagccttgtaaaacactaaatctgcatataacatggtacagttaaaaaaataaaaataaaaactgagaatgaaaaatgagttaccagcaaaataagtctcatactgtataccaattctcgcaccatccaaacaatagataacctatcaaagggaagaaatttagttttgatgtggcaggataaaaatcaaattaagaaaaatagaacagaataggtgtattgctgaaaaatagcatggcaagccttcattcatgtcatgaagataaatttcatctgaggaaacattaacataatgtggacctagtacctacataaattactttttattgattcctaaggactgcacggcaatacacgatctggtaaaaggcacctcaaatggtgtgtgattgctagaacttgtggtgatcacaagtgcggatgttttacctactctaagtgcagaacccggaatgaaaaatcatcacaaacacactcagcccagacgacattaatctaccactactaatctaactttacatagaaagcatttggaggaccaaatggtgaagtaacgcaacacaaagggcaatatagcatgaacaaatcactactctgagaataatgctacctgttttaccttgttttttactctatatgtagtccttgactggaattgaggatctgctggaacatttgcttggttagccatggccttcctatcagcctccatatggacctggtctacgagacaagcaaattcatacaaaactcaaaatgcaccaaacagataatacgtctcttgtcacaagagagatgagtacattaaggtgctctgattaagtaccttttcacggatggttgccagcaaaccatcgttccactgctcatcatctattgggatctctacaaaatgaaaaaacattgatgtagaaagtttaacaaaaaaagatggtttaaagcaggaggataaaaagatggcataagaggataaacaatggtttgaagcaggaggataaaagctaattaaaatgatgatactagtatgataagactaactgtgtgccatgatggttgtaaaaagaagtttgagaatataacagcatttccgggatccacaagaaaaaaaaaaaaagaaaagacctgtacactagcaataactaaagctcatatatttgattttttgttgtctcgagaaaattgataaataaggcattagtttgcaaagcaggtatacggagtgtgaaactatcaaatggggaaaaaaagcccaactaatgtaatcttcaatcagaagacgagcataaatatatcaccatgctgtgttatactgtgcatatagttatgacttgtagtattggcctatgaaagccatgtgaccaaactaaactatatatatatggggccatttggtctgtaatagtgctgtgccatgccaaaattttgtcacaaccaaaataagacataaccaaaactttgttagcacatgtgattggattgcaatcgtgagacaatttgatttgaagccatctagacatcaaaattctctttggcttgactatagttcgaggccatatgatacctaatgttttgcaatgtcccaacatagcaaaggtttatcttgtctcatagattttgtcagaaggaacatgatggtttaaatgggacacaaagtttgacaaccaaaccaataatgcattaattgcaaccaatcactcaaattacatgagcatgcagcagcagcagcagcagccctgggaattcctaggcagagccgctgaggatttgaccaaccaacaaaatacaagaacctgtgtctagaatcacttgaacattgccgagttttgaagaggtaccagattctggaagcaaactttagtggccaaatgttaagggcactacaaattttggaaggactaacataggtatagaaccaaacaggatttatgccctcaagaaaaat

SEQ ID NO: 8952 - DNA, 1412 bp, Oryza sativa
ctctagactttgggaatattctcatcacctggacactatggaatggttggattattgtggaattggattcacacctccccctctattcaaaatcctcaaaatggatttaggctgggctcggggcgcttggttttgatagtagcgcctcggccatataaggaccggtcttcgggcctctgttgcaaagcactaccgtacttccacatgtctagtgggtaaggcttagtttgtggctcagtctggttataaacaaaagtacacggatggagatggatgaagtcgggggtcgatggacatctctaggacaaatgaaggctacacgagctgcggcccggtagtcgagatgtcatggcacagggccggtgtcctgctgctaggggctcagtcctgcctacctgtcccgggggttccggccgtaggtgggattgggtcggtactcttgtctatggctaggatgggttggaaactatgtcacgtcttccgtctgtataccgtggtggtatgtggcacgtggctacacgtgaggaagatgtgtcttgtgggtaaagatgtacacctctgatcagagtataacctattcgaatagccgcgccctcggttatggacaagccgagcaatgtacccaagttagtgttttaattcttaaaacctgcttaacaactaaaatgtggaatggttggcctgggttggcttgggacgagctgggacccagggtcgagttgacggttcggtccgaatcatcgtaggccttgggttaaggcaggttcgtgtgggttcacggccttgataaataatattgtatagttctagaatcgtgtttacaaaatagctttgagcaactaagtgtcttttaatgctgtttactgcaaccctaaccctttatattataactcccttgtactcccttgcatttattatgcacttgtgggtgtgtcttgttgagtacggtggttgtaatctgtcttgctcaatttttcccaaacccagaagaggagcccctagaagatgaaggctttggtgtctagctcgtgcctgccgtcaagcgcctgtggtcgtcgccctagtcttccgctgtttctcgtttgtctttgtgtgtgctgggccttcgccgcccatgtaataaattaactatttacgcttccgcttgataaactctgaaatgtatcaacttttggtgtaccttgcctcctgggacaaggaataatacacgcacgtaaggaacgcccgttgggttaattccggtcgtgacaagtggtgtaacatcccggcctagggcttaataggattaatagaatactcatatcaacaagttgcaacttcttttccggaagtcactctccaaagaactccagggttaagcctgcttggcctggagcaatttgggatgggtgaccgaccggggggctgcagga

SEQ ID NO: 8953 - DNA, 2126 bp, Oryza sativa
gggttccgaccgtaggtgggattgggtcggtactcttgtctatggctaggatgggttggaaactatgtcacgtcttccttccgtataccgtggtggtatgcggcacgtggctacacgtgaggaagaagtgtcttgtgggtaaagatgtacacctctgatcagagtataatctattcgaatagccgcgccctcggttatgggcaagccgagcaatgtacccaagttagtgtttttaatttttaaaacctgcttaacaactaaaatgtggaatggttggcctgggttggcttgggacgagctgggacccagggtcgggttgccagttcggtctgaatcatcataggccttgggttaaggcaggttcgtgtgggttcacggccttgattaataatattgtatagctttggaatcgtgtttacaaaatagctttgagcaactaagagtcttttaatgctgtttactgcaaaccctaaccctttatattataacccccttgtactcccttgcatttatcctgcacttgtgggtgtgtcttgttgagtacggtggttgtactcagtcttgctcaatttttcccaaacccagaagaggagcccctagaagatgaaggctttggtgtctagctcgtgcctgccgtcaagcgcctgtggtcgtcgccctagtcttccgctgtttctcgtttgtctttgtgtgtgctgggccttcgccgcccatgtaataaattaactatttacgcttccgcttgataaactctgaaatgtatcaacttttggtgtaccttgcctcctgggacaaggaataatacacgcacgtaaggaacgcccgttgggttaattccggtcgtgacaagtggtgtaacatcccggcctagggcttaataggattaatagaatactcatatcaacaagttgcaacttcttttccggaagtcaatctccaaagaactccagggttaagcctgcttggcctggagcaatttgggatgggtgaccgaccgggaaattcttcccgggtgcacacgagtgaggacaaaatgtgcagaaaagacatgtgttggtctatgagggcagtctatgacctatgaaagctatcagatgtaagtgggcccggcctgggggaggcgggacattacacttggaaagacctgaaacgatattttagagatgtttatgttcccatgtattatgctgatattctgctcaacaaactgcagtgtttaaaacaagataccaaaagtgttacttcatactatcatgatatgcattcttgtttattacgttgtggcttagatgaatgtgaagaagctacataattgaggtttttacgtggacttaacaaaaaaattcaggacatgcttgcttgtgaaaagtatagatctctttctcatttgttacaacttgcttgcaatgctgaaagtaaaatagagtaggatatgaaaaagaaacacgctatgtctttgcctccaatcactaaccatttgcaggaagtgcgtaatcatgaaaaggaggagagagacatgaaagagccaccaattccattgttcacacttaagttcgagacaccaccatcatctgaagaggacatcaaaggtaaagtaaatggtactgaaattaatcaaggtgcgtgtgttgttaacgaagtaaatttgtccacttttcatgcaaaactagagcaaccgttagtggaaccaaatgttggaattcctttgtcacaagttgatttactcgctgttccttgtgataaagaagagttgtgtgataatgcttcacttatatccatgccacaactagtgaatgaacatgctattcctagtgtttctttgtgtgctgattttaagcatgctgttcacattcctaatgaagttgaggaacgtaaattgctatcttctttaaatactttgggctatgttcagtttgatgatttttgtgcgctcgataatttgaaggagaaattatttgctaagtctgatttgccatatccaaccaatgttatatttcacatttttggcgaatataatgatcttggaatatattttgtgcatagagtttacatctgctcggatttagaacttactgtacatgtggataaaacatacaagctagagagaaatgttattgctaaccaaa

SEQ ID NO: 8954 - DNA, 10763 bp, Oryza sativa
cagtacagctacgtgagaaaaggtccaggtgttactagtgcacataatgcatgtctattttttttctttttatagaattttctctcaaattacttatccgatctacaatctgattacaccattacgttcgttgcaattaaatctttacaacaagatcttacatgattatattgcgatgaaaaatatttatatttataaattacttttattatatacgtaagttacttttatcacgtatataagttacttttaaatttgactaaattacttctatacattcataatgctctaagttgattatttttattattgtttttagttaattctatattttgtggactttataaatcttctctacactttacttgtgaatttactctacataatttcttatttcagctcactcacaatataataatttctactacagagagttactcctcccgttttataatgtaagtcattttagcattacccacattcatatagatgttaatgaatctagatatagttctaaattaaagttactttaattctttttgttgtaattcaattttcttaaccgaatatagcaagaatccgacaattgacgacttgacaaatctcatcgactaatctcaggacttcgaagccgatgctaactctaagccgatgactactccgggcttaccaaatttcactgttaacagtaagttacttctataatatatgtaaattacttttaagctttactgaatttacttttatatgtctaagaagtaacttagtgaaatctagaagtaatttagacatatcataaaagtaatttgttatttttcatcaaaatataatcatgtgagatcttgttgtaaagcttctctaaatcggattaaatcggattttattgttacgaacacaacggtgtaatcggattataaatcggatgagtaatttaagagaaacttctctaagaataaaaaaaatacatagatattgagtatactagtagctttttttttaaaaaaaaaaggtgtctctctttagcactatccagatatcactctcggtgtaaatgtgtccctatgtcgcaaaatctaatgcaagccagtgaaagaagggtagagctggtggaagaataattcggattgaaggagaatgataaagcgagcagagttagattggatcgatgatactgcgcgtggcgcacctgggatgtgggttgttcttgatcgacttctgcccgtacttcctccacttgtacccgtcggccggcatcttgccgccgcagctcctcaccttgctcgtgtacttgctctccgcttccaccctgcggcttaatttccaagcaaaccaacaacataatatcaatctccggtaagaactggagttagtttagctctatgcatgtgtgcacaattgtgcatgcacctacaaatacagagagctgtagcggcggccggaggggtacggcggccggggcgacgccgacgacgacagcgccttctcgatgtcgcggatcgtcgggcctgagtacaccgagcacagatccctgctcaccgccggtgccggccgcggccgccgctcgtgatcagcgctgccgcccccgttgcacggcgcggcggcggcggctgctgatgaccccgcgccgaacgagtagtagagggtggggtgttcggcggccgggacgaacaggccgtcgtcaccgaggagctcgcctatgaggtggtcgtcgagctcgcagggccagacgccgccggccacctcctccgccgacgcggtggcctgagctcgcagcacatctcccatcagatatggtcctggaaaacgccgtcgttgcttgtgaggggattggccatacataccacgggccggtgcaacgtggttagttagacacggcgacgaagtaatggaacagctcggagagtctgatatatacggatcaatgacatggacacatggagcctaaggtcaatgtcaccctgggactagatcggtgtcatgtttcaacggaaagtcaacctgtcattggctttggtgcacgacagcaagctaggataagagccgtatgataaagttactccctccatctcaatctacagggcgcctacttttaaagaaaaattaaactcgatagcttttaattaataatcatactaactatatttatacttaaataaatattatgtatattatatcactattatattttaaaatactttcatatgatgctaattttatatttgttgggatcatataataaaataaaatattggtcaaaatatgttattcaagaccatattaaaaaatataaggcttacaattagggtagagggagtactaattatataccagagttttaaaaaatctatttaacagatactaccttattacaaacatacatattataaggatatatatcaccgttcgaatgtgaggctgggcttaagcttagcgtgggcacacaaaacatgaataactaattaaggctgtgttcggcagcccctcctaccaacccatctccctcgtttttcgcgtgcacgctttttaaactgctaaacggtgtgttttttgcaaaaagtttctatacgaaagttgcttaaaaaatcaaattaatatatttttgaaaaaaatagcaaatacttaattaatcacctgctaatcgctactctgttttccgtgcgagcacttagtgctgggaaccaggggttccgaacataccctaagtattaactctattagctactactacaaatatcaaaaattgtgtaaactagatttttaagtacttctatatgaaacttattttataaaatacgaaccgtttaatgattcggaaaacgttcacacgaaaatcgatgaagtagctcattctataagccttgccaaaaggtgcataataagtaatataagtaaaagaatgtattttcaagaaaacatattcttataaatatatagagcaaatcatccatgttgataatctctaatgaagtactacctttgtgctaaaatgtaagtatttttttggcacgtatattaaaaaaatatgtgtgaatgtttttgaggaagtgtgtgattggttaagaagaaaaagtatatgaaagagaatggttgtgattggttgagaagatgagataggtggagaaataattttattttggaacaaggtattatgctacaaatagctagtacattttaagatggatgtagcggctgataagacaatccaaatcaatacacgtgatgcacaagttcgtaagtaaagtatttacctgctactgtgtacctcacgaaaaacagcgtacagtttcttttgggaaaaaaatagagcatagttgcctccccccctctctttctctctccttcagagagtacatcctttttcaaacgtcgatgaaaagaaaatttttcggtgtcacatcatatgtttgatcggatgtcggaaaatttttttggacacgaataaaaaaactaatttcataactcgcatggaaaccacgagacgaatcttttgagcctaattaatacgtcattagcacgtctgtgttattgtagcacttatggctaatcatggactaattaggctcaaaagattcgtctcgagattttcgtgccaactgtgcaattagtttttttatctatatttaatgttccatttgagtgtccaaagattcgatatgatgtttttgggaaaaaaattttggaaactaaaccaggctatctctcaccaaacaaccaaccttgcagaaagtgagacgacgatcgagcgaacagaatatgaattccctttccactcatcgctttctcaggggcggatccaatgtgggtgtagagcggactcaaatcccccctacacctatcggacccatggatacccccctgagtccccccttcaattttttcgtcctgattgataagataggaggtgctaaatgtattttaatagtattttagcatagtttaatactgagattatatgtttatattgatgtactcggtatgttgaggggctgtttggtttggtgccacacaatgttcatggatccgcccctgcgctttctccttataatttcttgacgacgcgttgagcttcggttgatcccgacgcctgcaacagtgccacggccgcacggcgtcgtcgtcgtcaagcgcgagtatgatcttgtccggcacagcgctacagccacgatcgaatttactttcgaatttcgaaagatctcgttgtgtatacctatggcaccaatcgatcttgctcgctgccactgccacttgctgcacgcactgaaagggagacgtagagctgttcctctgaaaatgaccgataaatccacgaaacgattcggtttcacccgtaacttgacatgatatttgggcgaagcaactgttaaactgtcatttgctcattttttttcaggcagtttggtcgagcctatactcggggcctatttagttcccaaatttttttttcaaaaacatcacattgaatctttggacacatgcatgaagcattaaatatagataaaaagaaaaactaattgcacagttatgggaaaaatcgcgagacgaatcttttaagcctaattagtccgtgattagccataagtgctacagtaatccacatgtgctaatgacggcttaattagtctcaaaagattcatctcgcggtttccaagcgagttctgaaattagttttttcattcgtgtctgaaaatcccttccgacatccggtcaaacgttcgttgtgacacctaaaaattttcttttccccaactaaacacatcctcatttactctgctacagttgaagttgaaccacattgctcccctcgccacaagggtgtcaatccaaacgtcatctcggtcaattctgggatagcagcatggtcgaggacacgaggtagtataggaaatactactccactatgcactgaaaaagtcgtcctgcaatttctcgtaaaaaaaaaagttgtcatgcaattggggtagacccagccggggcaggacatggtctctttcgctaataaaaactccgccatcggctcatccatcacacagcgatggacacataaatatatactctctcggttcctaattaaatacttcatacaattttgactagttaaaaacatactctctttatattttattgtataacgccattgactttttaaccaacgtttagtcattcgtgttattcaaaatttttgtgcaaatataaaaatatttatgttatacttaaagaacatttgatgataaatcaagtcaaaataaaataaatgataattatataaattttttgaataagataaatggtcaaacgttatttaaaaagtcaacagcgtcatacattaaaataaagagggagtattaagcgagaaactaaaaaactgttatgttcttcattaatgcgaagagaaaaaagagaagagattacaattggtaaaatagtaaaaagaaaacaaaaggaagtattaaagtagtctaggggatcagtaaaactatatttatttggggataaatttttaatctaaaacatatttatttagggctaactagagggagtatatttgaagcggaaggagtgatgttgatcgcatatgcgaatttataccagaggggctgatatctttgtatgtgtttagttccttccaaagttggaaggttaggttgaaattggtacgatgtgactgaaaagttgtgtgtgtatgataggttgatgtgatggaaaaagttggaacacagcctttggaaccatggcgttacggactcttaattcttgaacggctcggaagatccagagttgcagagacaatttgcagtctttcagctgtttatccccttcatggacaggttttaaccctgcaggcagacaacaacctcggagcagtttgtgaatgtcttcagttcttgacagtgctcacagtaatctactcctatttgctactgcccctgttccaaaaatcttgacgctttaaggtttctaagccaatttagcttcatattaaaacgatcaaatttctcttaattatcgattcaattgtcacgctttaaggtttctaagccaatttagcttcatattaaaacgatcaaatttctcttaattatcgattcaattgtcatttcattgagtacctgcactcagtatgttactacggagtagtacaaagaatcccttaatgcaattaaataataaattctcttaaagctcattgttagatgatttgatggaatagacaaatggtcccacttttcaatcaaatttactactccaatgacacttttctgggacattgacagaagcttaaaaacgacaccttttttgacggaggaagtaaacatctactctatttgtttcataaaaaactactatctccgtttcaggttataagactttctaacattgtccacattcatatagatgttaatgaatctagacacacgtatatgtctatattcattagtatatatataaatatgagcagtgctagaaagtcttataatataaaatagaggaagtaatctagtactctgtactagatgcattctagtattagatgtgagcatatatatatatatatatatatatatatagagagagagagagagaatttttatggtactatatattgatagtatatattgccattataaatgatctaatggcgtatattgatttgaccttccacttaactagcttgcagtataaaatctgaaagggtagacttgtctttctgtgtggtggtccggatccgatgccgccaagggctctcaccgcgccattagagcaggtacaatagcaggctattagccagttataaacatattttaatgagataaacgatgagagagaagagcagcaggctacagatttataaccagctagctgcaacacggactccaagacataatatatgtatgacaggtgggatcgtatattaatagtatagtaagcaactattgtatgaattggctattagattagctatagatgaattagagatagcagtgggctatactattgaactttgctcttatagcgctatcgggcgcattgcacgcacacggcgtggatgcgcgacgttccgcggcagcgtcgaagacaacttgaatggcacctgaccggctggtgtgcgggtcagcgggtgaactaaaatgtgcttgcatgcacaacaagccatagcaccaccatatgagaatgattaattttggtattgggttgtgttagtagtccaaactataaggtctatttcttatctgggctgcaaaagtgaaatgaaactggatttgtgtttgctactgtctctcacgagcgtaagttaaggggctgtttggatgcccacctcaatttaccatagttttttattaaaggtgtgtcaagatgcaaattgtgtggctcaaatttaatggccacacttgtgacaaactttggctaagaaaagggtctatgactagtaggaccaaaagaatagaaagtgtggcatgctaaagttatagaaacaaaccaaacattagctacatttggacaaactaacatacctcaagtgtggtaaaatgtggcaccaaccaaacaggcccgcactagagcagccgagcggcgacgagtcacaccgccgttgcgcgccgctgtcggggcttgtctctccaagtcgcacgccgctgtcggggctcgtctctccaagtcgttcgcgaggtagtgactcacgacatgacatcacaaacatctagggattaaacctaaataaccaattacatttttttttggcaaattcctattgtacccttgtaaatactggcagcatatactaccagtacaatgtgcggtaaaagttctcttacctcacatttgtgaggaagagaataaatcacaacacacatatagatgaggggatttgatcctacgacctccactagtcaacttcatgaaaatagtatgttattgtgagactttaaaagttacatttaaattttattatagttatatatacgttataatataacactacgatcatactatatttatatttatatttatatgaaataaatttttagaaccctgtaccaaccggtcagtggcgaaagcccgccgggggggctaacctgcagcttggctcgcgtctcctccgcctcgaagcacgtcttctcccaatcatttcaccagctgccatcaactaattggtactgctacttccatctcaaaatatagtaatttttagctatgaatttaaatatataggtgactatattaataactaaaaataattacattttaggatgaagagagtactatttagtttggtgttttaatctgtattacgggagccgcaacttgacttgcagcttcagaaatagtagatacatgtgttcaaagtgataacagcaagacccgtttcagatcctaacagaaaagtacgtacaatattcctgagaactgtatagtctgtattctagatatgcaattttctccgcacatcgacgacagcttttatgagtcgaggtcgcgctcgagcttcacgacagtcacggtgattcactatttcactacgtacaagccgcccatgctcaagatcactgttgactgttgagtacttgagtgcttaccatacgaacatagcgaattggaaaacccaaatcagtatgaacgggctataaaacgtcgggcgcgctaactggcgctctgatttgcactgattttctactctaggattggctccaaccgttttatagcccgtgcatactggttaagaccacttaagcatataaaccagcagaagaaccagggttagtcagaccggataggatgttttttttcttctgaaaaataggctgagaggacacattacacatctatctatctattctattattaaaacagctttgaaaggaggcaccacgttcgcttttgggggctaataattcccacattaatcagagaaaaaaaaagaaaatgagagtccaagtagaaatacaatctaaaaatagttattaaaacagctttgaaaggaggcaccacgttcgctgtgggggcaaaaaattcccacatcaatcggagaaaaagaaaaaaaaagaaaaggagagtccaagtagaaatacaatctaaaaatagctgaaattcggaattaaaactaagcaatattgaaagaagtttccatataacaacctaatacgagattaatcaaaatttgaaataaaaataaaataaaatccaaaattataaaaggaaaggagagtccaagtaggaatacagtttaaaaatagttgaaattcggaattaaaaataagcaatattgaaagaagagtccatataagaacccaatacgagattaatcaaaatttggaataaaaataaaataaatccaaaattagcaaaagaaaataaatagagttcaagtaggaatacaatttaaaattagtttaaattcgaaattaaaaataagcaatattgaacgaagaatccacgtaagaacccaatacgagattaattaaaatttagaataaaaataaaaataatatctaaaattggaaaaactaaaagagagttcaattaggaatataattttgaaacaactgaaatttaaaataaaaaataaaaacattaaaagaacatattggtattaactatttttttaaaaaaaatactgaaattagaaaaagaaaaataagatttcaattaggaatacaatttataaataactaaaatttttgataaaaataaatattattgaaagaaaagaccatctaaaacatatgacgagataaattaagtaagaggcctataaaggagtggagtggtggcggttgatacgacatataaaaattgttaataaaacatcaaatagaatcctaatgacgattaaaaaggagagacgtcaggcaggccgtgaagcaaacgagtaaggcggttgccgagacttcttagacagtaaaaaaacaaaccgcattgataattgtattcgatttttaaaatctcaatgacaataaaaaggagaagcagcgggcggggtgtataagagtatagtttcagagccaccgacggttgacgggacttctagaaaataaaaaataaattccaacgatagttatgttcgatttttagaatcacaataacaataaagaagtaggcggcgaacatgctgtagaggggcatagtggcatcgtttgataggacttctaaaaattataaaaaatgaaactataagtccaacttttaaaggttcagaacttttaaaaagtaaaaaaaaaacaatgataatcatgttcgattttaaaatctcaatgacaataaagaaggtaggcagcgggcgagccgtagaggagtacaatggcaaagctactgacggtttggcaggacttctagaaagtaaaaatgaacccaaacgataattatgttcgatttttaaaatctcaataacaataaagagaagagacagtggacggcccgtagaggagtataatggcaacgtttgacgggacatctagaaattataaaaataaaacacaacgtgacaataaactctaaaaactataaaatccaatttttaaaggttccaagaagaatgaataaaaatagtggtagatcgagcaagcaaataaagaagatgacataaggggtagcaactggtgtgaattttaaaaactatataattagaaacatgaggatgataaggtttggtctctcaaagtcttaagacaatgagatagctatttaataaattttaagtaaaatcatacttaaaaaaatatatgattttgtttgggtgctagccgcgcaattgggtgggccacccagct

SEQ ID NO: 8955 - DNA, 8003 bp, Oryza sativa
  unsure (1)..(8003): unsure at all n locations
aaaataagcaatattgaaagaagtttccatataagaacccaatacgagattaatcaaaattcgaaataaaaataaaataaaatccaaaattagggaaaaaaaagagagtccaagtagaaatacaatttaaaaataggtgaaattcagaattaaaaataagtaacgttgaaagaagtttccatgtaacaacccaatacgagattaatcaaaattcgaaataaaaataaaataaaatccgaaattagaaaaggaaaggggagtccaagtaggaatacaatttaaaaatagctgaaattcagaattaaaaataagtaatattgaaagaagtttccatataagaacccaatacgagattaatcaaaattcaaaataaaaataaaataaaatctaaaattagaaaaggaaatgagagtccaagtaggaatacaatttaaaaatagatgaaattaggtattaacaataaggaatattaaaagaagagttcatataagaacccaatacgagattaattaaaatttggaataaaaataaataaatccaaaattagcaaaagaaaataaaataagagttcaagtaggaatacaatttaaaattagtttaaattcgaaattaaaaataagcaatattgaacgaagaatccacgtaagaacccaatacgagattaattaaaatttagaataaaaataaaaataatatctaaaattggaaaaactaaaagagagttcaattaggaatataatttcgaaacaactgaaatttaaaataaaaaataaaaacattaaaagaacatattggtattaactatttttttaaaaagaatactgaaattagaaaaagaaaaataagatttcaattaggaatacaatttataaataactaaaatttttgataaaaataaatattattgaaagaaaagaccatctaaaacatatgacgagataaattaagtaagaggcctataaaggagtggagtggtggcggttgatacgacatataaaaattgttaataaaacatcaaatagaatcctaatgacgattaaaaaggagagacgtcaggcaggccgtgaagcaaacgagtaaggcggttgccgagacttcttagacagtaaaaaaacaaaccgcattgataattgtattcgatttttaaaatctcaatgacaataaaaaggagaagcagcgggcggggtgtataagagtatagtttcagagccaccgacggttgacgggacttctagaaaataaaaaataaattccaacgatagttatgttcgatttttagaatcacaataacaataaagaagtaggcggcgaacatgctgtagaggggcatagtggcatcgtttgataggacttctaaaaattataaaaaatgaaactataagtccaacttttaaaggttcagaacttttaaaaagtaaaaaaaaacaatgataatcatgttcgattttaaaatctcaatgacaataaagaaggtaggcagcgggcgagccgtagaggagtacaatggcaaagctactgacggtttggcaggacttctagaaagtaaaaatgaacccaaacgataattatgttcgatttttaaaatctcaataacaataaagagaagagacagtggacggcccgtagaggagtataatggcaacgtttgacgggacatctagaaattataaaaataaaacacaacgtgacaataaactctaaaaactataaaatccaatttttaaaggttccaagaagaatgaataaaaatagtggtagatcgagcaagcaaataaagaagatgacataaggggtagcaactggtgtgaattttaaaaactatataattagaaacatgaggatgataaggtttggtctctcaaagtcttaagacaatgagatagctatttaataaattttaagtaaaatcatacttaaaaaaatatatgattttgtttgggtgctagccgcgcaattgggtgggccacccagctgatgggcatcaatcccagggatttccgtgagttttttatgccaaccaaaaacactaaccattcaaaaatcagagttttttttaccgctttgttagctgatatttgctcggtgctttggaccacaagaaacaacatgatatttagatcgaaattggtttatttcccaccaatattaactttacaaatcatttttaatttggtgcactgaaaagttctttatcgcgctgaggaggtcgagatgatagacctgatgactgataagatgaaaagggtgatctcactgctttgagagatcagagaactgggattggctaaatcttctttttttttctttgtgctggcaagctagctaatattgagatgttctcttgctcaagttccttgttgcaaagtgcaaacaagtttgtatgggccaagagaggttgagagttttcttgtgtgggcaggcttgtgaagctgttgccacttggttgctaagactcctttttttgtaaaatgggtttttagacaaaaggtacatatataggccccgcttacattgaaagccatcacggcagcaaggagtacattcgttaagaactaattcaggaggttagtcatcagcactccttgtctagtcatcagaagtagtggcggcagtcggactctccccagcagcagaactatggccatcctgcagctccagcgcccgcctaaggagtccaataagcatgtcagaaaattctgagagcaacgataaacatggactacaattaaatgttatttggaacctcagaatcagtaatccacagttgtttggaaacacagtaaagtttcaaactatggatctatcaaatacacatgccattttgccaaagcacatgaaatctgttggatgacataaaatggataaaagacactagctggtcagtctgcttcatcaggatactagtttaccatgacaaaaccatccggctagaaaatcagatagcaacatttaacatgaaacaactaacatgttatttgaaacatcggaactagcaatctagctgcaatggtttgaaactggagtggattttgatccctggagtggatatcccctcgttgcttgcatatcactcaaatagttatgacnatgctctaactaaataaatagatgtattaacatgttatatataactctacaaacatgcaagttcaaattcaacttctacatctcgtaacgaagaaaaacaaatttgattgtgaatatacgttaactagctatagtttaatttgtttttttcgttacgagatatagaagttgaatttgaatttgcatgttgttgagtgatatatcacatgttaatacatcttctctaatttttttttaaatttttttcgtaaccatttgagtgacatgcaaataacgaggggacatctcctcgagatatcaaaattgtttcataacaatgtagtaaaactaaacatgcttacatggatattgaatttgaggtatttatctaacaaacaaattaactaatacattctgtaacaacctaaatggcgccaaaagaacttccacccacctacaaatcatgtcatgctacaagcataatgaaaattaggttgcattgctatatggcgtagcttcttgatgaatcatttgtaagatcaatgtgtgttttgattcttattttgtgatgaacaattggcatatgtgattattggttttgatatttggagattatcgtcgaagtggttttggagataatcaattttcagaaaatgaacaggatttactagtttgtcgggaccggtcagaccgggttgggtgtgccagtcaggccggcgtgtattggcgcggtcagaccggcgcagcccgcggtctgaccggccgacgctgtgtcggtttcggtttcgggttgtttctttggatatccgtgattgttttatggttatggcttctagatggatattatacgtatgtaatactgttgtttgctactaatgagtcaagttggagatagcttggtttcggaatatggtttctttgtttgtttcatgtgtaagtgactcgatgcctcgagagagtatttgcggtgatggactgggagttggcttggtggtaagacgatgtccgtggtggtcaaacatcatgtaggatactaaggctagagttgatgcacgtggttgatggagatttcatatggcatacgatggaggtattgtgtgcgtatgggatgcggagtcgaatttggaaggagtccaaattttgtaaggagtgatgttggtgcactttgtaaacacagagagaagcaataaagttgtcatctactttgagagttcttcgatttgtgtttcaccgggtttcggcagtctaaccggcatctcagcggcggtcagaccggcggcggcgacagcaagcgacagctgatcaggcggtcagaccagagtttcatctcggtcaaaccggtggctttcagacggtcagaccggacgactacctcggtcagaccgcgatccatcgatttcgagggtaacttttatttccgctaaaagtttttggtttttgggtatctcaaccattcaccccccctttggttggcttagttcttgtgattcaatcctacaagtggtatcaaagctttgtttgcttctttggattttaaccgatctagagtttttgccatggctgcttctaataagtttttaactaagcctcatgttttcgatggaacggatttttctcattggtgtagtaggatgcaatcttacattatggctgagaattatgatatttggagaaaagtttctcttccttgtgtgattcctgaagctattaatactgctgctgaaaaaactgcttttgaactaaattgcaaagctcgcaatattcttttgagtgggatttctcgttcggattatgatcgtgttgctcatcttcaaactgctcatgagatttgggttgctttgaataatttttatcaaggtacaaataacattaaagaacttcgtcgtgatcttttcaaaaagaagtacattaaatttgagatgaaacctggagaagctttggatgactatctttctaggtttaataaaatttagagtgatcttagatcttttgattcttcttatgatgctaattatccacaatctgagatttctcgtcactttttgattggtcttgacatgtctatttgggagatgaaagttacacctattcaggagtttgtgaacatgtctactttgactttggattcgctttacacaaaactgaaaactcatgagatgaatattcgttctcgtaaaggtgattctaagtctaggtgctttggtttcgtcttcaacttctttgaatgttggtacttcttcatcgaagtcttttgttcttgctttatttaatgccatgtccgatgatcaactcgaacagttcgaggaggacgacttggttttgctatctacacaaattttctcgagctatggaaaatgttaggaacaggaaaagaggagaaccgaatcgttgttttgtgtgtggtgcacttgatcatcttcgctcgtattgtcctaagcttgggagaggcaagaaggaagatgatggtagagttaaagaggatgacgtgaacaagaagaagaacatgaaggagaaggagaagaagaagcattgcatgcagtggttaattcaagaactcataaaagttttttatggatctaaagatgaagatgagggcaaatgtaagcaatttgttgatctagcttttattgctcgtaatgaaagttctcatgttgatgaatctgatgatgataatgaagaaaagcatagttatgatcaattagaacttgctgcttacaaatttgctaaaaaaactttaaacatgttctattgtgcttgatgagaaggatcacactattgagattttaaatgctgaaattgatagattaaaatcttcgattcctgatgatgataattgtcagtcttgtgaagttttattttctgaaattaatgctttgcgagatgtcaattctgttaattgcaaaaaattagaatttgagattgaaaaatctaaaaaattggaatcttcttttgctcttgggtttgctttacatgcttgtgttgttgatgagttgattttgacaaagaatgttttgaaaaaatacaaagttgctttttgtgcaagttctttggcgaatgcttcatgtgcaaataaggcaaaacaaaacaatggtgttttgatttctgaagattgttcaaagtgtgttttgaatgagatgaagttgaaagatgctttagggcgtgttaaacacatggaggaaattgttaaacaagatgaggtgttttcttgctcaacttgtagaaaacaaaaaggtcttttggatgcttgcaaaaattgtgctattcttactcaggaggtttcttatttgaaaagttctttgcaaagattttctgatggtaaaaagaacctcaacatgattcttgatcaatctaaggttagcacacacaatcatggtttaggttttgatccttatgctcataattctagacatcctcctactgttttgggtgttgctaggagaggtgaaattttgattgaatcagagcctaagaacactgtgtttaaatctgttggcatcatgtcttctttgaatacatcttcttcgaaatcaaatgttgtgaatgcaaaaccttctgttgttgcaaaaccatctacttcacaaacttgtcgtgagaagtacacttgttctttttgtggaaaagatggacatttggttggtttttgttttagacttgcccataaacagaaaaaggaaagagaaattgcttttgcaaaacgacattggcaaaaatcgggttttaattcgaggaccacggttagaccgacactgaccagtcggtcagaccggccagcggtcagaccgcaggtaaaccggcggtcagaccggttgctaggctcggtcagaccacaggcacagtggcggtcagaccggcctcggggcaattttgtgcgaaattcaactcagacttttgtgaagcaaaaaggtaagttttttggtaagtctgattctgattttgtaagtgtgtatgtacctactggttctagtggtcgtgtgactcagtgttggattccaaaatttcttatttctaaccccaacacggaggtctcgacatcttctcgttcgtaggtattttggcggcatactccccatgtgcatttaactttgagatgacgattgtatagcaaggtaacatcactttacttttggattgacataattttggtctattctcttgtttattagctttttcatgtgctaatgtttgaggtagtagtttttgttaatactattggatgtatgtcaattcttgagaattttggtgatatcgttggcaattggatgtctttttcaaaatctttgattttttcttgatttttgttcgggaagaattggaggttattttgagggggagttagtgctttttatgactttcttttggcatgttttgagggggagtttgtacctcatggttttatcaagcaaaaatatgacaatgaaaaaattgataaaagagagctttgtttatacatatggtattttcttgtgtatgctagtaatattttgaaggtttatttgtctctagcataacttgtatgtattctagtcttttcatgagatttagtttttgcttttaagggagatgatgcatgacacttaaattctatacttgaattaagaaaatatgtaatgttgaagctagcatctggtttgatttataaatgctctatttatatgctttattgaattgttattccttaaatagctttaattgctcattgtgaaaaagagaataaaaaatatgaaaaaaatgaataccgaattcttggaaacagtcttgacgacaaggacgtattcgatgtgagcaaaataatgggtgccgaatccctggaaacagtcttgacgacagggacgtacccggaataaaaaagaaaaatatgagcaaaaaggcttaagaaaagagaaagttcaaaaaaaaattctcttggttgttttgtgctaaaggttatttgagaaaga

SEQ ID NO: 8956 - DNA, 2373 bp, Oryza sativa
tatcggcagccttaccctgagtggtttgaaagagttcctcttcccaatcggttcaaagttctggacttctccaaattttcaggacaagatgatgtgtcgacttatgagcacattagccgattcctagctcaatgtggtgaagcatcggcggtagacgctctgaaagttaggttattccggttatctctgtctagatcggcttttacttggttttcctccttgccatatggttcgatcaacagttgggccgatttggagaagcaattccacaactatttctacagtggggttcatgagctgaacttatctgacttgacgacgattaagcagcggcatgatgaacctgtgcacgagtatattcagagattcagggagatgaggaacaaatgcttcagcttgagtttaactgatgcccagttagccgatttggcctttcacggtatgattgctccaattagggagaagttctcatctgaagactttgatagcttgtcacatctgatacagaaagtaaccctgcatgagcataggtctgcggaagttaggaagagctctaagagagttaatcatgtttgtccgtacatgtatggatgatgaggatgatcctgaaatagctgcagccgaatgggtaaggagtaaaaaggtcgtaccatgccaatgggtgaaatgttctggaaaagaggagaagtataattttgatattactaaagctgacaagatcttcgatctgctactccgagaaaagcaaattcaacttcctgctggtcatacaatcccatcggctgaggagttaggcaaaaagaggtattgcaaatggcataattctaggtctcattctactaatgattgcaaggtttttagacaacagattcaggtggccattgaggggggcaagattaggtttgatgattccaaaaagccgatgaaggtcgatggtaatccttttcctgttaatatggtgcatacagctagccaaacaaccgatagggcccgcgcaaggggttttcaggtgaattcggctaagattatcaacaaatattagaggaagtatgacaagcagcaggagaagcattatgaagaatacgatgatggttttgatcctcattggggttgtgagttctttagattctgctggaatgaaggtatgaggttgccatctattgaaaactgccctgggtgcagtgatattgtcgagagctcaagccgatcatataataggggtaatcggctgaggcagacaagagtttctattcatcaaagattgggtcctgtgaatcaagatcatggctaagaagacagtgtggtcaggaagaatcaatggtgtccttctggtactttcacaaagaatcagaagagaagggttcaaagattgaggaacagagaacgccttcaggaggttgaacaagaaattaatcatcggctgaggaaagcaaagccaaggcaggagtggcgtgttaagaatcaggttcatgtagccgatgatgttgcagccgatgaggcaaagaggttggcaaaagggaagagtgttgtgacggcactgattaacatggtctttaccttgccagccgatttcgggattgatcaagccgatgtcgacgaggtggaagaggaatcggctaagttggttctatcaccagaacaggcagtgtttgagaaacccgaggggacagagaatcggcatcttaaaccgttgtatataaatggctacgtcaatgggaggccgatgtctaaaatgatggttgatggtggggctacggtaaatttgatgccttatgctacgttcaggaagttgggtagaaatgccgaggatctcatcaagacaaatatggcactcaaagactttggtggtaatccatcggaaaccaaaggtgttctaaatgtggagctgacagtcggcagtaagactattcctactacgttttttgtcatcgatgggaagggttcttacagtttgttgctcggaagggattggattcacaccaattgttgcattccttcgactatgcaccaatgcttaattcagtggcaaggcgacaaaatagagatcgtaccagtcgacatgtcagttaatgttgccagtgccgatttaggtctttgggagatggatggccttgattgtttatctggaaaggtttgggatggagattttctaaagagtaaagtccatcaccggtccctaaacttgtaccgctgtgtcatcctggtccctaaactcgcaaatcgactattcatgtcctcaaacttgttcgactgtgtcatcccgatccctaaacttatagatcactcgtttaggtcctccaacttgttcagttgtgccacctcggcccctaaatttggatttgaatatcatctgggtcaaataggacggtctaa

SEQ ID NO: 8957 - DNA, 16649 bp, Oryza sativa
gggatcctcaggaaatgaacaaattccataatttcttgtttggcttcatcacagccagctacatccttaaagaacacctgtagcacacaagaaacaaggttacttcagtagaattatatgaatatgttattgtatgttctttgtcaatggtgaataaagctacagaacaaacatttacaaaaaaggatatgaatttcatgttttgttcaaaatagcaagagatggaaatagcaaataaaaactaaccttatttttggagtttttatccaattttgtcacttgaacttttccaatactgaaaatgctacggcctcctttcccaggaccacccccaacagtaaatccattttgtatccttttcccaagcaaatatattaatccaataattagaacggttgggacatacttcattacttcctcaaaccattttgcttcagtagtgtaagtgattgggacataatagtgtggatctatctccaatgctttctgggcctcttgtaacttctcttcaaaggagtcaacacttccaatattgaagtaatacttgtagctgctaggagactctatcccaggaagatgacttgtagttatatggatatcactatcctgaattcgatcaattgaaggtgaactcctgacgtaaaccttagcaattgacttgtttgaaacaacaatgtggtcaactaaaccaggttccaacaacttattcttgaattcttggaagcttatctgaaaagaattacaattaagtgggtatcacaagttataatggactaggaaatgaatgtatgtgtcgcacagaaaaagaaactggtagggaactgaagtgtggatatatgatatagttatacaggattagatgattaataggatgtagaataccaaccatattgcatttcataccaacatggcactaacaacatacgaagctcatgctaaaatgccctatatcaaactcttaggataggatatgatatgccatcagtaatgaagtactgtagctagggtcacatgctgcaccaaataatcacattaatgctctcgagcaaaagcataccatctccatcagtacaactatgtgatttaaatcttttcagtcaaccataacttcagtcatactccctctgtttacatttgcttgtcaccattaaccggtgctgttacaactttgaccacaacttttttaaaaatatatatatatatcatgttttgatgaatgaaaacagtatgatcatatttagcatgtaatataatttcataatatagtactccctctgtctctaaatttaaggaattctggctataaatatatggatctggacatgcacgtgtccagattcatagctagaatcccttacatctagggatggagggagtatacttttaaatatttacaagtttcttgataaaatatgagaagtcaaacttaggatatgaatagtatagtgaaaattatttaggaatggaggggggcagctaattaattatcatcaattgtgttatgtacaaataaaacataaactaaggactacatgtgaaagcataatttttttttccttaccactttgctaggccagcgaaaccaccaaatatttttttcaagataaaaaaagtaaccttatatataacctcatatcacctctctaattggactgcagcaaaatgaacactgacaaaatttatataccacacagaattggaatgattcttttctgaaatttataaggctgaccaaaggcgaggaccttcagtaaagtaaatggggattttgataacagctatcttctatccacaagtgtgaacaggtaaaatgacaatgaaacacacaagccactactgttgctcatgtttaacagtcggtttttcagtaggaacagacctcctgctctgatgaagatgctgatgcagataacaataataggccaaaaaggaataaaggagcaatcatgtccttgaattgtttaatgctctcctcgaaattccattgatcacctgaactggattgctctgcacaccagaaatgaccacattaagtatgtggtttgcagtataatgctatatacggatgcatcaaactttacaaattgtacgcaaccaacttgctttgggctaaaggctcatgttgtcgtattccacaatactcatgctagtacctctcccttaaaggtgagcgggcagtttatgaggcactaaaactcaaatattagcattttcagctatacatgatacttacatactgttaggggtatttgtgcaataaaataaaacatcaactagccccactctgtttaacatgtattgccacttacaaaagctctgcatatcatcttcttaacattgttttctattatcagtatactaaaactagaaatcacaagttatgatatagcatgattttagggcagcactcggaaggttaagtcgccactggtatgtaaaagtctactctctttcaaaatattttgcaaagctcaacaccttaataaaccatatccaacacaagagcgaggaatgcaggttaaaataagcacttactctttgagtcggacttgtcactctcatcccctttacctttattctcctcctccgaatgcttcccgtggtctgaataaaaaaggcaacgttaaatattaacagagtcaccagatatccccaaaaaccacctaaccagccagaaagcttacttttcttcgacttgtcggagaatagccgccggaactgccggctagcaagcaggaacctccagtccccacccttccctgccccggaggccaccgctgcccgattcccgataactgacgtcacatagctgcgcagaaaacccaactcgccgcagggcagcggcggcgacgaagcacggagcccgccatgccccccgagcagagaaccctacggcaacgacatccgcacacgccgcccgagccattagggcgaggacgcgcaggaagaagccacaccaatcggagaggggaaggggagggggtgcggctcgggcactcacctggcgctgccgggaggagcgcgcggaccgggcgagggcgcgggagagggaggagaggctcatggcggcggcggcggcgagcgcattggacggagatcgaggcgggggcgggccgtattagggttttgatcccgcccgcgctccgcgtgcgtgatcgatcgaaactagccggtaaagtgtactgtgcccccgttttctcgcggagagagcgacgaaccgacgagacgaggtcacgagggacgcggttgatggtggcggcggagagggctcaagggaaatttgttggtgtcgatgaaagggcaggtggacacgcggcaagggattgccaccaatctggagacagttcggagcttccgctgccagtatgggtccatgggccaccctgttggataggccacgatattggaccgctaccaaactggtccatcacgatatataaatgaggaataggttcattttaggtaccttaacttaacagtgagtttgattttcgtcctttcaaaccacaatatttttctacaaatttcatcgaatttttaaaaaattgactataaaaagaatcaaatgatttataatatgaaacagagggagtagtagctagcaacaaccaaattagtttgattggtaatgaaaaatatcaaaccaaatatgcgtttgataccagcaatgtacacatttagcctccaaattaagtggcaaactagtatatttctaatattcatcaggtattagcaattaagttcgttagttgtgcaacctgtttatagctagctcggtggtctttccagcgtcgggcgaaccccacaagttgtattcttttttcgtagctacgttcagatcctttgacctgtccactacttatacgtatccatcagtaactaattacaccttgcaagtagatatccagtactgtactatcgagtcatcttcccaagtcaactccccactcacttcagctacagaaacagtgtttcctgggaccacggccagtccaggcacgaccatatggtcggcggcgagtcagaggacagcgccgtagcggcgtcagcgcgcgccacggacgacgaggccgaggtcgagccgccgccgccgccatcgtcgcacgagcgatccgtcgcgacacgacgcggcgcggcgtgctccgcgtcgccacgtcgtcgtaactcggcgacgtcacacgacgtcccatcgtcttgtggccactctggccgtagccggccggcgccgtcgccgtcgtcctcggacgtcgtcggcgagaaggccgccctgacatagttcttcctcttccttgccgccgccgcgggcgacgacggcggcgggccagcgccggaggcggcggagaagcccactaccgacgtcggcggcggtggctgggcgatgtgcggcgggaagagcggctgcgggccgtgatggtgcgacccctcgtacgtgacgatgagcatctccgggtcatcggtggacttctcgacgtgcttcttggcgctgcatcgggagctggtgcacttgtagtaactcctgcattttcaccggagatgatgttaccattgccgtgatcctgcaaatttcggcttctctgaaaaagactgctcatctgaaaacatcgctgttgtgttcattagccgccgttttaatgcgatgcagatggatgttaattcttgcagttcggcgttcgtgtaattaattacgttttcggtgatgacgtgcacttggagattattcaacagcacagtgattcagactatatatggcatgtgcatgtatatgaaagcatgcgtgtcttcgcaccatcctgtatttctctgaacatgatctggaattaatgtctccggccgcttgcttccgctggtgtgccactacgccagtgaacaacctacctgcggcgcgcgctttcaaccccgcgtgcacagtgacactgattgactctagaactccacgtggtgctactagttgggccctgtttatttctcacccaaaaattttatatcgtatcgcatcgaacattttaacacctacgtaaaatattaaatatacataaaaaaaataactaattacacatattgcgactaatttacgagacgaatcttttgagactaattgctctatgatttgacaatgtgatgttacaagaaacatttgctaataacagattaattaggcaacaaatttgtctcgcgatttactgacggattctgaaattagttttttattagtgtccaaacaccccatccaacccatatataatacccgatgtaatacgctaaaactttacacccatggatttaaacacccccttactgatataatatatatatagctttaatttctctggaatctgaacacacgatctatcaatctatcatggttgttgtgaattaaaggctcctcacttctcaactgaaatgctagatcattcacatccacagagacagggcaatcaggaccgtgtccccccactcccccttaagacaataaggatatttaactctattttttaatatatgacatagttaacttttaataaatatttaatcaatagttttatttaaaaattttgtacaaatataaaaaaaatcattcttaaaaagtatttaacgataaatcaagtcacaataaaataaataataattgtataaacttttttgaatacgataaatagtcaaacgtatctaaaaagttaacgacatcatatattagaaaacgtagatagtaatttctttcgttagaaaaggtaagaaaattgaatggtcgaagcgaatgaactgctaagaccacaacatgctactcatcacatttgtgttagttacatgcaggatctcgtagtgtgcagtaggtacctaattaaagagtctcctaaacaaactccatcagttttaaaatacagaaactttcaacgtttgaatctggtttcaaaatataagaatatctagcacactattctagggagtacatactacttgtcctataaattattatttcccgttcaaatttcttcacatctctcactcccacctacccatacaccctacctatccatcatttatttattgtgggatttctatcttttcttgtctaccttaatatctgtccaataacctagaaatatttatatttacaaataaaggtagtagtaattattgagtactccctctgttttcgaataacatactgtagaaattttcaccaaaacacgtagatcatggtaacaaaatttataaccaaattgtcattggtagttatttggagatgattttaaagaatggataaagtggaggtggagggcaagaaatggatccaaaatagaagcacctagaagtttgctctatggtgaagattgatttatgttcacaagtatagctacggagagtagggtcaaaattaaaattctgctaataaaagtgtggtggtgataaaaatattttgaaacaaacgaattggaggaaaatgtcgttatttaaaaatggataaagtataaataaaaatagtatatcatccttttgttttgagaatgtttatatgctatttgacggaaaaacaccttacaaatcatgcaaatcctaaaccattggatcatattaagaatcgtgcaccatatttctaaccctaacccctcatttcttctattgtcattcccagcgcaaccgctgccactcgcaagcttgcatgcatgcgatgcctctgcctcagccccatgtgccgcagcccggccttgccggttggccgaatgaagtcaactgtgccggcaactcccccttcatcccgggccttctccccctcccacctctcttcccaagtcggcggcgcaagtgtccctgtctcgttgtcttccccgtcttcggcagctcctcgccgttggatccgtcaccactaatcatcgtctcctaaccataagctctggtttgcccccgtcatcaaggccaacccatcatcctcctccatctccgtggcttcgatgtggccgccgatgcctcacctccaactcgtgtctacctcccactgtcgggccgttgcctccgacatctctttaagcatggcgatgtccctcttctttgccctcccctaccaacctccaaccctaccacaatcaaaaactctaaaccctaacttcactaccttcatagaggttgctagagttggtaaagaaggtatcgtcggagctagaggagaaaaactccggtcttctgagcacgaatcacgaattaaatttcaaaatgggtaatatacgtgattataaaaagaatatcgccagccatttaaccatctttttttaatgtaagagtgttgcacggctaagcgttgacttccccgtctagggaattcgtcaatcccttgttctgcaccgtatgacactaatcgatctgtactgtacgattggcacacgtgtatacgtatacccgcgagtccttccaagtcccactcgcggaaacacgacacgtacacacgcgcgccgccgtgggcgatagcaggcggcggcgagccgcgcagctagccatattgttcatgcacggattgcacgcacaggcttgaccgcgcgcgctcctggcggcgtttttctctcgatttcgccatggtacggtgcagctgcaagcggctgcccccagcgctagcgccgtatccggtgtaaatgaacgacgtcgacacgcgcatattgcgccattcttatcaggactaagaatacatcttcgttgtcgtcgtcaactcgtcacaactgtatgtacggctacagtacatctttaccacgtcgtcccgttccgctcccttaattggttaaattttctttttcacaacctaactaagaacgatttttgaacgcttttgagcatgggcgtaagtttaatcagtgcactatggtcaacttgtcactaaaaccgtgccatccatatcgcaaaatctaaaccgagagcgctctcgatttagtgttaaaagagcgacgcactcattcgtgagagaatgtccagtgctactagtacgtgagagaagatcctgtgctgccagtacagctacgtgagaaaaggtccaggtgttactagtgcacataatgcatgtctattttttttctttttatagaattttctctcaaattacttatccgatctacaatctgattacaccattacgttcgttgcaattaaatctttacaacaagatcttacatgattatattgcgatgaaaaatatttatatttataaattacttttattatatacgtaagttacttttatcacgtatataagttacttttaaatttgactaaattacttctatacattcataatgctctaagttgattatttttattattgtttttagttaattctatattttgtggactttataaatcttctctacactttacttgtgaatttactctacataatttcttatttcagctcactcacaatataataatttctactacagagagttactcctcccgttttataatgtaagtcattttagcattacccacattcatatagatgttaatgaatctagatatagttctaaattaaagttactttaattctttttgttgtaattcaattttcttaaccgaatatagcaagaatccgacaattgacgacttgacaaatctcatcgactaatctcaggacttcgaagccgatgctaactctaagccgatgactactccgggcttaccaaatttcactgttaacagtaagttacttctataatatatgtaaattacttttaagctttactgaatttacttttatatgtctaagaagtaacttagtgaaatctagaagtaatttagacatatcataaaagtaatttgttatttttcatcaaaatataatcatgtgagatcttgttgtaaagcttctctaaatcggattaaatcggattttattgttacgaacacaacggtgtaatcggattataaatcggatgagtaatttaagagaaacttctctaagaataaaaaaaatacatagatattgagtatactagtagctttttttttttaaaaaaaaggtgtctctctttagcactatccagatatcactctcggtgtaaatgtgtccctatgtcgcaaaatctaatgcaagccagtgaaagaagggtagagctggtggaagaataattcggattgaaggagaatgataaagcgagcagagttagattggatcgatgatactgcgcgtggcgcacctgggatgtgggttgttcttgatcgacttctgcccgtacttcctccacttgtacccgtcggccggcatcttgccgccgcagctcctcaccttgctcgtgtacttgctctccgcttccaccctgcggcttaatttccaagcaaaccaacaacataatatcaatctccggtaagaactggagttagtttagctctatgcatgtgtgcacaattgtgcatgcacctacaaatacagagagctgtagcggcggccggaggggtacggcggccggggcgacgccgacgacgacagcgccttctcgatgtcgcggatcgtcgggcctgagtacaccgagcacagatccctgctcaccgccggtgccggccgcggccgccgctcgtgatcagcgctgccgcccccgttgcacggcgcggcggcggcggctgctgatgaccccgcgccgaacgagtagtagagggtggggtgttcggcggccgggacgaacaggccgtcgtcaccgaggagctcgcctatgaggtggtcgtcgagctcgcagggccagacgccgccggccacctcctccgccgacgcggtggcctgagctcgcagcacatctcccatcagatatggtcctggaaaacgccgtcgttgcttgtgaggggattggccatacataccacgggccggtgcaacgtggttagttagacacggcgacgaagtaatggaacagctcggagagtctgatatatacggatcaatgacatggacacatggagcctaaggtcaatgtcaccctgggactagatcggtgtcatgtttcaacggaaagtcaacctgtcattggctttggtgcacgacagcaagctaggttaagagccgtatgataaagttactccctccatctcaatctacagggcgcctacttttaaagaaaaattaaactcgatagcttttaattaataatcatactaactatatttatacttaaataaatattatgtatattatatcactattatattttaaaatactttcatatgatgctaattttatatttgttgggatcatataataaaataaaatattggtcaaaatatgttattcaagaccatattaaaaaatataaggcttacaattagggtagagggagtactaattatataccagagttttaaaaaatctatttaacagatactaccttattacaaacatacatattataaggatatatatcaccgttcgaatgtgaggctgggcttaagcttagcgtgggcacacaaaacatgaataactaattaaggctgtgttcggcagcccctcctaccaacccatctccctcgtttttcgcgtgcacgctttttaaactgctaaacggtgtgttttttgcaaaaagtttctatacgaaagttgcttaaaaaatcaaattaatatatttttgaaaaaaatagcaaatacttaattaatcacctgctaatcgctactctgttttccgtgcgagcacttagtgctgggaaccaggggttccgaacataccctaagtattaactctattagctactactacaaatatcaaaaattgtgtaaactagatttttaagtacttctatatgaaacttattttataaaatacgaaccgtttaatgattcggaaaacgttcacacgaaaatcgatgaagtagctcattctataagccttgccaaaaggtgcataataagtaatataagtaaaagaatgtattttcaagaaaacatattcttataaatatatagagcaaatcatccatgttgataatctctaatgaagtactacctttgtgctaaaatgtaagtatttttttggcacgtatattaaaaaaatatgtgtgaatgtttttgaggaagtgtgtgattggttaagaagaaaaagtatatgaaagagaatggttgtgattggttgagaagatgagataggtggagaaataattttattttggaacaaggtattatgctacaaatagctagtacattttaagatggatgtagcggctgataagacaatccaaatcaatacacgtgatgcacaagttcgtaagtaaagtatttacctgctactgtgtacctcacgaaaaacagcgtacagtttcttttgggaaaaaaatagagcatagttgcctccccccctctctttctctctccttcagagagtacatcctttttcaaacgtggatgaaaagaaaatttttcggtgtcacatcatatgtttgatcggatgtcggaaaatttttttggacacgaataaaaaaactaatttcataactcgcatggaaaccacgagacgaatcttttgagcctaattaatacgtcattagcacgtctgtgttattgtagcacttatggctaatcatggactaattaggctcaaaagattcgtctcgagattttcgtgccaactgtgcaattagtttttttatctatatttaatgttccatttgagtgtccaaagattcgatatgatgtttttgggaaaaaattttggaaactaaaccaggctatctctcaccaaacaaccaaccttgcagaaagtgagacgacgatcgagcgaacagaatatgaattccctttccactcatcgctttctcaggggcggatccaatgtgggtgtagagcggactcaaatcccccctacacctatcggacccatggatacccccctgagtccccccttcaattttttcgtcctgattgataagataggaggtgctaaatgtattttaatagtattttagcatagtttaatactgagattatatgtttatattgatgtactcggtatgttgaggggctgtttggtttggtgccacacaatgttcatggatccgcccctgcgctttctccttataatttcttgacgacgcgttgagcttcggttgatcccgacgcctgcaacagtgccacggccgcacggcgtcgtcgtcgtcaagcgcgagtatgatcttgtccggcacagcgctacagccacgatcgaatttactttcgaatttcgaaagatctcgttgtgtatacctatggcaccatcgatcttgctcgctgccactgccacatgctgcacgcactgaaagggagacgtagagctgttcctctgaaaatgaccgataaatccacgaaacgattcggtttcacccgtaacttgacatgatatttgggcgaagcaactgttaaactgtcatttgctcattttttttcaggcagtttggtcgagcctatactcggggcctatttagttcccaaaattttttctcaaaaacatcacattgaatctttggacacatgcatgaagcattaaatatagataaaaagaaaaactaattgcacagttatgggaaaaatcgcgagacgaatcttttaagcctaattagtccgtgattagccataagtgctacagtaatccacatgtgctaatgacggcttaattagtctcaaaagattcatctcgcggtttccaagcgagttctgaaattagttttttcattcgtgtctgaaaatcccttccgacatccggtcaaacgttcgttgtgacacctaaaaattttcttttccccaactaaacacatcctcatttactctgctacagttgaagttgaaccacattgctcccctcgccacaagggtgtcaatccaaacgtcatctcggtcaattctgggatagcagcatggtcgaggacacgaggtagtataggaaatactactccactatgcactgaaaaagtcgtcctgcaatttctcgtaaaaaaaaaagttgtcatgcaattggggtagacccagccggggcaggacatggtctctttcgctaataaaaactccgccatcggctcatccatcacacagcgatggacacataaatatatactctctcggttcctaattaaatacttcatacaattttgactagttaaaaacatactctctttatattttattgtataacgccattgactttttaaccaacgtttagtcattcgtgttattcaaaatttttgtgcaaatataaaaatatttatgttatacttaaagaacatttgatgataaatcaagtcaaaataaaataaatgataattatataaattttttgaataagataaatggtcaaacgttatttaaaaagtcaacagcgtcatacattaaaataaagagggagtattaagcgagaaactaaaaaactgttatgttcttcattaatgcgaagagaaaaaagagaagagattacaattggtaaaatagtaaaaagaaaacaaaaggaagtattaaagtagtctaggggatcagtaaaactatatttatttggggataaatttttaatctaaaacatatttatttagggctaactagagggagtatatttgaagcggaaggagtgatgttgatcgcatatgcgaatttataccagaggggctgatatctttgtatgtgtttagttccttccaaagttggaaggttaggttgaaattggtacgatgtgactgaaaagttgtgtgtgtatgataggttgatgtgtatggaaaaagttggaacacagcctttggaaccatggcgttacggactcttaattcttgaacggctcggaagatccagagttgcagagacaatttgcagtctttcagctgtttatccccttcatggacaggttttaaccctgcaggcagacaacaacctcggagcagtttgtgaatgtcttcagttcttgacagtgctcacagtaatctactcctatttgctactgcccctgttccaaaaatcttgacgctttaaggtttctaagccaatttagcttcatattaaaacgatcaaatttctcttaattatcgattcaattgtcatttcattgagtacctgcactcagtatgttactacggagtagtacaaagaatcccttaatgcaattaaataataaattctcttaaagctcattgttagatgatttgatggaatagacaaatggtcccacttttcaatcaaatttactactccaatgacacttttctgggacattgacagaagcttaaaaacgacaccttttttgacggaggaagtaaacatctactctatttgtttcataaaaaactactatctccgtttcaggttataagactttctaacattgtccacattcatatagatgttaatgaatctagacacacgtatatgtctatattcattagtatatatataaatatgagcagtgctagaaagtcttataatataaaatagaggaagtaatctaacactctgtactagatgcattctagtattagatgtgagcatatatatatatatatatatatatatatatatatatatagagagagagagagagagagagaatttttatggtactatatattgatagtatatattgccattataaatgatctaatggcgtatattgatttgaccttccacttaactagcttgcagtataaaatctgaaagggtagacttgtctttctgtgtggtggtccggatccgatgccgccaagggctctcaccgcgccattagagcaggtacaatagcaggctattagccagttataaacatattttaatgagataaacgatgagagagaagagcagcaggctacagatttataaccagctagctgcaacacggactccaagacataatatatgtatgacaggtgggatcgtatattaatagtatagtaagcaactattgtatgaattggctattagattagctatagatgaattagagatagcagtgggctgtactattgaactttgctcttatagcgctatcgggcgcattgcacgcacacggcgtggatgcgcgacgttccgcggcagcgtcgaagacaacttgaatggcacctgaccggctggtgtgcgggtcagcgggtgaactaaaatgtgcttgcatgcacaacaagccatagcaccaccatatgagaatgattaattttggtattgggttgtgttagtagtccaaactataaggtctatttcttatctgggctgcaaaagtgaaatgaaactggatttgtgtttgctactgtctctcacgagcgtaagttaaggggctgtttggatgcccacctcaatttaccatagttttttattaaaggtgtgtcaagatgcaaattgtgtggctcaaatttaatggccacacttgtgacaaactttggctaagaaaagggtctatgactagtaggaccaaaagaatagaaagtgtggcatgctaaagttatagaaacaaaccaaacattagctacatttggacaaactaacatacctcaagtgtggtaaaatgtggcatcaaccaaacaggcacgcactagagcagccgagcggcgacgagtcacaccgccgttgcgcgccgctgtcggggcttgtctctccaagtcgcacgccgctgtcggggctcgtctctccaagtcgttcgcgaggtagtgactcacgacatgacatcacaaacatctagggattaaacctaaataaccaattacattttttttggcaaattcctattgtacccttgtaaatactggcagcatatactaccagtacaatgtgcggtaaaagttctcttacctcacatttgtgaggaagagaataaatcacaacacacatatagatgaggggatttgatcctacgacctccactagtcaacttcatgaaaatagtatgttattgtgagactttaaaagttacatttaaattttattatagttatatatacgttataatataacactacgatcatactatatttatatttatatttatatgaaataaatttttagaaccctgtaccaaccggtcagtggcgaaagcccgccgggggggctaacctgcagcttggctcgcgtctcctccgcctcgaagcacgtcttctcccaatcatttcaccagctgccatcaactaattggtactgctacttccatctcaaaatatagtaatttttagctatgaatttaaatatataggtgactatattaataactaaaaataattacattttaggatgaagagagtactatttagtttggtgttttaatctgtattacgggagccgcaacttgacttgcagcttcagaaatagtagatacatgtgttcaaagtgataacagcaagacccgtttcagatcctaacagaaaagtacgtacaatattcctgagaactgtatagtctgtattctagatatgcaattttctccgcacatcgacgacagcttttatgagtcgaggtcgcgctcgagcttcacgacagtcacggtgattcactatttcactacgtacaagccgcccatgctcaagatcactgttgactgttgagtacttgagtgcttaccatacgaacatagcgaattggaaaacccaaatcagtatgaacgggctataaaacgtcgggcgcgctaactggcgctctgatttgcactgattttctactctaggattggctccaaccgttttatagcccgtgcatactggttaagacc

SEQ ID NO: 8958 - DNA, 3444 bp, Oryza sativa
gcgaccataggggcgcgggcgcgccgcctcccgtcggctgtgccggcgtggccgccttcgggcgtgccccgcggctgccgtgtggggcccggctgtcagccgcccgcgcccttaggtgcggctgacgcgtgggacccacggcgccggccggtgcgagcccgggtgcgcctggtccaccgtgggccgtggggctgccgcgtgggccccaccaccgtggacccggtccgcgcgcccctcccctcggctgacgcaataaatccatttttaaattaaaatttaaatgaagaaattcgcaaatatccatttaaagagcatataaacttcaaatggccataacttggccatttgaactcggaattggaccgttcaagtctctaatttttccttaagaagtcaagaacccatttttgtgctttgtttctgcttgttatatggagtttattagagtaaatgccttttcttttctgttggtcgtgtagacgctgcagcttcggaagatccgctcttcgtggaggttgaagccggcgtttgggaaagcgagcaaggcaagtcacatcatccttgaacatattgaatcccagtttataaaattatgttgctttaaattattgcattatcgctttatttaaattcccgcgttatcactgttttatctagccatgcctatttagctttgttatgaccttattattgttattgttattatttccttgttcaccctagaataaacaaaaccccaactagtggacactctactcatggtaccactagtatgattttaggtagatgcttcgctatttaattaggtaacattaggtggttttacaactctagactttgggatattctcatcacctggacactatggaattgttggattattgtggaattggattcacaccgctccttctattcaaaatccccaaaatggttttaggctgggctcggggtgcatggttttgatagtagcacctcggccatataaggaccggtcttcgggcctctgttgcaaagcactaccgtacttccacatgtctagtgggtaaggcttagtttgtggctcagtctggttataaacaaaagtacacggatggagatggacgaagtcgggggtcgatggacatctctaggacaaatgaaggctacacgagctgcggcccggtagtcgagatgtcatggcacagggccggtgtcctgctgctaggggctcagtcctgcctacctgtcccgggggttccggccgtaggtgggattgggtcggtactcttgtctatggctaggatgggttggaaactatgtcacgtcttccgtctgtataccgtggtggtatgtggcacgtggctacacgtgaggaagatgtgtcttgtgggtaaagatgtacacctctgatcagagtataacctattcgaatagccgcgccctcggttatggacaagccgagcaatgtacccaagttagtgttttaattcttaaaacctgcttaacaactaaaatgtggaatggttggcctgggttggcttgggacgagctgggacccagggtcgagttgacggttcggtccgaatcatcgtaggccttgggttaaggcaggttcgtgtgggttcacggccttgataaataatattgtatagttctagaatcgtgtttacaaaatagctttgagcaactaagtgtcttttaatgctgtttactgcaaccctaaccctttatattataactcccttgtactcccttgcatttattatgcacttgtgggtgtgtcttgttgagtacggtggttgtaatctgtcttgctcaatttttcccaaacccagaagaggagtctctggaagatgaaggctttggtgtctagctcgtgcctgccgtcaagcgcctgtggtcgtcgccctagtcttccgctgtttcccgtttgtttttgtgtgtgctggccttcgctgcccatgtaataaattaactatttacgcttccgctggttgaactctgaactgtatcaacttttggtgtaccttgcctcctgggacaaggattaatgcacgcacgtaaggaacgcccgttgggttatttccggtcgtgacaccgatcatgcattaacccaaatacttgggtaatatttcttcaaatatttgccattgagcgctcgcccatagacttcgccatcaagtccttgcaacatatatgcccccttagagacaatcttataaatttggaacggtccttctcaatttggcgaccacttgccgaatttactatcacgagtaccaatcggcaaaatcaatttccatacaagttcttcttctgaaaaatctttaggtaccactttcttattataatggcgagcaacacgttccttatccttggtaacctttgcaagggctcgcaaccgtgattgaaccagatcctccctctcatcggccataaggttgtaatactcatcggctgttaaatcgttttgcaactccgttcgtcgagagccgattctaacctcccacggcaaaacagcctcatgcccataaacaagtttgtaaggagggacttggatcgatccatgacaagccatcctataagaccataacgcttcggccaaccgagtatgccattgccgaggataatcagaaattttccgcttaatcaacttgatcaaacttttattagacgcctcggcttgcccattagcctgtgcatgataaggtgaagaattcaataatttgatacccatgctatcggcaaactgaacaaactcatcggacacgaagattgaaccctgatcggtagtaatagtttgagaaagaccaaatcggtatattatatgttcttgaacgaattgaatggcatccccagaatcaactttcttcgaaggaatcgcttggtaaaataatcggttaccaccaatataaacttatgtccttcacttgacggtgggttaatcatgccgatcatatcaatttcccatcctctgaatggccagggcttaataacaggattcatagccgacgccggcgctcgctatctttctcaataactttcatgtaataggcttgtctcgtgaccctgaccttgcttgtcatcgagatcaactaccgtatccttgggatagacgcttgaaccctccacgacgccctcaaagtaatagcttgggttctccatcttcgagtggctatatatcaaaatcggatacctttagaaaagagtaaagtccatcaccggtccctaaacttgtaccgatgtgtcatcccggtccttaaactcgcaaatcgaccgttcaggtcctcaaacttgttcgactgtgtcatcccggtccctaaacttgcagatcactcgtttaggtcctccaagttgttcagttgtgtcaccccgatccctaaacaggatagtctaaaaactttatatcaaaaaataattcataactttttcatgtgaactctaatgaagacaacctttatatca

SEQ ID NO: 8959 - DNA, 2458 bp, Oryza sativa
gaaggagaaattatttgctaagtctgatttgccatatccaaccaatgttatatttcacatttttggcgaatataatgatcttggaatatattttgtgcatagagtttacatctgctcggatttagaacttactgtacatgtggataaaacatacaagctagagagaaatgttattgctaaccaaattgtctcgagtttgccttgttttaattggaagaaacaggttgttgtaaatggactatgcaaagagcaccatatggaaaaaccgaggacggttttctgtgaagaagggggggatgatgtgaccatggctaccacggatgcaaccattgctcacatcatggatgaacatcatggagcacgaccctaggcacccctaggtcgtcctcccacccctatatatagctaggtaccccttcagggtttcttcggttttgatagattaaagtttagccattgctacttgcttgcagcgcgcgtgtcggctacaccctccgtctgcttatctttggaaccccaatttatgttttgaataaatttctggttgcaatatccagattgcttttatcttggtcttgcttgttttttcgatttgcttgcaggaatagggttgatctgcaccggcaagatccacaacccatggagaggtgtatcgatcgctaagccgcaacacaacgtctcgtacggttgtagtcggatcgtcaacgtttctcccaaatcatagttctcacaactcaccgaaagatcgggccaacaacagccttgagtgtcgagaggacctcagggttcatcaaaggtatcgctgatcggctagaggcatcatcactagatagtttggtggttgattgtggctcaattaggactcggctacacaaaattcaggctctgatcccagaggagttagccgatatccttactctagctgtttaccttgagcaacatcaattcaaactagagaaagctaagttaagactggccgaatggcgagagcgcaaggacaatgaagccactatccaagctaatcggcaactggtgcatgaagagaaatccaagcttgatcaacaatctgaaggcccaatcaaatctaacattgatcggctcgaggctcgcaagattgaactcttagcacaacttgaagaatgcaacgctgagctggatatagaacacaaaaaactagccgatctcccaaagtctatcaaagagcagaaagcaagactcaaatcggctatcaagcatgtcgctgatctgaccaagtctctgaagatcatccctagaaccgatgcttaagacgctcaagccattgaagaagtagagcagattaggcaaaaagctgtatcggctatccagcgctatctttctcaataactttcatgtattaggctttaggaaattttgtaaccggcaaagatacttctaagtatatcttgataatcttttgtgccgatacatgtataaaacatcctaatttgcttaaatttatcaaaatttgcaacttatggatatatgtgcccccctaattttacgatgccacaagtagtgataaaattaaattgtgaactaagggcgatacaacaatatcggccattgtacatcggcaaaccacaaccgattacattataaaaaacaactaaaggcgatataacaatatcggccatctcaaggcgatgtaaacacatcggctgtcatacatcgacaatactagccgatgtcgcgtctcaaaacgactttaaaatacatcctcgaaattatgcctagaataattaaaatccgtgtgaaagcctccaacaattaaaatgtgcaaagttaaaagtcaaataaggcttggaggatttttgtatatttcctaaaagcctaaaatgcgtaaataaattttagtggaattttcagagcacaaataataattaagaagaaataaacaatgttaaaaaggttttataaaaagaaaagctctaaaaagtcctttttcccccctcaccctcttgggccggctcggcccatctctctccctctctctcctcttccccgcggcccattcggcctcctccccgcgcgcgcgccgctgacgggcgggcccgcccgccaccctcgctgacgggtggggcccacccgtcattcccttcctcccgccgctcccgccgcccgcgccctagcgccgccgccgccgccgcgaatcccgccgcccccgtccgccccgcgtgcaatcaagaggttggaaatattccccgggatcccctccccctttcccctcatttttccctctctctctccctcggattcgtttggaaactttccccctaacctcgccggcgccattaatggcggccaggactcccgcgcctgtttccccctcctccggccaccccctccctctcttaaccctatataaacccctccccgtgcctccctccacccgttccgccactcgccgctctctctgcccgccggaatcgagctcgcg

SEQ ID NO: 8960 - DNA, 20290 bp, Oryza sativa
  unsure (1)..(20290): unsure at all n locations
ctctaaataaaaattcatggttattttattttattttacattgggaagcaaaagatcacaattgttttttttggtatgagtttattttattctgttttgtacctttgtaaaagattcaacaaaagccgtagcgaaaacagttccaaggttgaagaaacagaacatcgaattaacagacaaacaagaaagctggaattgatgtggtagacagtaccaactgccaaccaatatagattgcaatacccgagctgttgtgtctacgacccaattaagcaatgtctattagacggccggggcgccatcaatctgcatcatcacgctgctgtaaacctcgatcccaaaagtgtagacccgaccacgttgggcgccgttggccaagctccatcacccatccactgtgcagaacatggatgatacatttcatgcatatatcatcagcgagacgtacgaaagctcctggcacgtggcgacatgccgtgtaccaaaagagcaggcaatgacctcgactgcacatccggtcaccgaaccatatccatccacgcccatctaacttggggaagaaacgatgtgcatgtatcagcttatccaagtgagagcaagagactgtatcggcttacactactagaaaaatcatacagtaagaaatgattctgaatcttacatttttatatgaatatattataataaaatatccttcttaatgcgaaacggtacgacatccatacagtgcgtacaactactacaagttcaagggtggagaaacagacacgaacaagggagaagctgctagtacatacatattggccggtaattaatactccaatcatttaatatattcctactgtttcactaattacaaaatttaactattttcttgtatgatatgtcgtgaagtgtcacaagcaacctagaggcactgtcctctgcgggtattacgcgtgcgaattcctcacggttaatgggaggtacagggttaacgcagaggatgtaagtctctagactatggactagacagtatcacatatttatgatactaatatattgtttttctctaatgcatgcagttgccaagaatagaatttcgaacaagctttgacgatacaggcatcacaaatgtccagagcgatttgtgtcacttcatccaccgtgagtgctgtcatgtgtgaggagatttattcgtcccagagggtgccctagctacaagtgacgaattcaagcaactttgggagtagagtactgctatgccataatgtaattagatggcgtatttgaagtgacaatgtaaaaaaatattgtaatatatattttgacaacacttttcacttatgcaatatatgtagatttctcagtaccaaatgcttgttaattctaataatcttcctacatcaatttctattaaataattaaaaattaatttatgggcaaattattattgtatcaaatttcaaaattttctacccatcttcacaggcggatgtttttttttttgcaggcggccgctttctattttcgcaggcggacctgtctagctaacgtccaactgcgaaaattatcttcctaggaggacggccgtcccgcctgcgatcttcacagtcgttggcttacaggcggagccgccgtccacctgggaagacctgtttccaccgccggcgataatgctttttctagtagtgttatccacgttagtatcttttatttttcgtttttctttgacccctggcaacggtcttctgaccgtgtgtgtcatgtactcaaactctgttcttttcttctagtatattagcgtgtaatccatctgtgtgttcgtgaaaaatattggactgacacagcatgccaaaggacgtaggtatatgtcacaccctgaaaatcgctaaattataaattgttgtgaaaaaaagaatttttagaatttatttaataattaaagcaagtgtgtgaataaaatctatgaaaaatttgaacataaacttgagctagataaaattttattaaatactttgtatgcccaagtattttctggatttttcccagaattatttgagaattggaagtatttttaataaatgaaagatcatttcagcaattatttaaattaaaaagttaattaaaattcctcttctttgtttgggccgaattcagcccactcctctccctctctcttagctgaagtccactttttgtccctctagcaatcgggccaagcaagtaaggaaaaggaagcccatgaaaagtctactttacctcccctcgctacagtaccttcttcctcctccagccgagccgtacagagccgatccgtgtgcgtgcgccgccgcttccttcgcaaaatccgtcgcatcccgtgatccgtttccaaaattggttgcaaaaacggattcccctcgatctcctctaccttatccctaagaaacccctttgaataccgttgtatatcgcgtgaattcgacgcggtttcgagctccgtttttccggcgaactcggataaaccctcgtttttctctcgccaaatcccgttgtttttatccaacctcttcgcacaaatcctataaatagcagcccctcgacctcctcttccgtttccccctctttcccgaattttttccttaaccctagcctcctccccgcgagctccctctctctccacctccggtcgcctctccagccgccgtgcgccgtcgccccgcccgtccccggtcagccccgtcacctccctcggcttcgcaagggcgagagctaccccggccactccttcctttgcgccaaaccccaccggaattcgccgtcaccgtgaagccgatctaatctatctccggccgcgctgttcgtcgtcgtccatcgtcgccttcggtcgccgttgtttccattggattcgtagctgtgaggagaaactcgtccacccctccattgccgccgcccgtcgccggaaagccgtcaccatcgtcaaccctaggtcgccgccctatggagcttgtcgccggccatctccctcgccgtctgtcatcgcgtaagtggtggtaagggttgccttgatctcctctctctcccggtgccctccgtttgtgtcattgtattgtggttctctgataaccaccgttcccgtgctcaccggcgttgatcctgtatggcagccatgtcatcgctgacatcagcgccatcttggccatccaaaattaatataaatttgtcatctctttttaataacatattattcttttttaatatatgtcatctaccaaatatgatctaatcttttccggaggatgttttaatcttttgtctcagctataaatcatttgtaaattgtttaattaatttggaatagtctttttttaataggtttaattggaattaaatcttgtaaaattcatatctaattcatacgaactcggaatgaggtcgttcaagtctcataattcatctaaattcaagctctacctatttatgaactttagttgtactgtttatttggtttttattagtgttatttctcattttgtgttctaggtttagttttctgttgtttcagaggatcgttcgttcgttggagaagttcctgaagacgaattgaagacacttgtttgcaaggcaagtcacacagatcccaaataaccctttgagcatgttgaacccgtttaaagctaatgttttatttcaacttatgcattattttcgaatgtcatcgggtggtgagcctttcccaattaattaatagccgaatatgactttatttttctatgggttataatttgattagctagaaccttatatattggattggttcagctaaatgctatatatatataattgcttagccatgcttagaaacattagttcattaatgggatgaatcatactacattattatttatggttatatttaatggtagctcatgatggtcaatcgtgttatgataattaattgatgattaaaatatgattaatggtgggttgtgagcacatagttttgaaggtcgtgctcatgacaattaaggaccggttcgcgagctactgttgtgagacattaaccgtgccaaccacaagccagcatgagcaacggctttaccttttgtatagcatgattcattgcggggtgcaagactgtgaagcggcgagaagtccgtgggggtcgctggggagtccatgcctctggtttttgagggagtgattatgatccagaaatggtgcgctgtggtgagttgtgttgtgcaaagggtactgtcacgatttccccctttgcagtgccgtggtggtacttcaaggcatggcaacatgtgtggaatcgtgtcttgtgggtacagtggtacatctctggccagagtaaaactattcaaatagccgtgcccgcggttatgggcgggtctaacaatatttttcgtgattagtccacactactcattaatgataataatgtgataattaatttgactcctggtttggaatggataattcctggtttggaggtttaatctgtacgaccggggttggttgttcaggtttggttgggcctgtgcagcatggttgtgctgttcagtgttgattaatattgatgattaattactctactgttttacaaattctcaactctttgctaaatgctgctttcgcaaatgaatcctatattatgccatcctttgatatgcttgtgcacttgcatatttgctgtgtagcttgttgagtatgtcatatgctcattcttgcaataatcatcaaacctcagttgaagaaaaaggatccagaaggagaagacctttggcttagatcccagttgagctgcctgtgggagtggagctgaagcttcgctagattttattttccgctgcagttttctttatggtgagaactaagtgcatcttatgtaagtatttatcgttttagttattttgatgaatctgtatattaaattgtcagtttgtgtacctcggctaatttctggacgagggttttaatgcacaaattagttccgaaattacctgtgaatttctaggcgtgacagtatatctcctcgatatatcatgcattgcgattgctcatcagctctcgctacgcactcactgccgttggctgctcgacacgtcggtgcaaagccgggaactttctgccttctgcgtgggcgcagatcatgtttggttgcgatctttcgcttggtggcgcgttcatgtttcagcctttctggtaaagaaatacaaggcttttcagaagtgtcgggttatgtttttcaatcggattactgaacttttttggcttctggctgaaatttccgccattttgagctcacatatataatactatgagcaaggattttaacagaaattaaggttaaggatgcctctggtagtttagtcagccagttcaaataaaactatcactactacgtaatctcaaataggtaccaacttaaaggtgctggtaagaggaaaccgacacctattattaatcgtagataccggttacaactacaaaccgatactaatactttaggtgtcagttattaaaaaaaataaaagttaaaatacatcatttgaggatagaccctatcgtttacctgacaaataaataataacaaaaattaaatgaatactaaatcactaaatcattgtacataacaaaaaatacattaaatgccttccagagcgctcataaaacaccctatatcatgccctaaaattctaagaaaaaccaataaattgacgtatccattatttttaactattaaatctatttttttcaaaaattcttaagtcgccatgtgtcacgtcctataaaaaacggagagaaacttagaaattcatagaaaaatgaaacacactatcatcggctttcacttaaatcatttagacaaattaaaaaaataaaatctcctccgcctcctcctcgccctcacacgcacacaacattgtccatcctctccctatcatttatctattaaacaaaaagagaaacaatcaataaaaagagaaacaatcaataatattggatttttttagaaacaaagtaaaaatgcaggcgctcacaacgcgcgcacgctcatacctatgagggcacacatgcacatccctcatgagtacttctgagagactgggcgcacatattttgagattgacaaagtcaccacgagcgcttcactgtcgacgggtacgtcgtctaccactgaaagaatttatcaatctaggacttgaacccgagtgggcaagttccaccacaagaaacctaaccagttgagctacgttcacttcgtaataatattggatattaaaacaccataatttttaagctatattcctggaatactcctatgttttttaaaccggtggaaccattatttctaagaaaaacaagtgtgtatttatggtacatcacatttttaaaatattattgtgcaattatattttatcattatagtattcaggttaggttgcatagaacctcttacccactctacatgaaatgttcatagatggaccgtctctcaaactacatcaatcatattaggctatataaaatttagtggattcatgtcccacccaattcatcctctaataaaccatgataatatatatacattaataaaacattacttttactttacacttacttttatttccgttgacatgttttctaaagaaaattagtctaccatcttttcaaatgacgaagaagattataaataattgcttatagatatcacttaaatataagcatagagcaattttgacaaattgaaagctgatttcaaacaggagtttgccttgcatatgcatagagcaaaggaagctggcatctcgctttggcaatcatggctagataattttcattagttttcccttgtaattatttgtaatctttgtaaattcacccatttattatattttaatatatattgcaataggagcctctcctgttgtttcatgtcaaaaaaatatcacttaaatatgatataatataaagctaatatgttaaaaaatataaaaacaactaatgccgacgaaaacaacggagaaatcgtggccggttaatattttgctcctataagtacgtgtctcgaacttaacgtacgacgcatgcccgcgcatttgcgcggactaccttcctaattaatataaaaggagctaaagtaacttataataatataaaacagaggtagtatatacttggtacccactagttataaagttgctacgatgattagccacatcaccgcaattacctgggaccattagatcttaaatcaacggaaaaagtacaccgaaggtccctcaacttgtcagcgagatacaaaatcatcctcgaaccacgaaaccagatatgcggggtcccttaactatacaaaaccagtcacccgagatctctcggcggttttaacgccggatttctcctacgtgacgaatgagtcagcgtggaacccacgtagaacccacgccacctcatctctccctctagtttcccctcttctccctttctctccctctcacttttctcagccggcgacagccggcgacaggcggcgctgtgggggaggaggccaccggggggaggggagaggaggaggtccggcagccggcgtcgcgccggcggaggcaacgccgccgtcagcatcctcccttcctcctctctctctgtcttttctcctgttgcaagccggccggcaacgaacatagtggcgcggcggcgccaccggggaggatggtgctgcggggggcacgcggcagaggtgggtggcgccggtgccgaggaggaggaggtcgtggcactgtcgtcgtcgtcgtcctcggcgtcggggaagaaggtgggcgcggcggcggaggctggggggttgccgcggctggtgtcgtacaaggtgctggtgctcgtgctcgtgctgcagtttctgtacagcaggcaggcgtcggtggcggtgcccaagagcgggccgctcccggggtgcggcgccgccgtcgacctcgccctcgacacgctgaaagtttgtgtacgcgtcattctatcttgggaaacatggctgcagtgctgctcggtttgaacttcaggtttatctggtaaagatcaaatggtgaactgaaaacagtaggtgtccatcttgttcaggcatagatgtgtttataaacttcagaatctgtattactcctagtcgaggtagaagttgatacttggaaattggaatgataaacagatgatattctcgttgtttatacacaggacaagctacaggtttcgcagaattaaaatgcatacgaatgcaaagagaatttgtcctctgcttgcaaggggccaatgatatatactgtatgagaagaccaacaaaaagatcccagagattctaggcaaatgttcagagttcagagacttgcaaactctcagatgatggacagtgtcatcgaccataacccggtcagaatgtctctataccaattttagtattctgcacaaatctgacgacgtgatatatatcataatcgagctgaaaagattagcattggctagctacaaacagcaagttgacaggctataataatctcatactatagtcctacttgaaaaggattcaaaagattgcttctttatactgtacagacgatggtagaactgtactacagtatagaattcagtctaggttcttcagacttgccaatggcttgaacaagaataaaaacagagacacctttcgaactgaagaagcaaccatcaaaataaacaggctcgtgaattacagtatcttggagatgaagaagcaatgttcagctttccatccacactagccgcggcaaccccctagcctccgccgccgccgcgtccaccttcttccccgactccgaggacgacgacgacgacagcgccacgtccaaggccgcctccggtggttccccggccatcccgcctccgacaacggcgccacgctttccgccgccgagggctacgacggcgaggaccgcgtcagcgcgctccccgacgacctcctcgtcgcccgcctcccgtcaaggacgcgactcgcaccgccgcgctcgcctcccgctggcggcgcgtctggagctccacgccgctcgtcctccgcggcaagccccttgtgcgccggcgtggagggccctaggggcggcgaggtccccgtggaggcggtggtggccagcgcgtggaggaagcacggcggcggcggcgctggtcgccgatctcctcctctctgccgccgaggccgtgggcgttgcagccgtcggccgcgccctcgccggtcacccggaccccttccgcgtcgtgcaccggtccgagctcgccgagtcctcaaccatctgctcgcctgcaagcctcgcgctcgcgctcaacaggcagagagagaggaggaaccgaggaccggctaacgtggcatcctgacatgtgggacccacgtctcgctggaatcaatcacacattctgcccctaaagcgccagattcaacgacaacaaggactcctcccgctgcctttggagctcagcatcacctcaatcttctgtttcatataggttcaccgaacttccatacaccgattgattgtacgcttgctgttctcaactgggcctctgaatttcctctggtttcacctttgcgagtgagattgtcatgccgcaaaagcagatatggtccggtattcccttgttccccgtattggttatgttctttattccttgtctagttgaaactaatcgagctccgtaggagagttgtgtagttccactccatctacaaaagagaaagggctcctataacttgatcgacaggacccaaccaactaaactattgattttggcaaagctagaccttttgaggaaaacagatacagataacgaaaggaagctattagtttttcttgtactcgactcggcttttctttactgaccgcttgcgtaaggaaagttgacaataggaaaaccaggtgagaagttttagagctagcgtgccctacttcaataaggtattacctcgccgagggggtaggattggattcattcacttgcattcctgctagcactacaaaaagctccggtcttaacgcccttacggaagcagtgcagcctttcctcgggttcgtagagtcgggtttcccgtttacccacaacggaggagctgcccccaccaaccaaagcaggtaggcggccacggttcataacgcttggtcccacgctgactcagccaccacatagaccaaaacctgggtcaaaaccaccgaaagatctcgggtgaccggttctgtatagttaagggaccctatatatctggttttgcggttcgaggacgttttttatctcactgacaagttgagagatattgggtgtactttttcctaaatcaacatttcatgagggaaaaagtacaccgaaggtccctcaacttatcatccagttacaaaatcatcccccaaccgcaaaaccggatataacgcatctccaaacttacaaaaccagtacaaattaggtccctcagtggttttgaccttggttttgtccgatgtggctgctgagtcagcgtgggacccacgtggactccacatgttagtatgccacgtcagcaggtacctgtttcccctcctctcccttcctcctctctctctctcacactcttctctctgggaaggccggccaacggtgcggaggaggtcgccgggcgaggaggtccgacggccggccggcgatgcggcggcggcggcgacgcggcggcggagacacgggagaaggggaggcggcggcggcaggcgtgcgcacctcctcgagctgctcctcctcctccccggctactcccacgacgccgactacctcaccgcccttcccaatccctatctcatcgccgagctatccacctacgggtccgtcgccgatgctgtcctccgggccccgccaccttcctccgccccgcagcctcgccaccctcagtctgcccgacgcggtggaggtggtctgcgtgctgaaacaggtggaggagaggcggctgtcctgcatacttgcattattttttacggtaaatctccctgagctcccatctgaacctgacaccgaaatggcatcaaagctgttggaattgtgaaggtgatcgacaggcccacgcatgtttcttctcgctgtaaacctcatcccaggaggtttgtttgtcaccaatccatcctgtaaaagagatcaccacaaaaacagaggaaagtcagatcctacatccattgttcagttccataatctcacccttatcaagcaaaaatgaaacaatatgattcaagttcagcaagagaaattctgatcccaaacagttcggcacaaaaaaattctgatctcaaacaaaaaatatcacacagcaacacaaaaagaatgacacagtacgattcaagtttagcaagagaaattctgatctcgaacagttcagcatgaaaattgctgatctaaaaaaaaaaaacatgacacagcaacaaaaacttcccaaatgatcaatcacaaaaatgtaagctccctttcccctatatttctttagcaatcttctttgcatgccaaaagccttctttcttatccatcaccaaaacgaaacaaagcaatgcaatgatgatgcactgaaaagaaaaggctctcaacaacccggagcaggtgctgcgcaggatggagcaggagaggcggctcgtgcggaggggcaccgccgggagcgtgtccgtccgcgtcctcactggcggcggtggcggcgaggccgtctccttcctcttcaacggtgcctcgatggcctcctcgggagccgccgtcgccggccgcaccaccctccgggcacgcgcgccgccgtgggggaagacgacgaatgcggcggcggaaggaggatgatgacgggagctatcgtcactccttgctacgatgaggacggcctcgagtccaccgagagcggcggcaaggctcgtgagtccacctctgcgcccggcccgccgccgccgcgtcgccacgccaccctgccgctcgtcgccggccgcccagctcctctcccgccgcccgcgcgctgctcctcccctgtcgcccgccgccgcattcccaccttccgtcgtcatcttcaccaccggcggtggagcaccatcagacgcccccacatctccggcgcccgtcgcctcctccatccctcccaactcacttgagcggacgcgagcagccgcaggagctcctccagctccggccactggcgtggtgctcgtgctccgcttccgcggcactctcgccggaaaaagaaccgaggaagagaagagagagaagaaccgaggaagaggaggagagggaggggagagatgatgtggcatccttatacgtggggcccacatgggtcccatgcttactcagttgccacgtaggataaaaccggggtcaaaaccaccgaaggatctattgtgaccggttttaattagttaagggacgccggatatctggttttgcaattgagggacgattttgtaactcgacgacaagttgagggaccttcggtgtactttttcctttcaggagtgcacaaggccaccatctagaccaatcaggcccaactaaacggcctccgctttcacccatcggcccattattgttaaagtcccgcatgttcaaataatctattgtgcccatgaaagccatctgaagagcagttacgcaaaaaaaaaaaaaaaatcatgcatcatcactaatggtgaagatcagaggccatacttaattctccacccaaacctctttcaattcaccgttattgtcttttggaaaaagtccaaatacccttctaaactttcgatggaagtttgtctagcactctaaacattaaaaccggacatccaacctcttaaactttaccataccatccatatataacccctaagatgttttggatgacggttttgtatattttgaaagcttaaatgggtaattttaaataactaatataacatatttgcatatcatcagttataagtcatcaatttcttcttacacagtgatatcatactattattacgttggtatttgtttgtaaatgagagccaataaggaaaaaaaagaaagatttaagtcaaaattttaatatatatgtccaaagtgaatgacatgtgagcgaactcatccaacttatatacgaattagatgcaaaccattatgcaaaaccatcttaggaggttatataaatggtattgtaaagtttagggggttgaatatccagtttcaaaattcagggtgctagatggacttccatccatagcttagggggttatgtggactttttccttctcttttatcccagctgaggccacacgctaactccatgtgtcgttgtactaattaaattcaaatagcccacaatatatgcgagcaccttgtttaatgttgtttgaatttttattacgaatgtttatgtgtggataatatttttttaaaaaaatgacttcatttaatttagacatgcatgattttgatccatccacataattataagcatattgtataaaagcaaaactagaagtagcattggattattgataactggctatattggagtcaattttcttaacaatgtcatcatatctactattaaaagcatcttctaacgtatcatcaaatttatagatataagactaatagatatatctatacaacgatcaattgattttttaatagcatagggtagatcgggtggatcggaggttatcttgtgtgaaactatgacatgaggtagcaggatatctctttttggagatgtcttgattgatcttggcatagtgtgcaagcgttgtcttcttcaacgccaccatttgctcttcaaagtcttgccgctcctcctcggtcaagtcctccttggtgagattgttatcgatcacgttcttgcttatcatggttgatgcagacccccataaaaggagtagtcccccaacccggagctactttcccatattccgaattcaagggtttcaataaattacctacgcgagtttgtcttggtccaggtctagaactatcttcaacggtttgtgtagccataaattccatttaatgatttgtgttgactttgtatactattccgttgtagttgtaaatacacgatcttttcgtagatccattgtaatcttgaaattctataaaaatggaaacagcaactttagtcgccatctccatatctggtttacttgtaagctttactgggtatgccttatataccgcgtttgggcaaccctctcaacaattaagagatccattcgaagaacacgaggactaattgaagtaagaagtctcccggggagacttcttacttcaattaaattatttcacttttttagtcggaaccttaggtggttcttggaagaagatagcgaaaaaaattatccctaaagtatgtagtatatgattcgtctatttcttagagtaggacaggcgaatattcttattcttatggttccatttaagaataagtatgccatacgccccgcggggattgtagttcaattggtcagagcaccgccctgtcaaggcggaagctgtgggttcgagccccgtcagtcccgaactagggttcaatgaatggagaaattcatctttcctttttccatgaaaaaaggggggcaggaagcaagatcaaatacctatggggtacccctatttcactttttttagttcgcgtttctcagtaaagagaggagagtataggaatcatagtcggaatattttaattaaccaaatatattaatatacggttttgagttacttattataatcggcaagtgcacctagcaataatggggtcatcttttcgcttatgcttatgcttatcaactaaaatttaaattttcaatattaaatttagagctgattttaaagtttttttttatcgaagtttatttttcagcgtttgcttttagatcgctaagaagacgtatataaaagttttatttaaaaattacttttcgtttgcaaatatgtcatttcgcttattccacagcgaaacgatggccaggaatgtttggtcttttggtaatcaaccatgtggacttagcaaaaaattgagaattaatctaaagcttcccagaacagccgatgcaattgaatctgctttgatttattttttactaggtaaccatgtgtagtagatcgaaaggatattgcctctgattggtttttctattcctctagtcaattcgtttatcacgtactagcgcgatcggattcgatcggctagatcagatcggtcagcaacgtcggaggcaaaaatatagcaacagcagaattaaagtgttaaataaccagtggtctattcgctgatcggagtagaaaacgatgatctcatgcacacaatcatatagtagataaacaatgaacatggatatagggagaggcatcacaactttattgatttctcatatgtgtatacatcaaccaacctctcaagccctctctctctctgtatatatacccataataggaagagtcctgttaggatacgtttctatatatttggtatgagcctatatttatctctggcagaagataatagtttcataacactccccctgggcgaataccgcgctatacacatatctcattaaaaactccattcaaaaacccagtgggaggaaaggataggagaaaagagtacatcatccacgctaattatattgcacttgttgcctcgttaaaaaaccttgcgtgagaaatattcaagtaaaaactcactaagggaaaaaaagtacaacacacgattttcttgatcgcataatctttaagatcgattattctttataaatagctaatgatctatatgctttattatattaatcaacttggattaacacaacaatatagcggtagtaaccttcaaggtaaattatcaaaacaatgattaatttgattaattcttggtaaatcaaatttaagacttccaagtcttaagtatgataatcaatgtttagcatatatgctccccctcaataagacatccgttgaaacttccatgttccaatgtcataaccacatttttattaatgtgtaaaacaatgataataaaattaccacaatgtttaatctttcgtttacttatttcataagttctactatgaacatgagaaataaatcaacgtataggagcaatatgtataaccacttattcaaatgtgcaatacaaacaaagtttaatccttacggaggattatgggaaaataagttgcaacgatacacatatgcggtatgtataaactgcatatcatttatttattcatgccttttgccagcgatatatatagcggaatttaatacatttatagcaggagaatatcagtcttttccatgaccaaatgaatcgtcgcttttcaccacttcatttcctattaagtctaaacttccatgttcacatagacttatttagcgactatggttcaatctcattgctttcttcaatagacccaatatgagtgctactatgcaactctaccatggactttggttccggatccggattctcattaattagagaaatattagcaatcatagaagcgatgttgtcgacaactattcttttctccacatactcattccttgaggttaattcattataaaccatatcttagtcatttcccaaacataagatgtatggttgtccgcatcccagaattagatagatgtgtgcactttaattccgggttttcatcttcatgatgaacctcttcatgaggcaattcaccttcatggtgattactctacaagagttgtaaggagttattaatgggtacattaacaatagtcgttagatcttagaatccgcatgcatccccgtagattttagaacattgactaacatgtcactctgcatttgtggatatactattcaaaacccggggtataccactggtagcagaaagtttactacaagtaaacataacttctgattactcctttaattcataattatctggcaagctcccgcttctggcttacaggagaataaactaaaccttcgagtttagtttggtttgtgcgttattcttacttataaagatctttttcttcttgaaaatataaggcatctttaacacatgggcttttctccccctaatgtcgatattccatctttatctaatagcatatcacaaaaatcccctatcataggcactggattaatggaattcggtccatttgtatccccaacttcatgtggaggcccatatatgtatgctatggtggtgatatattgtggggacacccaatttaggcttggttcccccaaaatccactcgtgatcgtctaggatttcaatcacgtacagattgatatacagaacaactttcgattatttacacaggtttgttcatacaagctaattatactactgttaaaaggtgaaaagatccaaactaaaatatccttatttgaaatacaagaaaatccaaagtactaaactcctaaacttcttcaactaatagaactacaattaataaattccaaagaatttcaaagaactccacaggcaaaagctcgagtgtagactagcctagaaaaactagtcgttgtcgtagatctcgcttccttctgatctccttgttagcacgtttcctctatatgtcaaattatgcaagggtgagtacttatatactcagcaagacatattataaataattaaaggtgaatagatatgaataaataaacaataataaagtaaaggaataataaaaaccataaaacatatttatcctcaacattttaattttaaaaatacttatacttcaggagtaggaatcaccctaatgacacaactccagaatcgggagtacgacacattcgaatgatttattcacctctgcagagactgtccagctttacccacacgatgcccacagatagctacgctgagaacaacagagccgttcgaaggtcccacttactactagttactgcacagtggggtcnttgggtntcattcatagtgggtcgaaactctttgccaggcctaggggcaagggtattctattattcgtcacacttttcatgaatcccactgttataaaacactgccgccaaactccttacgcaagttcaccccaataccgttcataaaccacccaacagtctttcatatagggggacaatatactaggctaagtccaattacttgatggtgtggatggacccaactatgtcatttccatggtataagggggtaataataatccggttaaaccacccaaaactttccaaactccccacaccatcttcataatttatgaacatttataatcacaatattcacaatctcaattcataaatgcccattttaaccggattcttaagtttgtaaagatgtttgaataataaaccacataaagtgatgtccaatgcatctttcaataatatcatgaaatcatgcttaaaagcttttaacatttacccacgagatgttaaaagagcaaatatcatgcatcaaatttaaatatgaagattatatcaaggtttctatatgatcaaaattttagttatgtcttgccttgcgccttaagatttcccgtggctttagcgtagccatctgggtccacgtcagctccttggatgctgataaaacttgctgtacggctaacgtacgaatacgaaaagatagcaaataaagcctataagcaaattgctacaaagaaacgataaagtcaaggaataaataaaattggagcgaggcgagaggaaaaagggaatgggttcaaaataaattttaggttgaaaataaaagagaggtggtggtttctataggttggtaatcgaataaaattgaggaaaggataaaatggagaggtggggtttatttggtggattggtttctagtcggtgctagggtagggtagcacgacggctagatatttggagttggttagccgatgctaaggcataacagctaattattggctcgtctagtcgatgctacagttaagcagcacaacggctagagagttgggaagtttgtgtaggtttgcggggtggaatagtgttactctacagccgtgagtggcagcagagcggtttgaatcgcacagagcctgaaagctagtgtgcggcgtgctgtggaggtcgagggagtagtgaggctccgaccactatacacgtcgaggcgtggggtgcgaagagagacacttcgaccttaggattaggttatgccgggttttatgaccaacggtttgacgtcggggtttgagaccacgcgaacgtctccatggaaggcgtaacgttcccacggcgactatttggtagctaagggatgaaatagttgaaggttttagaaataaaaagggaataaataaatcaaagggatttgaattcaaaaagaggttttaaatagattaaagaaataaaacttaaaatggtattttaaaagaaataaagaaaagggtatttaaagaaattgaaggataactaaaatttaaaaaggtttttaaataaaataataaatttaaaattaaagggatgtaaagtaaaataatttttaaaggctaattaaaataatttaaaattagaaagtaaataaataaataaggaaaagtgtttttttataaagaattttaaataaatttttttaaaagaataggaaatttggtatcaaaacgaagagtttgaaattatatgaatttaggtcaaagtctcactgggattggatttgtggttggaaagatatgggtgtctaaagatcgaaattgaattaaaatcaaataaaagagaaaagttactgtgtagggggcccacttgtcatatgtctcttcttcttctaattcctccttcctcttgcttcttctctctttcatcacgaacaaacagagagaagggagaggaggggcgccggctctccggtggatgaaagactgtgacaccggcggcaacacgtgttcccaagcaacgcgtactcagggagggtagtttccggtacatagcgttagggaggtgaccggaacggcggcggcaagagcttgctccggtaacaagaggaggtgactgtgatggttggtttcggaaggggaaaggaaggggaaactaggaaaatgagttcgcctcgtcgaggcaaacccgatggcgcaagggcttggtttgggatgctctagggatggagatcgatcgatggtggccatggcctaacatggcccggagagagagagaaaagctcggtttgtgtgggataaacaaaggggggttcgatctcttatataggcgatgaaaggcggttgccgatggcggttgtggaggcggtttcagaggagaagaagaagaggagcacggcagcggtgtcggtttgatttcttagcggcgaccggtggcgtgagggagaggaacacggcgccgg

SEQ ID NO: 8961 - DNA, 3393 bp, Oryza sativa
taagcagaaaagagcaaaatcaccaaaacagcacataaacaagcatgaacagtacatgtggatatttttaatatgtagatctcaattttagaaaaatttagagacttgaaccaactaaatcggagctaagatgaattagttatgaatttttgaagattaaatcggattaaaacacttaaattgattttaattgacttatgacgcaataatgaattatttttgaaaaggaaaagaggatttattgcgtcagcggctagggtttcggtggaccgggcgcacggcggcggttcacgcgaacggacggccgagatcgacttgatccaaaacggacggctgagatcgatcggtccacgaccggctcacggcgaacggccccgatgacgtcagcgatgacgtcaccaccggcggcggcggctcggcggctcgggcttgcatgctcgctggcgaacgacggcacggcggcgcaaacggaaggcaccaacgggtagagcgcgacgcgacgaactcaccggtgaccaaaagagcggcggaagatcaacggacggcgacggcgacgacgaagaaacggtggcggtcttcaggtcaacgacggcgacggtgctccggcggtcaacagcgacggcgaaggagtggacgaggacggcgacgcgatggcgatcttcccgagcgacggcaacgtctggaacggcggcggcgcacggctggagcgacggcggcgatggcggcgctagggcacacggcgttagggcgctacggacgacgagaggcgaaggcgagggtggcggcgggtagagaagagctcgggggtccttttaaaggggctcggaggcgacggcgaaggcccacgacgaccggcgacgagaaggaaaggtcgggctcaaagtgacgtggtgagatgaaagaatacttggagaaggtcttggtttggtccctaatcaacttcttcaatcatccatgcattccttatgctcggtctcttttctttcacccaagcaagtaactctgtaaatgaaaacacacaaaacttattgtgtagcaacgtttgtttaaatatataacaagtaaatctagtataaaacatatgcacatttggttgattaatacataaggtagttatggttatatccgagctagtcatgtcctcgtaatatagtttaacaatgatctatatgccatatttctattggaaatattgggaagataactgcatacactatgttcagtaggttgatttcccagattgaatggcataggatcagcatgcttactgacatgccattacactcattcatgagaaaaaaaagttcaaattatttgggccatatatctcttgaaaacaggaaaataaaaataaatctcttcaaaaccatgcacatgaagaggaaggcagcccaaagccttccagtcgactactgcataaaaaaaagtcagaagatatagggatctagaattagttagtaagcaaagaaagaaataaggacccagtattagcaacaaagaaagaaaatctaagcgcagcaatcgctactcgccttgcatttgctgagccgcatccaagcaatcaacgtggccgagctgcgttgccgccgtcacagggactccggaggcaaccacctccaccaccttaacaatagcgaggcgtagtccttgatatgtcggcgttgggatctgccggcggaggatcagcccgatgcaaggcgatgcggaggggggctgtggccgcgtggatcgggggattgaggggatgccgaggtcggggaacggggggagaggccgccactgccggtggtggatgacgcgacgatggcagatgagccgatggaggaggaggagtcgcggcaggactcacggaagaggcaagacaccgtggcggtggaggtagtcgccgtcggtagtggtgggcagggagctcggcggtagagtggatggtggcggcgaggaagcagacgatgacagctgggtttcagtggatttgggaattggaatcggctagggtttgaggaaccagggtatgaagcaatcacaacgcggctttaccgaaatgaccctagtgcgttgacaatagttattgaattatttggacaaaacagtcaattcaaatttaaaatggcttgaccgcaaagtggcccgaccgcgaagattttgcttttgaaaaattttggctcccaccccacaaaaaaattggcgtctacagctacagtatcattcttttttggaaaaaaaatacaaactatatgcaaaaataatttcaagagcaaataaacagtatattccaacataaatatattttaataaaatgaagacatttggtgaaaataagtgagaatgctaccaattttctgaaatggtgtatccaaaacaaattacaagagcaaaagaacattatattcctacataaatattttttaaataaaataaacacgtgttgtgaaaatgttaccaaaaaattcaattgaaaacatatatatgtggtaaagacgaaaaacaaattatattcatatgtaatattatgccaaagttatatgcaattactcccttcggacaattatactcgatgtcgatcggtctgcataggtcaacggtttgttatacaatcattcaaactgaatctaacttgattcctcatcaaatgttttttaagcatgatataaataattttatatttgcataaaaaattttacattagacgaatggtcagccgtcggtaaaataagtcaatgacgtaaaaaataactaccgttgtttcaaatgcaaaaatcagaaacaacaaaattgtagaactcatcgagatctacaactatcgtattggtattttttacgaataagttcatttgaaaaattaaaaatttgaattttcaaaatctgataatttcgaacgaaaattggggttaataaatgatttcaaatagaaaagtcaccaatacaaagttgtagaactcatcgagatgcaaaatttttattttggtcgtgtctccatctgactctatttgaataatttgaaattcaaagtttgagaacttcaaatagaattttttattagtgaacgacttcagctgaaaaagtcatcaacaacaaagttgtataaaattatttgaatgtcaaattatgacaacttcaaacaacattttcaaatactaaatgatttcaactgaaaaagtcatcaacaacgaaattgtataactcatcaagatatacaacttttgttttggtcgttttgctatatgactttgtttcaataatttgaatttgaatttcaaattatgacgacttcaaacaacattttcaaatactaaatgatttcaactgaaatgtcatcaacaacaaagctgtataactcatcaatatctataacttctattttggtcgtttcttcatccgacaaataacattctc

SEQ ID NO: 8962 - DNA, 2652 bp, Oryza sativa
attcctgcagcccccaaacattcgttgtgacaggatgaaaagtttttgcgtgagaactaaacagggtctaagtgcagttttacattgtttgtgtttaacgtttaaccgttcgtcttatttgaaacatttttatgattagtatttttattgctattaaatgataaaacattaatagtaatttatgtgtgactaattttttttaaaaaaaattataatttttttaaataagacagatgatcaaagttgtacacacatatccacgactgcacttattttattataggatggatgtattatattttggaatggacgaaatatttttgcaattacttaccgaagccctttgtaagcaatgtgtactggtacgtcaggtccatgcatatgaactgcacgtcgaacgcctccgggtacgcggccgcggcctcgccggagctcagcgagcaggccttcgacgccgcctccgcgaacgccgccggggtggtcacggcgctcggcgcgtcgtcgacgacgaacccgccgtgcaccgccctgtcgtagaagtaggacgccacgtagaggtcggccatgccggcgccgccgccgccgttccacacgccgttgaagctgcagttccgggactcgcacggcgcgtccaggcccagcgccgccgccgcctcctcgccgcacttgccgtggtccgccccttccggcgacgccgccgcgtcgtactcctcgccgttgtacttgtatgtaccttcgtcgaggtcatcgaccaagaataaatcgtcaaattattttcgtttgcagtttcgttttgaacatttcttaacgggcgaccgtgcaaaaaagaggaaatttaatttgcccctatttgaataaacgttgactaaattagaaaaaaaatgattttgttttgaaattttctggctaaatagtttcatgcggggttctaaaattcctcaattatttatgtcgaaaatccatgaaaatcattccaccagcctatacatatagacgtattcggtattaatgtgacacatttaaatctagaaattaaagtattttttctgggacataccattgaatccgcgaagcatgcaggagctgaattgcccattcttcgtcttaagaatctcgacgcgagaagcttggagcccataatgcaagtaactgttcattcaagattatgtctgatcatcaccattgcctaaagtatataattactacttatttccttgtgttacacaactaactctgaatgatgttcagaaattaatcaagcccgagttagtctgttttaagctttcttttaattaaccacaggtccacagccttttgttgtcaatacagaccaaaattaagttaacaaaaattgcatggagctgaagaagtaagatataatttggtaagaagttgttgtcgattctacctgtgaacataaaggttataatcttttcccttgagatactcctttgtaacataaggatctttgccgacagggactggaggagcgttttctgcagcatctgaagaaatggcataggccatttgaactgaaccacctccgagatcgatcactcctacggtttttgagtaatcccctcctaacttccccaaaagatagttcagagcaacctgcaccatgtaccatatggaatttttattttctgaaatgatatatttatataaagatgtaaattgtcagaaaatttctgctctgaatgacagtatgtcaaacatttcatacccagaggttggatccttcttgagaacccccaaggacactgatccattctggtttgtactggaaattgctcttgctgtggacaagatctcgaacctgtaagtaatattattgaaaacatgtcatttttgtgatcaatatatagtctacaaacggttaagatctttgcaaaagtagagtacatcatctaatgaaaccagattacggtgagaatattatttaccgcttcaagaatttgctctgacttctcatctccaatcagtcttagaccagcagtggcctgaacaccaatttgattacaccaaacataaaatagttcttaagatcatttcaagaataattaattccagtttcagtaagatcagtaagtaccccaagtttgaggggagttcttttctgaagctgcttgggaacaacacctttagccttctctagcagaggagcaatggagtttgcagcttcctgtggtttgccagcatatgagctcaacccgggcttcacctatatttttttttcgaatgtgagcctatatgaagttacaacttttttcatagaatccacaaactatcctcataactgttccatgcacgtatgctttattgctttacacttcaaaaagatgctgcagaaatcttgaagcatgctatacgcacgcttcacactttaaaaaggagaagcgataatcttgaagcatactccaagtatatggaatacaacgtcgcgttttcttgctggcaagagcatttgaaattcaactattttttgtggtcttccaagtgagaatttgactagaattttatagtaaaaatttatttatgaaatctaataagtttaagtgattataaaattatttttcaagaaaaatattactggtggagaaaccatctttggtcggtcgaccagatttcacaatagtcccggggctgcag

SEQ ID NO: 8963 - DNA, 8876 bp, Oryza sativa
aacagctaacttcaccccgatttatatttttgtatgcagtcgtttggcttcaaaggtcatgtccgactgtgaaaataatacccctacgttgggaaaaatgctttttctagtagtgataaccaaaaggtatggaaagaagtacatagactcacccagaatatggggagttcaatatcaaatcaaacaaatgctcactcaaaaggaaagaaacagaactaagcgtgaatccttctcttaaaattccagccatatgcagcataaaacttcagcactcttgattcgaggagcttgtaataagccttcaccatcttgccatcaacttcacaacagtgacaagagccttgcccaatgtgctacgctgaaaattacttgcaaaaacgagttaaaattgtaagcaataaaaaccacattattcccactcagccaaaccgtccaacaaattgcagctatacccacaaaaatcaacttttggattcttggattaaacctatttgaccaactaccaaacataagagctatgctgctgggttgacggatgccaaaggtaaagtagaatgaactccagatgtgcctcacaatgcaacaataaaaaaaaagaggtgtttcataatccattatgaaaaaaactaatacatagtttaatgctagttaatgataagagagagttgcggatttgtttcattgatttatgtctttttattttaataacaaaacaatggcagaagcaggagacgtaaaattcgattatctattttttattttttaatgacaaatttaacatgaaaatgttaaaaatgaccgaattgtcacaatttaagaataaaactgtcttagcactggcctgttcctacgaatgggaaaaaaaatgaatggttcagcagagacagcgggaatgttattcatttgtgtctaacaaaatgagttacacaaattgttgccatatcctaccctgatcattggacaatttcgactgacagacataaatttctgacggcgccgctctgctgacagatattatttgcccaagcaaatcttgctcggccgaagagaagatcacaccagtcgctactgacatatcgccatctaatcaagccaatctttttaaagcaacgcaaaatggggcaaatctgccatggataacaccgcaatatcttccagaacttccatcattgggccattggaccagcagacctggaacaatcgatggttagcacttcgcaattagcagattggttagtcatcagtgtgggaaggttggggtgttgtgtgtttgtgtgtgcagcgtgcatggttgttcagatccgagtcacctaatggggatttcttttgctgttgccttcggttgggcttgcttgctcagcttaatggggagctcggagctaccatttggaatggacaatttagctgcatgctctggcctttgcaattgtttgctttgggttcatggcaaaggatcaaacaataagatttgagaaattgagaaccttattaactatttgactgcctcaatttatttgagtttgggaaacagtttacttgaacaaaatggtagtctttgtttttttttaaaaaaaaacattttcagatggtcgtttcgcccttgctgattaggaatattcattttcaaaccaacgaaaccggttttattgaaatgaagaaaaagacagtttggtgatttatgaattgattgaaaccaggaaaaaccacatcgacatatgtatggacaaatgtcacagatcaaagtttatagtcactttcagttgatgaaaaccacactttcaaattgaaatcaatcactttctatccagcatatattgcactatcagcttgacaaatatcacattcacctaacaaactatgcatgttcatattcaacatgatcaatttgctcatgtctcctagcaaatcatgcattcatttaattcaaaatggaacactttaaaccgacagaggatcgtaatcacctctaattaatggtgtatccccactcgtagttgcattactgaagaaaaggtttatcagatgtataagcagaaacgactggagtagattggaaagttacatattgaaatgctcaatttttgctacactgatgactggttagtcatccctggttttgtcaaatctggtttaccttacttttattcgtaatttcacgaaagatcactagaataaattcatgtcaataagcaaacatataattctgtatactttcttcgtgggattagagaaaaatgcataacaccaaaaatggttaggttataatgatctcatttgtccagacagctttaagaaatttaatttttggcaagccaatattttccaatctatgttgcaaacaataagactaccgtattccaaaatttagaacaaatgagatagacagcaaaaagtccatattgtccccctctccgccccccgccccccaaaaaaaactatttatggcagtacaaattacccccctcgattcgaaagctataaattcttcttcatcaacttttcatactaaacgaattacccctcctgccgactctgaaaaggttttcgtcatgcgtggcacacacgtgacactccagtcatcataaaaaaaataaaatatagtgagggcccacttatcagttttgcctcttctctcggtcaccacatgtggaccctactcttttttatattttcttatgctgactggactataacatgtgcgcgatgtaggaccaaaactgcttcaaagactatcacaggataattcgtccggtataaaaagttggtgaaaatgtctggttttgaattttagagggggtgggggaaccacaatagtttagggggtaattcggacttttcccaagatacatatttttagcgaacattaatttaaataataaatgttaataatcaatttaatcttatataatggagccaaataagcccataattttttgaaaatgaagtatacataaatttataattcaaattttctcaggaaaatggcaaatgcggatacaatgtttttatcacggcttgaaaatgtaccggaagcatatcaaatgtcatggttttcggcctatgccggttcaaaatgttagaattatgttaaaataaaaaaaataggactctgcaaaaattagactaaattggataaatcttttttttctatttgctgttttcggtgattcggtcgtttcggccggatcccattacaaacccattcgaatttgccatcccttcctttcagtagaccatcaccacccctacaatataccctataaccagaaaaaagcctccctctaatttcctatttgagaaagatccctcctcttccctccataaaaaaaaaattcaaaaagtttgaaagggtcacaaacccatagaatacacacaaaattacacagcatctgcctttatttttctttttctccacttgtccctcccccctatatttcttctaccctgtctgtctgcctattccccccttccctctctctctatagacagacatccccgcaccgagaagagaggcgcgcgccccactttgttccgcgccgcgacgcgcacttcccgcctttgccgtcctcgcgccggcacgcgcgcgcgcacgaacgcacgaacgctcgcgtcgcgtcgcggagctcgaggcgtgttcccgcggcaatggcgcacgacgggttcctcggtggtggtggcggaagcttccacgcgatggcggcgtggccgctgccgttcgacgccgcggccgcgctgcacgggggagggtgggacagcgacccggcgctcggcgagctcgtgccatcgccggtgggggtgggggtcgggggcggggtgcacaaggccgcgctgatggacgagctggcgagcaggctcggcggcgtgtgcggcggcgggctcgggggcggcggggtgccgtcgccgccgtcgtcgtcgcggtacgcgtcgtgctacagcacgccggtgggctcgccgtgcaagcccgcgccggcgccgcctgtgccttccctgctcgccgcggcggacgccatgatcgccgagcgcgccgcgcggatgtcgtgcctggcggctgccggacacggcggcgggaagctctcacgcgcggcgagcagccagtccctcctcgcggagacggcggcggccggtggcgtccaccagctaccggcgagcgacgggtcgagcagcgacgctccttgtcggaagcggaaggcgccgtgcgccaaggctagaggcaaggacgcagcgacgaccattgccaaggtacttcgtctgctctctgctccgcctctgcaatcgcgacgccgaaccagccctgaaacaatggtgaattttccacagtcgccggagccggggacgaaggcgaagaaatgcaagctgtccgcggacgccgccggagacgaggacacgaagccggtcgccggcgacgcgggacacggcggcaatggcaagggaaaggtcctcgacgccgccggcgagccacccaaggactacatccacgtgcgcgctcgccgcggccaggccaccgacagccacagcctcgccgagcgggtaaaagccgccggcatcgatgccgccaatcataatttctttttctcttcaattctcgcgtttgctgacgccattgccgccgtttttcacctccaggtgaggagagaaaagatcagcgagcgcatgaagctgcttcaagacctcgttcctggctgcaacaaggtggcaaaattcagccaaaaaataaatttaaatttcacgctggtaaaacatttttcacagaggaattattaatttttcgagtttgtgaaattcaggtgacaggcaaggcagtgatgcttgacgagatcataaactacgtccagtcgttgcaacggcaagtggaggtgcgttgtcatgatcatcaccgacttaatttacaataatttctgattaattcctttcaaatttgttaatttgagcaagattgtttactgtcccaacagttcctatcaatgaagctttccaccgtcaacccgcagctggatttcgacgtcgacaacttcatcccaaaagatgtaacaatccaacctgaattcgctctgtcatttagttagttgaccttagaccaccatataattctgaaattttacttacaagtctctgaattttcagcaggctagtgatcccatcatgcccgcgccgttgtcgctgccaccgccaccgccaccgctatcctactcaccggagggcgcaagcccggggatctgctacgcgtcgtcgcaagggacagcaatgcagagcgtggtgacaagcaccaaacacttagaaacggcgccaacatttgcaaaccaccatgtcatcccagttccctcacttgatgggtttcacagtgctcattctcaggtaaaattgtactacaactcaagccacagaaatgatcatacagtgaaatcgccgtcatttttctccgacccactgatcgtaaaacgcaagaattgttgtggctgaatttttttcaggcagggagctgcatgtgggaggatgacctgcagagcgtggttcagatggggttcaggggcaatacatgatagattagatagatagataaacagatgagagcccccaatcatggccatggtctctgaattgattcggggacaaatcagtttcaccaatcaaagccaggagacggtcacccggggaggcatgtcgggtgcttggaacacttaacacgagggggttgggtttgagctacctccaacccaatcattggatcatccctccatgattgtacatacaacccccccaccttcaatgtgggggaagaaaatggaagaaggagaagggataaaatgccctacttgcccattgcctcagctcaaagatttgtaccacggcgaggccgaggcggaggcggaggcgaaggcaaaggcgaagacgaaaaaagaaaaagatttagttttcttcatttgctcttaggaattttcatccatctcacaaaggatgcaatatgtaatgttgcagtggaatgtaattgtttctagacttcaacttgggatttgaatataattatgagagaagtttcttgcatttggttgctactgtaggctttgtgccggtaggtggaattgttttgttctctgcgttatcatcgccattatcatcatcacggagtcttttaagccgtgtgagctggagtcaacaactctaggcagaatcttaacctcttttagtgtcttgcttgtttgtatgattgcattcttaatctcatctagtgagccctagacaactaatctttaggatagaattgttgtgtgtgccctttattctgcaaagcaccaaaactgctggcacggcagaaaggtcctttgggcgcatgatttgagccgaactgacatgatttgcgggagtttcatattggcaaatgtcttgggctcctgtcttgtcagcaaaattctttcttaggtttggtctacctaaaaaaaaaccttacaatatagaacaacaaaagaaaatcacatttttgtccaataatttaatgtacatgtgtattgcctctttcagtcaaccaatcaggctgatagaaatgtaatttacaattgtttttatcctttttataaaagataccgtttattattggccttttattccacggactattttctaatgctctaacattggtcaggttcagttaaccaaaggaactgaaaaaaaaaatactaaaccccatataaaaataaggtttgctgtcctgtagacacctctttaaccagacaaggaagagaagagaaaccccaaaaacaaaagggaaggtaggtattgggttacagagtggacaagattccatccagcatagaagcatctgttgcagagtactactgcctcttcttctacctctcctttagtcatatacaaaacctgtgataaacttttggcatctactatggtccttcctggcctcccaccagaaaataaacttaattctggtactttgcacagccaggtgtatatatatacaaaaataaaacaatatcagaggcttttttactttgtctcaaagtggccactctaccgctagatggcatggcaggtatctagtcattgtcaatactgttccattgggaggacaacttacaagattgcaccctccctagtgatggagacacaagtgctacccaattatcatgacgcctacaagggtccattttgatcaaggaaaaaacactgcaatgaaaggccatgcctaaacacacatttagacctcttaattgacaaggtttctcctgtggaagcacattcggtgcggtgatagagttaacccattcgtgacactctcgtgcatttatgcacacgctagtttgctttaatatttatttttgtgaggtccacaaacatatcattggcttttcagttgttgattgtgtgttgaggaagtcggtgtgtgcatgtatatgccctatgtgcatgtatcaaaaattgatggaccacatttctctccaagattcacaatagtcgaaccatgaaaacactttgaaagggcttgataaattcgggggaggatgtagaacaaaatggagaggtactagtcgcttgctttactaagttttggaccaaatttatattgatctgggtgtccaagtttcaattgagtggtgcacatatgaactaagctaacaatatttttgaccgggttcataggaaccctctcaattttgtagctccactctcaattattatgtatttctttgttactaaaaaaaatggataagtaccttgcaaataaaaatgtacatctttggtgctgaatggatttttcacttattggtttggaggatacatgaaagctagttttcatggtgatgccattttaatcaagtagatggatcccaatccctttatggggcatcattgtcacattcacgcagtgggcactcctgggaccgagacatgcgcaacaaactctaatagaggcacaattggagcttttcgtgatgtaagttggatcttatgatggtggctcagaccagatatggaatcatctgaaatgactttgacccacggagactaatatcaccatccattcatcaaattttgatatctgaattcatgtttgttgggaatagtcccacattgaaagtttagaggagtggcaccaacttaaaaggggaggggtccctcacctcatgagctagcttttggggtgtagaaaggctttctcccggttgggccaacgtctcccggtttttggccaacaagtggtatcagagctgggcccacaatctctctaagtgccgtgcacactcgtgtggtgtaagcccgaagcccagtggaccgcgggtgtgaggcccgtatgtgcctatgtgttgggccggttagtggaccgcgggtgtgaggcctgtatgtgctcgtgtgtgtagcccggttagggctaaggggcactaatgtgtgacgggggagattgttgggaatagtcccacattgaaagtttagggggagtggcaccaacttaaaaggggaggggtccctcacctcatgagctagcttttgtataaattccataggagtattaattactcgacatgccattgtcaggaatttttccagaattctaacagcagattattcgttgattctgaatcggacagacaaaatgtaaagaagttgtattccctgacaatggtaaagcaacacttctattcaagcaaccgaagagggtcatccgaatattattatgattgaagaaaaaagcaaatgttacaagaaagttttacatacaaaacaacactttttctctcgcaagtttgaactgaattgctgcagcaactctgcgtgtcgcgactcagcgtatgcattgcttgattccaaatgatccattcaatgccatgttcatgtcagcatagtgtacagatgctgttaggtcggccata

SEQ ID NO: 8964 - DNA, 2319 bp, Oryza sativa
cggcgtattagcgttgtacagtgccacgtggtggtttgggagtatttttaggaagtttatttaacttttagtatataatagatagatagatagatagatagatagatagatagatagatagatagatagatagaagatttaacatgggctagaaccttatggaaatttttctttgagtatttatctttacttaaattcttgtatttttttctgcggttcaattaaacgatattttgtatttttcctatattttgcaatcatttattttatatttatattcatatcagaatcttatgttttgcttattcgtctattttttttatttctacgattcaataggccctgattattctaattagtctgctgaaactagttctctgacgaacacattttcgccgggccatttcaaaataatggaaaaataattctaattagaagctctgaataaccaatttatattgaggaaaaccatagccgcaggcatcagttttcatgtcttctttgtaaatcagttgtttcctaattgtaaattaattagtgggttgttttagtcatgtattccatcatattatggaccacacgtgggaaaaaagagaaagaagaaaccaagtttgtattcttcactgctaacttacattatcatgtattgaccaatgaccatctgcactctatcaaccctgaatttttatattcaccgtaggtgtggaattaatggacgcttgtgattgacgaacggtaaactttggcactgtttattataggggtggaaagttttggtgtgtcacatcgcatatacatgaatacacaattaaagtattaaacgtagtctaataacaaaataaattgcagattttatctgtaaactgcgagacgaatttattatgtctaattaatctgtcattagcaaatgattactgtaacaccacattgtcaaatcatgacgcaattaaacttaaaatatttgtctcgcaatttacacacaatttgtgtaattagtttttttctatatttaatacttcatgcatgtgttaaatatttgatgtgatagggtaaaaagtttctgcgttgatactaaacagggcctttgttgttatgcccaaaggcaggggatgtgaaccccagacaaaagagcactacatttagaatagttcgttcataactttatattgatagtgcggcatgatgcaaaatagcgtattactcctatctatcagtgcatctttacataatatattgtcagtgcatgaaaataaaaaaaagtaatgcttttaaaatgtaaacaacaagagacataattattactccttccatttcatattgtaaacaacttatttaagtttaatcaaatttatagaataatatagtgttaattaccttggacaggtaaatatcccttttcacacagccgagggtacgccaggtacaccctgaacctcgccgcgctgctggtcatcagcgccagcgccggcacgccgagctccctcgccgcggcgagcggcgcgaaccagtcgacgtcggcgaccacgcacgcgacgccgccgccgtcctcctcctcctcctcctgccggagcgcgccggcgaggaggtcacggaacggcgccgcgcagttcctgttcagcgcgaacacgaacgacgggatgtcgccggacgcggccagctccggcgggaggccgtccggcacggtcaccagctcgcacccggcggggaggctccggcggtcgggcgcgcgcgtctccgtgtggacgacggtgacggcgaggccgcggtcgtgcagcgcggcggcgaggcggagcatggggttgatgtggccgtggtatggcagcgggagcagcagcacgcggcggcggccttcgtggccattccggtcgcttgcaggcgccatggcatcgagatgtgtgtgactgagacgcatgagtccatttatgacacaaatgcgtgcgtactttcatagggttttttttttcttttcttttcctttttcttgtggaaagcgtatttaatttgatagtttgtgggtgatgagtccgcacggcaacattttggcagtgtccagcattcctgttcccggggccaccacatccacatggccattctgtaaagacaaaaaaagaggaaagattcttttttcttacaattttcgagattttatttgaacgagacgacataagacagcggccatgtcatacgcatgagggtgactattggaacgattttggaatatagtgcaaatttttaatgctaagatccacacaatcttgataagaatgtgagatttaggggctgtttggttgctaccctgagagaaattgcctgacctaa

SEQ ID NO: 8965 - DNA, 8359 bp, Oryza sativa
cagaagagagctcccccggatactagctgatgctgagcggcatagtggtgtgcactgctggtggcagtttaagttttctttgtttctcgatgcaaatggcacatgcacttcaccacgtcttctgcatttcatgactgtttctaaccggaagaaattttataagtgccatgtcttgactgacgatcatagtgactgaatttgctaaccaactgagaaaattcagaagagggcagtacaactctacgagtacactagtacactgctgcttaggtcaaagtaagacgtgattcaactgagaaattcgatttggctcggccaactggttgcaaaactcaggtctcatatgttggttcagatgcaaactgatgggttgtctgggatcagattctcaggatcctcgtttttatttttccacaagtactagcgtgtacgattaacctatcatcctgaattactgatgagcactagtagaaaacctactggcattgtagccagggccggtcctatgattttgagggtcctaggcgaattcatcacgatgggtcctctaagctatataaaaaattttatgatatatatagacactaattaattttacttgcaaaacaaatacatccatatattaaatcttaacatgtctggtaattatcgaaaaataaagttgatcaaatttgtaccttggaactaatatcactaccttaatgaagaatagaatcgcatcatatccattatttctcatgaaaagatacttctcgagcatttcttgatgcaaaatcatcaagaacaagtcgacgatgttgtgcgcttgtgcggttgtgccctgtgcgatgcgatgtcgtctgccgagttgccgacgacgctacaactcctatcgtctctcggacgtttctgcttccagatagacaataggcaggtactagactactagtattaggtgttggcccctccaccatcataggcccccgaccatcatgggcccccggcggtcgcctcggctgcatagccctagggccggccctgatcgtagcaaggtacactcacgaacaacagtagaggagagcaaaaaggccacgcgttttttttaagaaaaatgatgacactgaaacgcacgtatgactcgctcaccgggcttggaaaatttggagtgagcacaacaggcgtggcggacctctcagtagacctctcgcgaatacttgctacagtaaagttttccacttccctactcctctctctttcctccggcctaaggtggcttctcgccgatgaagaccgggaaaggggtcaagtccctcttctcctattgattcaggtttttcccgtggtctttttccttttggttctcgaggtggttgttggcgttggccgtccttgtcccggcatctgggtgagcgttgtcgggcttcttctcagaggcgatttactccatcgctgggactcttctcctgggtactacctagggcgcctccagatatgtacaaagagaggtatcgcctgcctacataaacatctccggcaaggtctttctaaggaaggggccttatgcttgatccctggcgacgaattttcacttggtggctaaaattttcaggttgcgccaagggggcctcaaccgggtacgcctcctgcctttttcacggtgaaatacatctggctgtgatctttggaatagttatggttttttaccgatttctctcaagaacaatggtgtaaatcttaattggtgttgctaatatttcattttgctcgtcaacgtcgtaacctccacgtgtgggaggcctcttcagggatcgagtaatggcgccacctcatgcaactcacctgatttcacactccaccggaagtgagctccaaatattttccatcggtgacgaagaccaaagaagaaggatttgattgttttttcaattctttttaagttttttttttgcaaattgttgggcaaaagtgtaatttgcccattcacaaggggcttcttttcaaaactggaagtgtcccagtagcactgtaacaactcatgtattttatgtttctaatctactttatataaataaatgcatgagttttaaaaaggaaaaaaatgactcgctcgccaggccttgttgcgatcatgctccatcttttcttttgctttcatgttcgtgatggccgttactcctattttctcagtggaattgtatttaggactggtgcagtagcatacacttatgttgagtctggacccacgtatcagccactgatcaatagcctacatcctattttatatggacattattgggagggtgggagtgggtggctgtgggtatggagggaagaatctctctcgcacagcgccacccaagttgaaagcttgggacaggtgcagccgcatgggtcgcgctctccgccactacgaaggagaggagtgatcaacctcagctacaccgttcaggtgctgcaaaaagcggcgtaacgtccctgcttcttgtactggctacgctgcaataattctgtactataaccacttgtcttagatctgataagatcgcgaggcctttatcactttgatctctggtcgtcatctgtcagcgacttttttctctctctctctcttttcatcttcttttctctcggaaagaccaggcttgatcaattcatgtgcatgtcttctttgcaggatagcggtccaggacattctgatattttagtgaacagaagaaagggccagttgcaaattttcccacacttaatgtattttgattttgcggggaaaaggtattttaagaaggcttttcatcactagttcactacaggaaaccagcagaaacatatcagacagtgaacggcacgaactagtagtagactataatatcttgtgcataagctcggcacatgattagtctttattttagtaacatgattgaggagccctctagctgtctggcatgcaaaagaactccagaaatgatggagatctgaaggaatctttcgtgctgtttttaaaatccatcaacttctgtacaaagcagaaataataaacctttttttccccctcacactttctgattgtcgacaaatttttgtcaggcagatggctgcctggccacttgtctgctctttcctgtggatcacagagtaaccgatccatgtgaaactcttcagtcctaaaatgtcgtttggtctcttgctgatggaaagtttataagctgcatctggtcgaatagctcgatgttagctgcattgatgtctcttttgttattctctttgggaagcatatgagcaacttcatacagatacgttggtattatctgttcagatcttcctcaaaatgtactactactactactatttagacgtctgcacatatgctgaagacaatagttaattctaagcattgctggtatcggcagttttcagcaaggaacacgaattagtcgctatctcaatacacaatttcccttcctcaatcccaaccccaagctgaaagcctgaaactcctggatagaactaagcaaacactgaaaagcaaacctttaaatggtccatcgcatatttcagatgtgagactagtgagcactagacttttgcgatgttttggcttcagtttggtctagcttctagcaattgcaatttcttccagaatcagaatctctcacaaacagtttagcttttaatctagattatgaaaaactgtagttatagaattcagaaaatgaattacttaaaagttagaaggtgagaaacctaaccttttcaaattctcagaaactaactaccgactagttatttctcataattttaaccttcacaaacagacccctagtacccataggccatatcgcgtgcatcaggagaagcaatgccaatgcagtgattgttaggttcgcgtcgtcgtcgtgcgtgcatgcgtgctcgcgtaaccgcgggacagatacatcgcccaaatcaagccttgtgtcttttcgccatgaccggcaaaccgacgacaaaacatgtgacgatctgtaaatatgtgtgcattgtctaacaactagtcgatcgatggtggatggttggatgccgcaacaataaccaccctaaaaagtctaggcgtcaacaaataagcgtgcctcctttctgcccggcctctcttttatttcctcatctgagaagtactgcgatgaagaacacgacgcgttactttctttttgtggctacaaaatccttagatgattggttttaaaaaatgttgtacgattgcacttttcgaaggagctagaagtacccgttgaaaatctagctggtgagactaggaaaatatgattttgatttcgagtttatttttcacattgtataactataaccttttaaaatctgaaaaaaaatctatttggaagagcttttagttataggagaacccaaacatgcctatatctgtttttcttccaaaaatctactagactttgtgaagtctgcccatccttggaaagatatctagaggtatcatattttctagtataaaattttggtacctctaggtactacgtatcttaaggtatcaaaaatttttagtataaaatttagttacctaaaaatacattttcaggactgtaaaattccactttacggaaagacattttggcccatctattattaaattactaggaaaaggagcctccacgtgcgctctcacgggctagaaattctcatattaatcggataaaaaaacagagtccatatataaatacaattttaaaatagctgaaattcgaaattaaaaaataaggaatattaaaacatgatactagagtccattccggtatacaatttagaaccaatgaaaattccgtattattttttaaaaaaagataaaagtagatgttagagttcatatagaaatacaatttagaaataactaaaattcggaattaagaaagggaatattgaaagaagagtatagagttaatatagaaatacaatttagaaatcactgaaattcggaatgaaaaaataaagaatattagaagaagagtatagagtccatctaggattacaattaagaaataaccgaaattcggaataaaagaaagaaatactagaagaagagtatagagtccatacagtaatttataattaactaaaatttagaataaaaataataaaattaaaagtagagtttagagtccatatagaaatacaattaaaaataataaaaattcaaaataaaaaaataaatattagaagaaaagcctagaggggtctagagtccacataggagtattatttagaaataactgaaattctgatttctaaaataagaaatatatgaataaattttatatgtaacaaaaaatcagaattaaaaaaatgagtattggaagatgagactaaagtcaatacaatttagaaagaactaaattcaatattaaaaataattaataactatcacgtacatacaatacaatatgaatattacatattgatagtttggtaaaattagtacaaaaatttaaattatgttatcattttaatatattgtaataataaaagaagaaaaaaatactattatagaagagaaaatatagggatgctagctaagttcaatatgaagcgtgcagagtggactagtggaaactgataaggcaaattgcgggcaataatttcaccatagtcatggcctccctttcgtcctccgtcagccaagacttcactaagttcagtagaactgtagatgagcaggaatcttgtagcctagctccttgtcaagttatccggagcggtaaattattggttaactagcactttagaagtggacaagttcggtccatctgtctcttttcgaataacttatcgcatgcaacaacaaaatgaccttcaactaaaaaaacaaacaaatgaaccgtcgccggatgtctcatcgattgacgtctcaagagtgttcttgtagaagatgctttgctctatggaaagtccgcttctgaagagaactcagctactacaagggaactcgccgtcgccggccgagtttgatttctgttggggatttggccctggtgctgggacttgggaggctggggccgtcgaattgggtcgcgtagcgtgaaggtgtgcgggccttgagccctgttgcttctccatcactgcccattgtacttgttactgggccattgtttgagtggatcagttttttggtccaaactcgagccccacagaaaaaaaaatcttcaacatttactctgactaaggacattcgtaaaatatctgcaacactcagtgtcgaagtcgactacctgtcaaactcaaatcagaaaaaaaaagatcacctatgattaaaacaaaaatcacttgagagcacgaacaaattgtgagagcacagccgcctcaaaacatgcatcattccattccaatgaaacacttcaagttgatgaagcagtacaccttccaatcccttaaccaattaaaccatgcaatgatcgatgcaacaatgcagataagtttcaaaaagcacgacgggttcgtccactcatgaagatatcaacttccactccactccactccactctacgctcactcactctcaccttcacgctcagcggcctccagaatggacgccgaaaaagtcgtagaacggaggcgcctcgctgctggggctgtccgagctctccgactcccacgagaacgacgcggacgcggacggcgtcgtcggggacacggcggcgcaggcgctcccggcgcggagcggcttgtgatccggcagcacgaaggtgggctgcagggggaacagctggagggtctcgcgcccaccggcgccgccgccgcggcggccatggccttccgcttccgccgcgccgcggccagccgccgccgcgaggtgtgcgctgctcggcggtgcctgcaggtacatggtggtggtggccggtggctgcgccgtggacttgtcgtgcggacacacttccatccctgggtacagcaacggcgtctgctgctgcgggtagtagctggcgttatttgtcgcgaccggcatgcaagcttggcgtcctgaacatcactgcaaggatcgaaagtgtgcatggatcagtgcagaacatggagtggagaattggcatttaagaattgaaatgcaaacacaaactgtagtaaaaatagaatctaataaacgcgcgcattatgatcaaatggatggtcatgctaagaacaacagatcaaacatgccaatgtcaacaacgatactcgaagctggattggatgacacgtgcaccgaccactcatgggacacattttcatgtcccaacattatgagatggaagggcagcatttcttggatgggaaaggaagcagctaaaggatgatgtggaaggttgtgtctggccgttttggccctagctaggaggatggtcatttccttctaccctcggtcatgcacagcatgacagcagcacagtgcacagaagattaatggagctacaaaagggtagcagcagaagctacataggcaggcaggcaacgttaaatcgtgtgaccatgaataggcagtctctctgttccactggcactgtatataggggggcagaggagaaaagacaggtgatacgaaacaatggaagaaatggaagaaaaaacggacggatttacagtaggagacatgaacaaggcatgcacatcgtgacagaatagtgatagctagctaagcaagcgtaatgcgattgcatgcaacgcaacgcgtgcatgcagaggataagtacaaatagacaactagcggcagtactactaccgtgttatacatcatgccgttgtgcaacaaagcggtcaaggtcaactgtgaagaatggatgttctacgccaagtatacttgtcatgccagccatgcatgtacaaaacgatttcgtatagatttattggcccatgcatgaaaaatgcaagaactgaaacgacagcacgagaactttgacctccatacgcatgaataccacgaaaaatgaatggatgccaggtgcatgacacccatgtgtaaagctaattaagcaagacatgccaaagagaagatttaatacgtgacatttaaagcacgagaaaaggtttggcttaccaccaccggcgttgcatgcggccgtcgtcgtcgtcgccggcggcggcggcggcggtggcatcgccgtcggcgccatggcgagagggaagggccgcgcgagtggcctgtggagcacgggcagcggcggcgggcggcggaacagcttgctgaagtagtcgaagctctgctgcttctgcttctgccgctgccgggccttgtggttctggaaccagtagaacacgttcttgccctcaatgtggccgtgctcccggagcctcgccgtgatctgctgtatctgctcggcggtcggcgtgcgcagcccctgccggtacagcccct

SEQ ID NO: 8966 - DNA, 7940 bp, Oryza sativa
tccgcctccgccctctgccagcaagttctctttcacccatgtattttgtcttgtgttgttcatattgttccaattgttgctactgtgattgatgattctgagtcctatggtgattgagattcttgtgattttgttttgtgattgggacaactgcgatgaaacaaagaagaattgtgacaatttttttgatttgtgaatgccaaatgcaatcggtctaaatgaatgtgatggtaacctatgaggacggtgtttctctttttttttccctttttttcacaccagtgacggccccaattagttaggccatttgaggtgactctcacctgtgacgggttttggttgggaccagtcagaggtaactctcacctgtgacgggttttagttgggggccgtttgaggtggctcttacttctgacgggtcttcactcgtcacaggtgactcaagtcatcagtgaccactaatctctgacagggagctgaacccgtcaaagttgagggtttgagcccgtcagtgctgacctgatccagtgtagtgcgtggccatggccaacttggccatagatggtttaggcataggtaaggtggtggaaggagcatggtgcgttgccggccggaggagggcccatcacggctgcgggcttgcgctgtggccagggtggccgaccgcccgtccgtccgtcgcaaccttcccgaggcggaggacgacgagcactgccgctgcctctgcccccgccctgcctgcgctgtagccgagcgagcgcggcagccagtcccccctctcccccggtccaccaccgcgcgcgcaggccggccgggcagtctcagtctgatcctctgccctgcccggcctctcgctcgctcgctcactcggcgctcgctgctacagtttaaagctgacggccgcggctgcgtgctgacccacccacgtacaccagccacacacggggccgatcgctcgctcgctcggatgggctatggactgcagccgctgccccctcgctgcgacgcccacttgatcccctcaccgcgcgcagccgcggaaacgtgccgtgtttatccgcgggcgggggtagggtggtgtgactgtggaccaacatgagaaaccctggtgatgcgcgaggacggcgcatgccggcatccgtgcgagagtttgggggaaatctctgcgcggtggagcgcaaagcgcaacatcggatggaacgcaattcgtacggcgttggttgtgtgatctgtgaacctttgtgatttgtgaacctggcggaggtagcgaagctttaagccatttggagcaaaagttttcgggggactcgagcttttgacctcacgcacgggacggcaccgcatcggggccgctcgggccggcaactgcaaggctgccggatgcgtcgaccgtgcgtatgtatgtatgaacgtgtatgcgtgtgggggtgcgagcagcggcgcaggcttgtgtccggagtttgaacggtcgtctccaacaagagcactgctacggtgctctctacttgtagtattctattacaagtagaagcaatctgagccattaatttataagggcaaattagtattttactaatttatggttaagggtaatttttaacttttacttttttttcttaatagtaggatcagttcgtctgtgtcaccgctcctttcgttctcgcgtgcgcccgactccggcggcagtgcccactccggcatgtgcgagctcctccgttgaacagataatactacaaagaactactgaacaaagctatatagtcaaatcgaggagcaagagcaaatgtgctgttataaactcaccatgattatctttaaaacctatttattagtttctccacatgttgtgttttcagttcttaaagaattaagccattaacatcgctaaatttgtccaaggatggtaccgaagtatttaagttcagagtggtcatttgctcagttcagagcgatgctcaaaacaccgtaatattgattggcttcgatggcgttgaaatcgttgaattgatctgacttcttgtcgtggttcagggcttcaggctcgctagttatatgtctccttcttgggcctggcgtggaacgcatactgatctctagcatttgagccgctgggcaaggagtagcctcccgaggctgatcccccgccgtaatcccgcaacgatctcatggaagcacgccgccgatctgctcatcgcatctgctccgccacactcaccctaaacctagcacggcccaacgatgctcaagtgtttctaattgatatgcaaaattacgaattcaaccatccccgtccatattttttggacgattataccctctgacgtttctactattgctatttaagataggagtataaataaatctaacccattagatataaaacgatcaacggtttagattaatttatactccgagtggaaagcactggagtgggactcctccaacaatggaagtacgtagcagtaggagtagtttagatttcctgtggtactagttgcatctattgttgtggcttcgctggtcaaatttgctgttctacacttcataacagtagtttacgtaggagtactttactcgctctctctatatagtgcaacgaccgtcaagatatctatagttcgtagtagtactgggtttgccattcgtcaaacgatttgccttctcaaaaatggcagaaggcgaggaaaattagccccctcacacacctgacaaacccttgttgctgcaccagagcaaagaacaaaataaaacgcagagctttcatttcacggcagaggccagaagagcaacagatagtcgtaggaaattaaaaaatggggcgtcagccttgttccaacagcgaaaaccctgcataaacataggaaaacaccaagtgggtccttttttgggacgtcatggccctacgtgcacacatccagctccattatatagccatttttatgcctcttccacaggagcttctgacctcggtcactctcactctcatcagcttagctacactctctcacacagtctcactccccgtgattctgcccctctgctttagctatcttctccttcccatcgtctcggcgactgactgggtaacccttcttcacccctcgccacagtgcccatggagctctacgccgtggtgaagccgtgcaggctgtacaagaagaggagcagcagcggcggcggcggcaaggtggcgatgtgcgtgcgcagcggcggcgacggcggcgccggcaagagcaggccgtccttcacctgccggtgcgtgcggctcgtcaaggagcagcgcgcgaggttctacatcatgcgccgctgcgtcacgatgctcgtctgctggcacgagtaccaatgagagggtactcgatcgatcgatcgattcatggagggggcgagcaaatgcgatgaagctctctctctaggacttaaggaactttgtgtaaagagaatagtatcttttttccatttcttttcctcattttcctttccttttttttttcctctctgaggagtagagcgaatgagtggtgcagtaggccggccagtagcccagcatgcgtggtcgctgcactgcgcatttttatttctaattttttgatgtcatgtgagcgcatgagcatctaaatatagacggacgtactcgatcaaaatgggtgggtagttcttggattctgctggtgcagtggcgcttactctattccttctacttccgcttccggtgtttgactccctcgacgtgcgcgcgtgcgtgttggttcatcggagtgcgaagagatactcctctgaatctagatttggacggctcgccacctgccattttcctcaccctggcagaggattccattgcgtttcttgttctcctaccccaaaaaaaaaacacaccaagaaagctaccactaaaaccaccgtcactttccggtaaatccgttctcggcatcatgcaagttgcaactagtaaagcacaatccttgacagtttacgctggtgatttttaccatcgcgtagaggcagtaactcgcggtaaatctcgctgcatgcgactgaagggaggggggccaaattccgaaaggtaaaagaggggagccgttaccactagtagcattctgatgagccccctgacccggaatgaagctgtggagtgtggacactcccgaggaggagaggccccaagtgtgctgacgcatcgaattatttactcccaaaacgacgcctccgtatctgagcgcccctgtgagctgcgcgccatcaccagtaatcaaaaccctctctctctctctctctcacacacacacgcaaacacacagcttggaccttggaccaaatgggctcgcagtgtacttggctactttggtgaagtctcgcatgctccgatgctcctggcttggctacgagtatctaggagactaggactaccaacgggtggttcaacgatcgagtactctacctacttcacgggcatgcatccgcccagatttcggcctcactactatagtaggagtgtagtgtcgatcctgtttgagacagtcatgaggttatggctcatcctcatcatcatcatcatcacgaagagcggcagaagcttttttttttccttaggcagaagacagaggcagaggtcgtcagtcagtgtagattaggtatacttcgtactgaccaccagcttcgtgcgcatgcatgaatggcgaagtggtggtgtaactgacgatcgatttcgggaggtcgtcttctcttttactgttcccgggaagcacgttttctttcctacgtaggacgcggtaggagaggtgagtgagagtaggtagctgctgcaatggcgcatgcattgcagcagcgatatatgcgtgcgtacccagcatcttcggctgaagatgccagggacccatgcgtgctgcgatgctacgaacgttgcagaatcagcatgatcagtggccagtagcaagtttttttttctttttttctttctttcttttatttttggcgagcagtgtccagcgtgcagtagtaaagtggtcctatgatcctactgagatgagtgatgagtactcactacctaggtcctttgctctttgcaggtaaccggcgagtaagctaggagaggatgcacagccgcaggacccccccaccatccatgcacagtggccttcacaagctcgcagagctcagctccggctgcctgcactgcactggctgcaacatacggtttctgctcctgtcccccctctcccctccctctcttccaggacggctgctgcattcatgcccctatccagtatccggccttttgtgcttggatacttgcatgatcgatgaagcgtgtgtcacggagaggtagcaagggcagatcctttagagcaagtctaatagtatagcccactactagctataattcatctataaccgatttaatagccaattcatacaatagttgcttactacactattaatatatggtctcacctgtcatacacacagtatgtcttggagtccgtgctgcagctggctacaaatctgtagcccgctgctcttctctctcatcgtttatctcattaaaatatatttatagctggctaatagtctgctattgtacctgctcttatgtgtgtggttgcaatgattccgaccacagtgtgggtgactgttcctcttgatatcttgcatctggtaacagtggtgacaagtggacgctgatcagctacatgcatagttcagggctaatggtcctatgtagtagtatatttgtaaggcacgcagatgagaatagtaacaaaaagcataagaattgatgctagatagatttcattcggtgtttcagcgcataaaagtgtagctgaagttcgaaaagaaaacatgggcagaagatgtagttaagcttcagaatcttcagataagcaacaccatgtactatctcgttatctttacacctatgcgttatcaacacagacgtgggctgatctgatacgaactctgcacacgacttcttgactttggccaatataatccgtcactgcactgaatgcctttgcaggtgtaggtcgcccagatagtagcaaatattctctctactcgagtctcgtcatctcttatcttcagagttcgcactcttcaagaatacaccgggcaactcgccgaagaagaagcttcagcggcagaagaagaatcacccatcgagagttttcccctcccaaggaagatcagggtaattccgtatctccttcctcatggaaacgcactagttcatctttaggcccaaatcgaaaaagtttatatatggctagttcttgtgcatttttggtggtgtcactcatttcagtacttgatggagcatattattcaggaagaatattcagggaacatgattgtccatttttcatgttttgctcgtttgctgggataatctcttaggcattcaattttaaggaatcagatatcagcgtaccatgttttttcattagatcctaatagttttgtttttttgagaaaatgcattcttggatcaaatagaagaaataaaattttaaaaaaatgcataaaagtaggaagaaattggttgtggtttgcttcaactatatgctagtgggttctatgctgattttcaggatctcttcttgagataaaaacagtcatgtctgagaccatagatttaaccggagatagatgcattcttaagacagtgatcaggagagcaaaggatgatgctactgcaccttcagatagtcttcccattgttgatggtattgcagctatctacacatcttggtcttgcttcagtacacctattcttcagatttacaaaagcataaaagcttctgcttctaccttgtctacagttcactatgaaggaacacttgctgagaacggggaagtgtttgacactactcatgaagacaactccgtcttctcatttgaaattggagagggaactgtcatcaaggcatgggatatcgccgtgaaaacaatgaaggtaaatggatgaactgttcgctagttcattatgatcaatagcccaaacagttcttttgctgataatactgttgttaaattggacacctgaggttggagaggttgcaaagatcacatgcaagccagaatatgcttatggagctgcaggttcacctccagagataccgccagagtaagtctgaaaacttgatctgtcactagtaaagtctttggtttttttatgtacagagttcaaaggtaacagaaacagctctgtttttttttccacagtgcaactctcacttttgaggttgagttaatcgcatgcaggccgaggaaaggttctagtgtggaaagtgtatctgaagagaaagctaggcttgagtaagatatctgaacaatgttttcgtgcttcacaatttaagttcaagtaaagcattctattgacagcactacacgtgcaagactctgagtttgtgatgcatgctagttaattttgtctggatgcgactaactgttacatactagagtttccgatgacacctgccaaattgaaggattcagaattatcaaaacagacaaaaggggactgttctcatgtctagggttttacactttaacagggagttgaagaagcagagggagatcgctgctgcagccaaagaggaagagaagaggaaaagggaggaagcaaaagcagctgcagctgcgcgtgtacaagcaaaacttgaagcaaaaaagggcaagggaaagaaggccaaatagataatatcacactaagacaagttatgaggtaggagtatataaaaagtataaagttatgtatgaacctggtaactgtatgctgttgaaattccacacaaacacaaactttgtttggttgtagttaaaatgggccatgaatatgcatataaacaaaaagaagtcgtgtcactttgatcacagtgtgcaccagcccatttgtgcaagagttcaatgtctttagggcatgttcatgagatgcaattggt

SEQ ID NO: 8967 - DNA, 6670 bp, Oryza sativa
tctcatacggactcgaaatcaggcaaataatatatgcacggacatctacagaaaaagttacatccaattctcccccgctttgccgggttcggcgatattaaaaactccaaattccacttgcaagattgtgttttcgaggagagaagtttttcggtggagctttggaaaattccatatgccacatatttcgtccgtttgagtttattttttacatggttggttcctatgagttcctaagtgtgaaaaaaatatcaaaaaaataaaataaaaataaaaaagttgcacatctctctcctctgcactagttcggagagaggagaggagaggaaaaattctacatgtcacatattacgttcatttgagttcaatttttctatggttggttcttgtgtgtccctaagcgtgaaaaaaatatcaaacaaataaaacaaaaataaaaaatttcaggggggggcgccagccactctggcgcactccccctagccacctcagcatcgccccgccacgtcagcagggggacggcgccaaagaggctgacgccgtcctgttgaacgacggcgccagccactctggcgccccaaaaaggaccatttttgggataagtttttctaagggtctacttgcgaaataagtttttcaaaaggaccaaaatgtgaaaaatccaggactttcaacatcagatggactatgcttcaggacatgacactattagctagttcctagcaagcttgctgcttgtatgcaggacttgtgagaagctccgtaggagccacactgttagggaccggcgtcgtccccgccactccggtcagatgggatccagcccaagccactaacctgtactcttttagacctaggttaatgggctttgtgctgtatcttgagacctcgaagaatataggaaaaagtacatcgaaggtccctcaatttatcattgggataaaaaaaacatcctcgaaccgtaaaaccaaatgagaaaaactatataacgggatcccgtcacacgggatcaagtctcaaatcgtgtcgtgacacaaacagctctatggcctttaggcccgcctccgtttccgctctctcgaagtatatgcgtctggtacatatgccgcagtagggtcatgcatagtggggtccatgcacttagtgaatatgtgcatgcatgcacaatggcaggcccaacaaccagtcaagtcctcttgtatgacagcatagaagaactaggcttttcctgggatccgcgtgtgcagctggtaaccggtgaaccagtgcatgcatcatcaaaagtacaagtacatataactagagtatatttatactttagaagtatcaccatcgatagttacatctatcatattttttatttaggccggtatcattataagtgcctaaaagtatcaacacctcaacttaggaggtatcaccattagcaactgcattgctatttgtggtaccatcaaaaaactctaatgatacctggtacctatatgatatcaaataaaacccggtacgatggtacctatgaatcagagttggtatcttattttttatttaggcaggtatcatcataagtgcctacaagtatcaacacctcagcttaggaggtatcaccactagaacctgcattgtcatttgtgataccatcacaaaaattctaatgatacctggtacctatatgatatcagataaaacccggtacaatggtacctatgaatcagagttggtatcatattttttatttaggcaggtatcatcataagtgcctacaagtatcaacacctgtcacgtcccaaaacgactctaaaatacatcctctaaatgatgcctagaataattaaaatccgtatgaaagcctccaaaaattaaaatgtgcaaagttaaaagtcaaataaggcttggaggatttttgaatatttcctaaaagcctaaaatgtgtaaataaattttagtggaattttcagagcacaaataataattaagaagaaataaacaaagttaaaatgattttataaaaagaaaaaccctaaaatccctccttctctctgatgggccgaattcggcccatctccctctctctcctctccccgcggaccattcggcctccctccccgcgggcgcgccgctgacgggcgggcccgcccgccaccctcgctgacgggtggggcccacccgtcatccctgacctcccgccgctcccgccgcctcgcccgtgccctagcgccgccgctgccgcgaatcccgccgcctcccgtcgtccccgcgtgcaataaagtggggggaaatattccccgtgatcccgtcttcctttccccccatttttccctctctctctcgcattcaaacggacggatttgcccccgcaaatctcgccggcgccattgatggcggccggacctcccgcgcctattccttcccctccggccgccctctcccccttccaaccctatataaaccctccccgtgcctcctccgtccgtttccgcctctcgccgcccttcctcctcgccggattcgagctcgcgacgtcgccctctctctccaccgttgccgccgagctccggtccgccgccgtcgccgccccggaccgtctcccgccccggcgtctcctcctccggcttcgccgcaccgccggcgaccccgtccaccccctcgccgagtccgccaaccgccggaacgccgaccctgtcgacccgagccgcgccggcgccttcctccgctccggccgcctttttcgtcgtcgccgtcgacctagggtgagccgtggaccgccgcctcttttcccccattccttcccctctctcggccgccgctccgccgtgcctatggccgccgccggtgaccatcggggcgcgggcgccgccgccacccgccggccgcgccgccgtggccgccttcgggcgcaccgagcggctgacgcgtggggcccacggcgccggccggtgcgagcccaggtgcgcccggtccaccgtggaccgtgaggctgccgcgtgggccccactcccgtggacccggtccgcgcgccccctccccctcggctgacgcaataaactttttttttaaattaaaatttaaatgaagaaattcgtaaatattcacttaaagagcatataaacttcaaatagccataacttggccatttgaactcggaattggaccgttcaagtctctaatttttccttaagaagtcaagaacccatttttgtgctttgttcctgcttgttatatggagtttattagagtaaaagccttttcttttccgttggtcgtgtagacgctgcagcttcggaagatccgctcttcgtggaggttgaagccgacgtttgggaaagcgagcaaggcaagtcacatcatccttgaacatattgaatcccagtttataaaattatgttgctttaaattattgcattatcgctttatttaaattcccgcgttatcactgttttatctagccatgcctatttagctttgttatgaccttattattgttattgttattatttccttgttcaccctagaataaacaaaaccccaactagtggacactctactcatggtaccactagtatgattttaggtagatgcttcgctatttaattaggtaacattaggtggttttacaactctagactttgggatattctcatcacctggacactatggaattgttggattattgtggaattggattcacaccgctccttctattcaaaatccccaaaatggttttaggctgggctcggggtgcatggttttgatagtagcacctcggccatataaggaccggtcttcgggcctctgttgcaaagcactaccgtacttccacatgtctagtgggtaaggcttagtttgtggctcagtctggttataaacaaaagtacacggatggagatggacgaagtcgggggtcgatggacatctctaggacaaatgaaggctacacgagctgcggcccggtagtcgagatgtcatggcacagggccggtgtcctgctgctaggggctcagtcctgcctacctgtcccgggggttccggccgtaggtgggattgggtcggtactcttgtctatggctaggatgggttggaaactatgtcacgtcttccgtccgtataccgtgatggtatgtggcatgtggttacacgtgaggaagatgtgtcttgtgggtaaagttgtacacctctgatcagagtataatctattcgaatagccgcgccctcggttatgggcaagccgagcaatgtacccaagttagtgttttaattcttaaaacctgcttaacaactaaaatgtggaatggttggcctgggttggcttgggacgagctgggacccagggtcgggttgccagttcggtctgaatcatcgtaggccttgggttaaggcaggttcgtgtgggttcacggccttgattaataatcttgtatagctctaggatcgtatttacaaaatagctttgagcaactaagtgtcttttaatgctgtttactgcaaaccctaaccccccataatatgggtgtgtcttgttgagtacggtggttgtactcagtcttgctcaatttttcccaaacccagaagaggagcccctggatgttgaaggctttggtgtctagctcgtgcctgccatcaagcgcctgtggtcgtcgccctagtcttccgctgtttcccgtttgtctttgtgtgtgctgggccttcgccgcccatgtaataaattaattaattacgcttccgcttgttaaactctgaattgtatcaacttttggtgtaccttgcctcctgggacaaggaataatgcacgcacgtaaggaacgcccgttgggttatttccggtcgtgacaacacctcagcttaggaggtataaccactagcaactgcattgttatttgtgataccatcacaaaaactctaataatacctagtacctatatgatatcagataaaacccagtacaatggtacctatgaatcagagttggtatcattttttttatttaggcaggtatcaacataagtgcctacaagtatcaacacctcagcttaggaggtatcaccactagcaactacattgctatttgtgataccatcacaaaaactctaatgatacctatacctatatggtatcagataaaacccggtacgatggtacctatgaattagagttggtatcatatttttttatttaggcaggtctcatcataagtgcctacaagtatcatcacctcagcttaggaggtatcacagctagcaactgcattgctatttgtgataccatcacaaaaactctaatgatacctggtacctatatggtatcagataagactcgatacaatggtacctgacggagcgtggggctcctcaccgggagaccgcgcaggcccccctttgccggttcggccggggaccctgggtgaggttctaagctcttggtttgaggaaggttcgcgagagtggaagaagcacacaagacacgggcgatgtatacaggttcgggccgctgagaagcgtaataccctacaaagtgttttggtggatctgtgtatgaagaagctacaaagtgcgaaccagccccgatcgctctgggatcgttcggtccttttttttttttctctcgtccgatccccctctctaagtgggcaaggtcctccttttatatcccaaggggataccacatgcaccatctctctcttttgtgtggggacttatcctatcttttcataaatggacggagatttgtatggttgccgtctgaatgaccttctgatgggacggcccatacctacctccacttccgccggaaacaggcgcgacgtgggaacatggctgtctgctgacgacatgaccagtgtcagaccggtctcaaatcggtcattcttgtccaccacgcgtcagtttatcaatctgcatgttcgcccttcttcatacaatatcttgcttgtaatggttaggatgaagcctggcatatatctgaccgggacccacgtgccatctccaggaggtaacacgccggctccggctagggacgagtgcttggaagctctcatcttgacgggatggggcgaggcgtgtgtcagaccgcctgtcgccacctaatccacgatctgatcggtctgtgactggtcacagaccggataaacgagcgcgctgcactgcgttacatgcggcgtgacgcgcttgaccaaaccgcaataaatgcggttaggtgagccccgctgcgcttgcctaacccagacacgcggcgcaaaacccccaaggggtcggggcgcctcagccctcggggccgaaacgggagcggtccgacccctcggggagacataaaggggggcggccacatcaccctcgggcccgacccccccgagggggtcaggcctcgtgggtgattgctcctgcccaagcctctagtcatgatactcccggtcccatgtcaccgacagtacctatgaaccagagttggtaccaataggtatcggactcgatagtctaatactgataagtatcagatctaatacacatatctatgagatttggtaccattaaagtatgtgaattagtacccattagtacccatatagttagattagatctgatacatcgatatcatccctggtaccaatggtatcggattggtagttctagtactttagggtaccagttcctagtaccgttagctttgccacctattt

SEQ ID NO: 8968 - DNA, 9438 bp, Oryza sativa
gtcccaaaatattgttgcatgtttatagattttgaaattttgattttaaaattacattttgggacaaaaaatgacttaaaataaaaaaaattcaactacaaagttgtaaatcgcgttgagggctacaagtttgatataaagtttatcttcattagagttcacatgaaaaagttatgaattatttttaaatataaagtctttagaccgtcctatttgacccagatgatattcaaatccaaatttagggaccgaggtggcacaactgaacaagttggaggacctaaacgagtgatctataagtttagggatcgggatgacacagtcgaacaagtttgaggacatgaatagtcgatttgcgagtttagggaccaggatgacacagcggtacaagtctagggaccggtgatggactttactctttagaaaatctccatcccaaacctttccagataaacaatcaaggccatccatctcccaaagacctaaatcggcactggcaacattaactgacatgtcgactggtacgatctctattttgtcgccttgccactgaattaagcattggtgcatagtcgaaggaatgcaacaattggtgtgaatccaatcccttccgagcaacaaactgtaagaacccttcccatcgatgacaaaaaacgtagtaggaatagtcttactgccgactgtcagctccacatttagaacacctttggtttccgatggattaccaccaaagtccttgagtgccatatttgtcttgatgaggtcctcagcgtttctacccaacttcctgaacgtagcataaggcatcaaatttaccgcggctccaccatcgaccatcatctttgacatcggcttcccattgacgtagccatttacatacaacggtttaagatgccgattgtctgtcccctcaggtttctcgaacactgcctgttctagtgacagaaccaacttagccgattcctgttccacttcgtcgacatcggcttgatcgattccgaactcagctggcaaggtaaaaaccatgttaattggagctgttacaacactcctcccttttgccaacttcttcgccttatcggctgcgacaccatcagctacaggaacttgattcttaacacgccactcttgccttggctttgctttcctcagccgatggttaatttcctgttcaacctcctggacgcgctccctgctcctcaatctttgaacccttcttttctgattcttcgtgaaaatactagaaggacaccattgattcttccttattacctcatcctcttggccacgatcatgattcgcaggacccaatctttgatgaacagaaactcttgcctgcttcagccgattacccctattatatgatcggcttgaactctcgacgatatcactgcacccagggcaattttcgatagatggcaacctcatcccttcattccaacagaatctgaagaactcacaaccccaatgaggatcaaaaccatcatcgcattcctcataatgcttctcctgctgcttgtcatacttcctttgatatttgttgataaccttagccgaattcacctgaaaaccccttgcatggatcctatcggctgtttggctagctgtatacaccatattaacaggaaaaggattaccatcgaccttcatcggctttttggagtcatcgaacttaatcttgcccccctcaatagccacctgaatctgctgtctaaaaaccttacaatcattagtagaatgagacccagaattgtgccatttgcaatacctctttttgcctaattcctcggccgatgggatcgtatgaccagcagaaagttgaatttgcttctctcggagtagcagatcaaagatcttatcagctttagtaacatcgaaatcatacttctcctcctttccagaacttttcacccactgacatagtatgacctttttgctcctaacccactcggctgcagctatttcggaatcatcatcctcatcatccaatccatacatataaggataaacatgattaatcttcctagagttcttcctagcttccgcaaacttttgttcatgcaaagataccttctgtgtaaggtgcgacaagctttcaaagtcttccgatgagaacttctccctgatcggagcaatcattccctgaaaagccaagtcggctaactgggcatcggtcaagctcaagctgtaacacttattcctcatttccctgaacctctgaatatactcgtgcaccggctcatcatgcttatgcttgttcgacgtaagatcggacaacttcatctcatgaaccccactatagaaataactatgaaactgcttttctaaatcggcccaactgttaattgacccatgcggcaaagaggaaaaccaagtaaaagccgatccatccaatgacaaccggaataacctaaccatcaaagcatccacagccgatgcctcaccacactgagctaaaaatcggcttatgtgctcataggttgatgtagtatcttgtcctgaaaattttgagaaatttggcactttaaaccgattaggtagaggaactctttcaaaccactcaggataaggttgtcggtacaaatttccagtttcttttggtttaagcccaaatttctccctcatcacatcagctatcacatcggcccatgttcgttgctgaggcgttccctgaggttgttgtggtataggcccaaatttattgtattgaggaacaaactgaagctgagccgattctgcctgctggtattgaacttgcggtgatgtaggttgatactgataattcaaatcgccccctggtaattgtgaaggttcggttgaataccacgcaccaaatgtttaggaataacttggggtatcactatgccatctggttgtacgtgatgaaccaagtgctctgggatgacttatttgcagcatactgcacatgctgaccagcatgtgctgcaaacccagccgatgcatccattcagccctgctgccgagtcggctgaacgacctgctgtctcaacggcgtctgctgaatcggctgtacaactggccgatttggtggtgtttgttggattggttgcgtgacctgctggattgggggcatttgttgaacaggttgcacaacttgttgcctgggtggtgtttgttgaatcagctgctgctgagttggatcaaccgtattccaagtaggtaaatatatagatgcaacctgatcctgcgttagctgggtcacatttggtccagcatggtgtggttgctctcttaccaacaattgaggattgatcaattggcccagagctaaaagttgcgcagcaaacgtgggagccgatgctggtgtcgtcggctgcggtggcgacggaatgggaggagctgcctgaatagacggctgagcatcagtgatcaaaggccgataatttgggaagacacctccttgtaaatacactgggcctgcagcctgatgctcagctattgaaccatcggctattgacttcatcatatttgacaaagtgttaaccaacaccccggactgatcgatcaaagcattgtgaacagcatagtcaacccggtcttggaaattgttaaaaaagtcttgtgccacttcactattctgattaagattccctccttgtggcccctgagcaccgtcactctgaactccatgaactccttgagacatgtcaccttgatttcctaaagagccatcggtagcacctttgatactcggctgagctgagccgtctggagcttgttttccttctccatctttagaagaaccggtcccaggatcatcagcaaccactcctatcttgtacttttgaacaagtgtccccttgcgggtctgcataaatgagttcaaaaactgatcccgtgtttgctgcaacgttgcttcaaactctttcttctgttcgggtgtgaacttttctggatcgattggcatgacgttcttttcaatgatgtcatccaatcccgactttgacgccttgtttttagcagaacctgggctagatggtggtggaggttgtttctcggccatgagggagaggttgtctgacttcttgagtgtcctaccgggcgtgccaaaagcgtgttgacagaaaacacgagacctgggagatctgcttaactccagtgcaggtccaaagctcgccttcgaatgtataagcgtgccagttgatttgatcctacaatcaacaagaaacaaagacaaacaaaccgtagttaaatctataaatgatagccgatcggctgtttgccaatgacatatcatttatctctgagccgatgtcgtatgtgaatcgatcggcgatcatcaataagtaacaaaacaccaaatctactagatcggctgtagatatcaataatatataatctttatatcaatatacacttaaatcaagtgattggagtagatcggtcaccataccgagacagtataaatcacttaaatcaaaatatatattaataacgagattatatatatgtttgtagcatggctgatcaaatagatctagcatgtatcggctaatactccgatactgctttatattaagatattgaagcagataaaatactcaagcagatgcttaatatacttagatgtgacaagatcttaatataaagggcagatttaacatgtcaatgaagcatataaagcaaatattgtcaaatcagatcagatcggctgaaactccgatactaccctaatcggcaaccagaaggcaggctagagattgtaattctaagcacgacttaatagatcaaactcaactgatgcagcattaagtatgaaaaggacaatatctagacaatcaaaccgctggatgtttcatagggtggtagatatcttatataatctgaatcaacattgaaatctaacctaatcggttgccttccttgatagatgttagccgattgtaggttagatgacgatattgccagagattacgtaagatatatgataactcgacgaatcacataaacaagattacagtatcgtaaagatggaagtacaaatcccgagaacgcaagttatcataacaagttttacctcttgttgaagatcaaaccgatgcagctcaacccgaaagcaagaactcgtcgaaataaaattaaagcaaaaggtggcgatgcgccaaaattgtattgaacgtgtgtgttaaaaattacataggtctcggggtctatttatacccaagaattacaagatatgcccataccggacacgactgttatctctaacaaactctaagatatcataagtctttgcggaagacttttgcccacatttatctataaggaatttacataaaatatcctaattaatagatacaattgcctttccaggactctatccgtgcgtggcaatcatattgaagtacattaatttgaacccaatgtcgtatacaagtcgtattgtcggaatcggctgaatcacttaacccaatctgactcagacttagccgatcctaaccgtagccgatctagactccagccgatactcattctgtttccacgacaatcctcatcttcgattccacttcgatcccatcttcctctccgatgctgacactaccaaatatggttgttaaccaacaggagggggaggggtttcgccttctttactgccgccatgcttgtatggaggagctctctacagcaaaaaggaggagggcaagggggaaaggaggggcgaaataaaaggcagaggaggaatacgaagaatttttttgagaattaatattatttttatggaaaatcgcaaaagtagtggccaaccggggaaaatcgcgaaagtaggtccatgtcgaacgggtgtagttcgatagggcacctatcgaacgacgggcagtcgacaaagccctttcgaacggctggcgttcgacaagctcacctgtcgaacggagggagttcaacagggcccaccacccggcgccgcgaggcctgtcgaaccgggggcgttcgacaagaccctccaccgaccctgtcgaacaatgggcattcgacaggccggtttaaagccccgtccacccaggccgcgatgcttgttcgatttgtttgaggaccacatcgccagccgccgccgagagtcgccacatcgtcgccgtgagcgccggagggagcgaggggaggggatagcaggccggagaggaggccgaggaggcgccggccgggaggaaagggttggcgacaccctcctgcagtgaagttaaggtatacattagtaatccctaagtacaatgcatatgaaagtttaataaaaaattggtttaagagttgttaattgtttcgcattgttcgatgttagtatgtatggttagcacatatttgttattgctaaatgttggtagaggtatttaagtaattgtacggttaatttagttcttagttagtacatattattgatatgttgtgtgttaaaataggtacaaaggtgttatattttatttggattattaaactagttgtttgttactaatagttgtaaattagtacacggcaatgtagtataagttgtaatagggtaattatcgaatgattaaatgattaaacgtgaaactatttgttatgttttatcaggatgtcaggtgatatgcccattcgtctgtattatggcgatgctcctatacaaatatgtgatagcggggtggatttgactgtatatgccttccatgatactagtctgaatgcaccggagcatatgcgtttgaacgacgtgttagggtggttgtataatatgtttggggtagatccagtgcacgataaatttgtcataaatgccgtctgaccagtgaggggtcaacatggatggcactggagagtagtggaggttgcgtcaactgggagttggagaaagtttgttagtaaagtaagggagaaaggctatagcctggcaatactggtgcagaagacaacatgtgttgatcgatcgggggagtcaagtcatgccgtggtggaagaaactccattggaaggtggacaagctgaaaatgtttggcggactgagcaaggtcgaggggaagaagtagtagagggtaatacacaaggagaggtcattgttcgtggtactaatcgtgaggccaacgactcggacgatgaagaaccggattcgcctatgcgtgttgatgcagcggaggagaatgaggcggtagtggatcagatggaagtggaaaacgaggaatacattgcgcttgtagtggaaggagaagatacaacactgtgggacaacgaaactaacatacccgatgattggacgaccatatcaatgagtcgtatgaaggtaaacgatggtttagatgcctactggtgttatgatagtaagcaggtgaaagttggacagatgtttcatgacaaaggtcacttacaagatgcggtgaagaggtgggcatttgtccagaagcgtgagttcagggtgaaggtttcaaataggacgacgtatgacgtgaagtgcatacagggtggatgtccttggagagtgcatggttacaagccacaacatgacactttatgggtagcttcgagggttgagcaacatacgtgtttgttggagaatacccatctggtgcacagaaacctgacagcggcatttgtggcacaaatggtatattcaaaggtggttagaaaaacatctttgtcccctttcaccataatgcatgacgttgagaaagagtacggatctgagatatcgtacgacaaggcttggagggcaaaacagaaagcattggagatgtggtttggaacttatgaggattcttatcacaatcttcccccactattagaggtgaagcaggtactccagaaaggggctcgggctttcctacgagctagttattgtgaccacggttcagccgatggtacaagagtgggagcacgcagctgataacttggcacttcagacacctccagacgatgggagttattatggagcttaccttcgttggtaccgcagtgttacacgatggaggtgttttcctccacaaagagatagcaccgtcccccaccaggcagcgattactgacacgtttgcccctcagcctagatcagcttacaactcaatggtacgtgtttatttgtggaatttgagcaactagttcaattttttaaaaaagttagcaagtagttcagtatgtctaataaatgtgcaattggttcaactagttccttttcttacataaatgtggaactagttcagtatttaaaatgatgtgcaactggttcattatttctaacaaatgtgcatcttgttaaatactcttaataaatatgcaaatggttaaataattttaattgccttgattatttgtggaacaggccgaatttgttgagcacgttcacgtggagtccgacaccctgctgcaaagactagaggcgagacctccagtcgtcaggcctgacgacgtggcgagagtccttcgcaacttccgtgcacgtgctgccgcactactacgtcgtgtctcctatcggagcgcggcagatgtggtgcagacgtcgggccgacggccatcaccaccactaccccgacgttccagcgtggatcggagtggtccatcctcttcacgtcgcgggtacgaagcagcccacacatctcacgatcgtccttcctttcagctcaccccagcaccggagtacaccagggggtcagctggatcaggggtacccacgtcgagcacggcaccaccacgtccgcaggtattccaaactccgccttatgttcaacccacgcagggagcatctgggtcggcacacttcccttacatgccaacgggggacaacgtgttgaacacaccagcatggggacttcatatcactccgcgtgcgccagagcagggccacacacagcacacatgtaagtcattttaaacaataacacgctttagtttctaattatatgtatcgttactaactacgccatattttttggtttctccctcttgtgcaaacagacgatgagtacggttcggcgtcgacgcatcacggaatgcctgcttactcccctcgcacagcattcattgaggacttcttttccactgatcctccccatggggaagtagggatggattactggcacgcagcacctcaggtcacacagccgacgcaggagacggaggccggtcaggggccagaagtgacaccacagcaggcagctagagataggcacccccctgataatttgacatatcccactgagcagattaggcataggaagaagggaggacctaacaagcgtgcaaagggcactgatcgtccttgacttatctatttgtattaaacttttagtcatttatgttctgtccgtactatttgagaaacactttacgattaacttagtactatcagtactatttcataaacttcttcggataattactcagtagcatacccttcgaatgaatcatgacaaattatcattcaaatatacaaataatgaaacttaattattcaaaatatttt

SEQ ID NO: 8969 - DNA, 10062 bp, Oryza sativa
ttcctgcagcccaatcctcatcttcgattccgcttcgatcccatcttcctgtccgatgctgacactaccaaatttggttgttaacacatgccccccaagtccgggatatttggtaatgttccgaatttgtcatgtaccgtctccgagtaagtttcgcactccgccattattgaccgttattccagcgctttaaatactaaccgttcccctcgagaaatctcacgccgtgacttccgttttcaccgctcaagcaaaacttcttcctctctcttctccggcgattcctccggcgcaaaggcgatttccaggcgacttcctccccgacgagatttccgcccgcagcgatgtcgtcttccgccggcccatctgatgcgccatcagccgagtacgctgaggtaagttctcatcggctaaatcccttttcccaagagtagattgattttctcttgtctcctattgttctcttcttctcggtcgctttggatttgtagcacctctccaacctagttgcgattcctagcttatcgcatgaaaaccactactttctcggcccaatcggcaatcctgatccaaccgagttcattatctgtgaaaccaataggattccgttaagattaaccaatccagatccaggtcactggaaaaacacctttaaatcttggccgtctctagaaaaaacttccctcgagaaaagttggactacatggttcatgcgtatgtcggctagcaaaagagttcactgggacgaaattggaatcagccaagaacttgacctaaccatagcaaactcagccaaggatgaacctctcatggcagctgcctcttatttctggtccaacactatcaatgccttcttattcaaccaagggccgatgaccccaactctcctagatatcgtcatgatcacgggtctggatatcacctcatcggctaaccctatgagcttgaacataaagaaccaatatgacttcaagaccaagagcataggcggctggtcaagttatgtagcagtatatatgggccaaggttcggtcaccccccgagaacatgtggctttcttgttaatgtggctagagaaattcctcttttgtggatcaagctgtggccctacaaccaactggcagtttatagctgaagctctagaaacaaagagacaatttctcttgggtaaaatcctcctcggctatttataccagatgctgaacaatgcatcggctaagatagctgtcggcgcagtagttggagcaggctgaccatggttgctccaaacttggctaaatttgatagtcatgaaagttgtcaatcggccaaccgtgtcagaatccgagttaccaagactgtcacaccttaaaaatcccaaatgtataaattgttgtttaaatggaattattagaaataattttaaaagccttgaagcaaagatctaattttaaataagaaattccaatataaaagtgggctagataaaattttataaaatacttcgattgattctatagttcctagatttttttgggatttatttgagccaaggaagtatttttaataaatggaattgcatttcatgaataatttaaatggaaaaaggttttaaaatacctcttttggctttgggccgaaagtcggcccaaaaccttcctctctctctccccggcccagttcgcgccggtccagccagcccgccagccgagccgccgctctctccctctctctctctcgctgacaggtggggcccacctgtcaggatcttcatccacctcgcgccagccgtgccctagccgcgccgcgcgtagccgccgccgcccttccaaaattcgcccgagtctttccatctctggtcgaatcaatagaggggaaatgatcctcgggatatcctctatcttttctcttttggaatcttcatctaatttcgtttggaaatcgccggatttgagttcgaatcggattcgttttttttccccccgaatcttaactttccttctcgccgccggccgccgtgggcctccatcgccgccccctagcccctttataaggacccccgggacctcctctctccgtagccaccctcgctttagctcgtcgtcgcttgtagcgccgcctccgcgttagctcttgcgccgccgtcgtcgccgcgtgtccagccgtgcgccgccgtcgtctcggtcgtcgtcgtcgcttgagaagaccgccgtcgggatcgccaagtcgtcgccgtcctcgtcccgtcctccgtttccaccgaagagcgccggagcaccgccgtcgtcgttgacccaaacgtcaccgccgcttcgacctcgccgccgtcgccgtccgttgccgtccgtcgtcgtccaagccctcggtgagttcgccgcgtctccctctacgcatagatgccctccgtttacgccgccgcgccgtcgttcgccggcgagcatgcgaggccaagtcgctgccggtgatgacgacatcgccgacgtcaccgtcgatgtccccatagacccgcggtagaccgattcgatctcggccatccgttttgcattagatccatctcggccattcgtttcgtagaccgttcccgtgcacccggtccaccatgaacccgagccgctgacgcaataaatcattttttcttttcaaaaataattctttattgcgtcatgattcaattaaaatctaaataagtgttttaatccggttcaatctttaaaaattcataactaattcatcttagctcggatttagttggtttaagtctctaattttttctaaaattgagatctacatgttaaaaatatccacatgtactattcatgattttttatgtgctgttttggtgattttgctcttttatgcttagattccgatgttcccggagagtccgattttgcaggagaagactttgaagagttccaaggccagcaaggcaagtcacacagatcccaaataaccctttgagcatgttgatcccgtttaaagctatggtttctattcaactattgcatttatttctgaatgtcattgggtgggaataacctattgccttgttatagcccttttgatattgattatctattctttgtcgtttggttaataattggattagctagaacattatatggttttagcaaaagtcattaggatgcttagccatgcttagagacactagctcacataaatggaataacttatgattcactattatttaatgatggcttaattatagttcacgatggttaatcatgattggttaattaattaatgtgccaactaaaacctaataatggtgggttgtgagcacatggttttgatggtcgtgctcatgacaattaagcaccggttcacgattttcggttgtgaaacattaatcgtgccaaccacaagccagcgtgggcaacgactttactttctatatagtatggttcattgtagagcaccagactgtgaagtggcggagataaacccacgggggtcgctggggagtccatgcctttatttacaagggggtgattatgatccgggaacggtgcactactttgaattgtgttatgcagggggtattgtcacaatctctattcgggtacttgttaagtatcgcgacgcatggttgacatgatgttgaggttgtgtcttgtgggtacagttgtacatctctggccagagtaaaactattcgaatagccgtgcccgcggttatgggcgggtctaacaatgtctttcgtgattagtttcatatctctcaccataataaatgatgatgataataatttgtttagctcctggtttggaatggtatattcctggtttggagatagaactgtgcagccgggattggttgttcagaatggttgggcctatgcaatacgggagtgttgtatagtgtttacttaatattgcttaattacgcaactgttttactattctctcaaatgcttattaaatgttgtttatgcaaataagaccatattatgccatcctttgttatcccctgtatttgcatatttgctgcgtggcttgttgagtatgtcatatactcaccttgcaatcattcatcagaggaggagttctatagtgatgctgaaggtgtggatgattaggcgtagccctggtcaagctgcttgtgggatggagtcgtctgtgccgtttattttattttccgctgcttagaattttattgtttgagaggaactatctatctctgtaatgactttatattcgcttattaattagggtaataattgtactctattatcaatttgttattgtatgccgctgattcctggacgagggtttacacacatgtaagcgtttggaattttggatagaaattccgggcgtgacaagagccgattgtagaagatgatggagaagagcgcactcatcgcagatgtatgtcatacggagaatatgcatccacaccaaccgatgccggagcaaaactatcagctgagctgctcaaggattagttctgcaacttctatgaaggctttcagaaagatgctcgagtatggtttctttatgaagattcggctgaccttgagctcccatcggactttagattcgaagacattaaccatgagatataccaatcgtctagggaaattttctcagctgcaatcagcccatgcatccttcccgtcggtattcatcaaggaagaaacatccaagtttcttatgaattctatcatccaatgagctcagctagacaacttggaatgggtcaactcctaatcggcttattttttgctgacaagatccaatgccgaggagaaatttcatcaaccttgatgatggatcgactgctcaaccttctaggaccccctctgggcagtattgaaaacatagaactggcaatgttcagaagaagaaactttgatagatggtggggtgaatggaagctgcatctattccaccaaccagcttcaatgtatatgacagacctctttccagatgttgtccctcaagtaagtcctaacttcacttgatttcatttaaataattgcttagccgattaatcttaactaatcccccttttgatttgtagacaacagaatcttctcctcctcgtcagagcaacagtggcaaggatatccattatgccccaggcttaattcctaatggaggtgggccatcccctccggttattggctatgatgcccccaagacctcagctcttcttcaagggctcatcaaagaaccagccgatgccggcaaaaagaggaaaaccagatcatcggctgtaaacatcgcagtcccaactaagaagaaaaagacaaggaaaaccaagccagccgatgacctgcctaccctagacccatccattgaacaagctctggatgaagagataattgaagatgaagttgatcaggctgcagccgaagtaagcgatactgaaaaaacaccatcagcttcgcccaagcaaacgcctccaactccctctactccagtcctcttttcaagagtaagcatctttctttaacccttttcacaattattttgtcttatagccgatcactcccaaatttataattgcaaaaaaagaagactgcggtgaaaaagaaatcggttgcaacaacatctaaaccagctccaccagtaagatagttttaattttcattagttaactttcagccgattctgtctaacacttgtttccttttagccacctcctccttccccttctgtacatcaatcatcaagcgatcagacttcatcagctgtagggagtcaccatatagaagaagaaattcaaccaattgttcctgctatcccagtaagtttttctcttgacaacaatcactcagattagctatgcccatttaacctctaactgcttctacatcattactgcaggtcttagccgatcttttctctttcgacatcaaagattatcttgatgaaggagaagaagacaccacaagcaaagctttagcccctttatctgatgatgtaaagaaaactctggaaggttgatgtgactatggctaccacggatgcaaccattgctcacatcatggatgaacaagaagatatcaagatcacatcgtccaagagctggaatccgattcggctacatgctacactgctgacttcaaacggccgccgaatctacatacgacctccgttttcggcccgtgagtacttgatggaaagctctcggagccctctttccaacagatccagcctcatctccgaattccatcttgtgtggccggaatcacaggcacaaggtgctacgtcacctataatgggcctataggcttgtaacttcatttgggaccccggcccaggtggggcccatgtggggtgccccccaaccaggtggagcacgaccctaggcacccctaggtaccccttcagggtttcttcggttttgatagattaaagtttagccattgctacttgcttgcagcgcgcgtgtcggctagaccgtccgtctgcttgttcttcggaaccccaacttatcttttgtattaaattcctatttgcaatatcagattgcttttatcttgttcttgcttgtttcttcgatttgctttcaggaatagggttgatctgcaccggcaagatcaacaacccacggagaggtgtatcgatcgctaagccgcaacacaacgtctcgtacggttgtagtcggatcgtcaacgtttctcccaaatcgtagttatcacaactcaccgaaagatcgggccaacaacagccttgagtgtcgagaggaactcagggttcatcaggtggtatcagagctttcgttgctcggtgagttttcatttacctataactagaaaatagcccgaaaaaaaaattcatacattacctagccacatttgtgccattgcattgttcttttcagtttttgctttgttgaaatttgtgttgcatcgtcacgtcatgttgctggtcatagcgtttagtttgtttagagtttcgagttctggtcacgttttgtaccactgtcatcgttgtcgtcgtgtgctttgttgtcgtcgggacctacgaaaacggaatcgtctttccgccaaggtttcatttttctagttttcagaagtttctattggtcggttttgttgttgctgagttgcatctagttttttgtggtgtgattctgcgctgtcccgaggccgtgttgctgccgtgtgttccatttgccgtgcatgtgtatgcgaggaagaaggaaggaggagagatctgtctagattagattggattggtttctgtttggtggccaacgtagaaaagaaaaaggaagggagggatttgtctctgttttcacatggagcctttccatagatcgggaatcaatctccacccgtgacagagatctccagccaccgtttcctctcggcattggtgagtccgactccctccatcccctctcctcacagtatagacagcttggtgaaaaaatttcgtgtatcggattggagatccgtttgcaaaaacggaacctacgggacgacagcattccatttttgtatagttttaattttgagtttggacatttacagttgagtccctgtatttttttatatttatatttgagtccctgtaaacttgatttatagtccttgaggttgtttttgttaaaaaaaatccaaaaaaaaagaaaaaaaggcagaaaggtgcatacaaaaaagaaaagaaaagaaaaagccgcaccaaaaaaaaagaaaagaaaaggaaagaaagaagaaaaaaaaaggaaaagagaaaaatcagttgtatctttgaatttgctttcatatatcagagttgtgcataagttgttcctagtgctatcttgtggtaccgtttgtgtctaggctcgcgtctctagtacgttctagcctaggaccagcacggtgcttgactttgaacaattattcaactttgcattctctgatttgagcatttgctattcctttactacatatttaagcctacccagagctttacagatttgattgcagccgtacagcaagtgttagccaagacatcgatacatccaacctccattggggtgcttggttgaatcggtgtatgtcaccattccgcttgcattagtaagatcttgtaagagcttggttaaaagcttgagtgtgtgtgatttttgagctgccattacctagtagttaataggaaagcgcatatttttgtgtatgtttcttgttttctacgaacaatggcagggatacgcaagataattggggatagctgtactcaacatcgacatcttcgtcgagacatgaggagtgatcaacatgacctttatgaggtaagtgacgatgttctaggtaagatcaaatctgcactgccttattttgagggaaactatgatcctcatgcttacattaattgggagctagcggttgatagtgaatttcaaaagcatgtcttgtctgagaaacaaaaggttatgtgtgcctctagtgttttagctaaacatgcttctaatgattggaaacatctttgtaggcataacaaaataccacaatcttggtgtcacgtcccaaaacgactctaaaatatatcctttaaatgatgcctagaataattaaaatccatgtgaaagactccaacaattaaaatgtgcaaagttaaaagtcaaataaggcttggaggatttttgtatatttcctaaaagcctaaaatgcgtaaataaattttagtggaattttcagagcacacataataattattaagaaataaacaaaattaaaatgattttataaaaagaaaagctctaaaaagtcccctttccctccctctccctcttgggccggctcggcccatctccctccccctccctctcctctccccgcggcccattcggcctctccccgcgcgcgcgccactgacgggcgggcccgcccgccaccctcgctgacgggtggggcccacctgtcatccccttcctcccgccgctcccgccgcctcgcctgcgccctaacgccgccgccgccgcggattccgccgcatcccgccgtccccgcgtgcaataaagtgggggggaatcattccccgtgattccctctccctttccctctatttttccctctctctctctcgttcaaacgggcggatttgcccccgcaaacctcgccggcgccattgatggagcccgagatcaccgcgccggtttccttcccctccggacactctctcccccttccaaccttatataaaccctccccgcgcctacctcgcccgtttccgcccttgccgcaccgtctcctcgccggaatagagctcgcgccggcgctctctctctccgctgtcgccgtcgagctccggtccgccgccgtcgccgccccgtaccacctcccacctcagcgctgcctgcttcggttcaacgggatcctcggcgacctcgtccacccctccgtttcgctcgtcgaccgccggagcgccgccgtccccgtcgacccgagccgcgccgccgccttcttccgctccggccgccttttcgtcgtcgccgtcgacctagggtgagccgtggaccgccgcctcgtttcccccattccctcccttctctcggccgccgctccgccgtgcctatggccgccgccggtgaccatcggggcgcgggcgcgccgccacccgccggccgcgccgccgtggccgccttcgggcgcaccgagcggctgacgcgtggcgctcacggcgccggccggtgcgagcccaggtgcgcccggtccaccgtggaccgtgaggctgccgcgtgggccccactcccgtggacccggtccgcgcgccccctccccctcggctgacgcaataaactttttttttaaattaaaatttaaatgaagaaattcgtaaatattcacttaaagagcatataaacttcaaatagccataacttggccatttgaactcggaattggaccgttcaagtctctaatttttccttaagaagtcaagaacccatttttgtgctttgttcctgcttgttatatggagtttattagagtaaaagccttttcttttccgttgatcgtgtagacgctgcaccttcggaagatccactcttcgtggaagttgaagccgacggttgggaaagcgagcaaggcaagtcacatcatccttgaacatattgaat

SEQ ID NO: 8970 - DNA, 15463 bp, Oryza sativa
  unsure (1)..(15463): unsure at all n locations
acctaacttaaaatgtatagctcaagacaacggttagtccacaattagcgcttgtcattaattaccaaaattaacaccgggggcctagatgcttcaacgccgtgctaggtcgtcgagttcgatgttgtccttgcgatatacgtgtcgaacttcgatcccgtcaaaccttttctcctgcaaggtacttggataactcggggctagagcacttgtagtctttgtgcacctggtttacgactagttcggaatctcctttcacgattagtcgcttgactcctagtgcggctgctgctcttatcccagcgagtagtccttcgtactcggctgtgttgttggtcgccttcaagttgaggtgaattgcatgcttgaactggtctcccgaaggtgatgtcaagatgaacccttcccctgctccttggctgtagagtgcaccgtcgaacgccattgtccatgtttcgctgtcggtttgactgtccagcctgttttcaggcatagtccagtcagctacgaaattggcgaggacctgggacttgatggttgttcgtggtacaaagtggacatcaaactagcttagctcgactacccatttcgcgatgcggccgacaatgtctttatttctcacgacttcactaagagggatggagaaaacaactatgaccctgtgggcttggaagtagtggcgtagctttcttgatgtcatgattactgcgtaaagcagcttttggatctgtgtgtatcttgtctttgcattgtggagagcttcgctgacttaataaactggcctttgcaccttctctctcgacaacaatgatggtactcacagaatatggcgtggcagcgatatagaggaataattcttcattaggttggggagcaacaagtatagggggatttgacaggtagcgcttgagtgcgatgaacgcctcttcggcttcctgtgtccatacaaatttatcttgtttcttcagcagagcgaagaaaggttgtccacgctctcccatcctagcgacgaactgtcacgcccggaatttctatccaaaattccaaacgcttacatgtgtgtaaaccctcgtccaggaatcagccgaggcacacaataacaaattgataatagagtacaattattactctaattaataagcgaataaaatgtcattacagaggtagatagttcctctcaaacaataaagatctaagcagtggaaaaataagataaacggtgcagacggctccactccacaggcagcttgaccaaggctacacctaatcctccacaccatcagcctcattgtagaactcttcctctgatgaatgattgcaaggtgagtatatgacatactcagcaagccacgcagcaaatatgcaagtgcacaggataacaaaggatggcatagtagggtttcatttgcaaaagcagcatttaacaaacatttgagaatttaataaaacagttaagtattaaacaatattaatccaacgctatacaacataccctgttgtataggcccaaccattctggacaaccatcccggctgcacagttctatctccaaaccaggaatgtaccattccaaaccaggagctaatcaaattattaccaattatagcatcatttactatggtgagaagtgtgggactaatcacgaaagacattgttagacccgcccataaccgcgggcacggctattcgaatagttttactctgatcagaggtgtaccactgtacccacaagacacaaccccacatcatgtcaccatgtgcctcaataccaccacggtatctcgaaaaggagttgtgacaataccccttgcacaacacaatccaccgcagcgcaccttcctggatcataatcacccccttataaacaaggcatggactccccagcgacccccgtgggcttatctccgccacttctcagtctggtgccccgcaatgaaccatgctatacaaaagataaagccgttgcccacgctggcttgtcgttggcacggttaatgtttcacaaccgaaactcgtgaaccggtccttaattgtcatgagcacaaccatcaaaaccatgtgctcacaacccaccattaccaggttttagttggcacattaattaattaaccaatcacgattgaccatcgtgaactatcattaagccatcattaaataatagtgagtcataagttatcccaatagtgagctaatgtttctaagcagggctaagcaattatatctaatatctagttgaaccaatatacatagcccaactagtcaagttataataacccaaggtatcaaggaataaagtaatcaagaacaaatgggctataacaatgaataggttaattccacccaatgacattcgaaaataaatgcaatagttgaaaagaaacaatagctttaaataggatcaacatgctcaaagggttgtttggaatctgtgtgacttgccttgctggccttggaactcttcaaactcttttccggcgaaaacgactctccggaaacgacggaatctaagcagaaaagagcaaaatcaccaaaacagcacataaacaagcatgaatgtggatttttaatatgtagatctcaattttagaaaaatttagagacttgaaccaactaaatcggagctaagatgaattagttatgaatttttgaagattaaatcggattaaaacacttaaattgattttaattgaattatgacgcaataatgaattatttttgaaaaggaaaagaggatttattgcgtcagcgggctagggtttcggtggaccgggcgcacggcggcggttcacgcgaacggacggccgagatcgatccatccaaaacagacggccgagatcgatcggtccacgaccggctcacgggagagggcgacgatgacatcagcggtgacgtcaccaccggcggcggcggctcggcggctcgggcgcgcatgctcgccggcgtacggcggcgcttcggcacgaacggagggcaccaacgggtagagcgcgacgcggcgaactcaccggtgaccaaaggagcggcggaagaccaacggacggcgacggcaacgaggttaaaacggcggcggtcttcggcttgacgacggcgacggtgctccggcggtctacagcgacggcgaaggggcggacgaggacggcgacaacttggcgaccacgacgacggtcttcccgagcgacggcgacgtctggaacggcggcggcgcacggctgaagcgacggcgacgacggcggcgctagggcacacggcgctagggcgtttccgacgacgagagacgacggcaagggtggcgacgggtagaggagacaccggggaaccttttaaaggggctcggaggcgacggcgaaggcccacggctgctggcgacgagaaggaaggtttagggttcggaggaaagagacgaatccgattcgaactcgaatccaacgatttccaaaaagaattagccgatgattccaaaagagaaaaggtagaggagatcccggagattgtttcccctctatcaattcggccggagaaggaaaggatcgaccgaatttggaaaggaacggcggcagcgcgaaactagggtttcgggcggcggcggccgaagatagacgacgaccctgacaggtgggccccacctgtcagcgggcggacgcgcgcgcgcgcggcggcggactgggccggactgggccgaggagagagagagaaaggttttgggccgacttttggcccaaagccaaaagggactttttaaaacctttttcaatttaaattatttcttaaatgcaattccatttattaaaaatacttccttagctcaaataaatcccagaaaaatctaggaattatagaattaagcaaagtatttaatgaaattttatctggccccattttatattggaatttattaattaaaaattagatcttctcttcaagacttttaaaattatttctaaaaattccatttaaacaacaatttatatattttgaattttcagggtgtgacacgaacgtgcttagtgccgccatgcatccagttagcttctggacttccttgagttttgtgggcgacttcatgttctcgattgccttgatcttctcgggattttcttctatccctcttccagagacgaggaacccgagcagcttgcccgatggtactccgaacgtgcatttctctggattaagcatgaggcgatatcgtcggaagttgtcgaacgtttcccggagatcgtcaatcaatgagtcgcttgtgttggtcttgacaacaatgtcatcgacgtaggtctcgacattgttcccaagctgatcgttaagtgctccctggaccgtgcattggaaagtatttcctacggttatcagtccaaacggcatcttaaagtaacagaatacaccaaacggcgtgatgaatgttgtcttctcctcgtcctctttcgccatgctgatctattcgaggaagatggaagtgatcctttgggctcgccttgttgaggtcggtgaagtcaacacacatcctccacttcccgttggccttgcgcaccatgactggattggctagccactctggacggagaacctctctgatgaagccagctttgagaagcttgtcgagctcttctcgtatgggttgtttccggtctggtgcaaatctccgcatttttgttttattggcttggcatcgggtcgcaccatgagtttgtgctcaatcacctccctggggaccccgggcatgtcgaacggctgccaagcgaacacgtctgcattgtcgtagaggaaggtgatgagcgcgagttcctatttctcgtccagtgacgcctcgatcttgacggtcttgtcggggatggcactggagagtggaacgatcttgattgcgtcgtctggctttggcgtcttgtttgttttactcactttcttgggtggctcagctgtggcgggtgggttgggcgtgtgctcgaccatgtcgaggctccgcctgtcgcactgccccgcgagctttgcgttaccctgaatagtgattgttcccttcggcccgggcatcttgagcacttggtacgtgtagtgagaaccggccatgaacttcgcgagtgcagttctcctgatgatggcattgtatgctgtatcaaatccagtgatctgttctgttcggaagttgtttgcttggccgaaagttacaggcaacgtaatcttgcccaatggcttagacgatgactgaggagtaattccatggaagggttgatcagtgggcgtcaacaacagtcttggggtggtctgcttcagagaattcgatcttctgctcagaccacttcatcttgggggtagccccctgccatgtcgaacaaacttcgcgctccacttttttgtactcttgcttcgaggagtatgccgtggaacctccgaagatatgcgaaacatgaatatgggaatctgggtatgctgagtccgagtcctgagtagctgcttcagtggctttctcgactacacgtactcgcttacccttctccaatgccaattgttttgcgagtggctttttgaaaacgaaacaagcttctagggagtgcttgtccgatttgtgtataaggcaccatattttcttcgtatcgtccctttgtgggtctgggtgcttgggtggttccgcgtattctgctacgaggacttctgtttgagctttccttttcccactcttgcgactcttcttcttgcttgactcaggtgcgtccttggctggtttcttctctcctcccttcttcggcttatcgttcttgcgtctcagtgcgtcgtccgcgtgagcgcatcgatcgacaatctcgaatagctttcgagcagttgtgatctgtctcgtcgccaactcctgggtggtgtagcgatctctgacaccagtcttaaaagcgcggatcacagaagcgtcgatgatctcggggatcatatttctgcacccattaaagcgccgaacgtagtccctcaatgattcacccagattttgtgtcaacgcgtgtaggtcgtcttcgatcgcgtggcgcttgtatgttccttggaagttggctatgatctgctgccacagatctgcccatgaagaaatctagtatggtgggaggtggactagccataaacgtgcagatcctttcaacgccgcttgcaaataattcaccaacacgttgtcgtctgctccggcagcgtagaatactatggaatagacctgaaggaactcctcagggtcagtgctcccatcgtacttctatattgctctcggtcgaaatctctcaggctatcgaacatcacatagagcacgactgaaagctctacacccgccgccgggggcggtgggttgtcggtgatcgtatgtcctccgtggatgtctgtctgatcacgaggatgatgaggatgacgatgagtcacttggttccggggtacgaatacgaggatgacgtctaggttctcgagaatcctgtcgtcgcccaccgttgttgtcccgacggcgatctccgtcgtcgtcatcattttggtggcgtccttgatcagtctcgcccggcatccgctgttcgcgatcatcgcgttcgtggcggttatcacggtcttggttcttgctcgggtgtcctcctcgctcttcgttctcccgacgtcgtgaagagacgagatgtcgggaacggttttcgttgtctcgtgcgcgtcgtgcttctcggcggccattcaaatggtcacggagatcgctggtgccgcgaggtggaggggtggcttgacgaggtgatgcccgctgcccaggtagttcgccattggcaccgccaattggcgggtgttctgtcggtactccggcggcggccccctcgaacgcgttactgaggttagccactgattcccgtagtcgttctgtccactgtgcgagatcatcgttcagaacgggatcataaggggtttccctcagtattgcgttgatggccctgatgtgctgggccggtgtaaccacttgatcctccgcttatgcgttagcgcgcgcagacatgctggtcctatcgataacgaacacatcacatggtgtactcgtcgatgatgaggcctggtcttcgagcaagtgtagaaccgacagctcgtggggatcgacgtcgattaccccaacgaatcgatctgagataactgtcgctccttgttccttgtccgcatctctaagagagatttgtgactgctggaccttaggaggtgacgtcctcatggcactgagaagaaccttgcagcttgagaggtcgtgattctttgtcttgtgaatatgacaatagacatcacgggttggagaagtacattgaattccacgctctttgcaggcacagatctcagcttgtacgtcgagaaaaacccagcaagcctgcaaggtgtgtttcctggttttgtggataggacaccaggaccttgttgcctcagaaattgtccttgtcggctcgtgattctcgtcggaaggacaagatttggccgcattaggatccttctcgggcttggatgtcgtcgatgtgtaacatacctgaattctaggattaaggaatttccatcaaaactagttgaaagggaagttcttcaattttgtaaaccaaaaatttccattttaaacctaggtgaagttgatctaactcttgcatgataaaattttagaacaaattaaaaacctttgcatctctaacctaggacaaaaatataaatttatgtgtaagcatgcatactctcatagacatgtttgacttgagtccttcatatgcaattggatttggattgcattcggattttcgatttgcatatcataataggtctcatgaatattaactaagatctagataaacaactggaccattagggcctagtgctagctagaggaagttaaaataggaaccatacaccttaaaatatatcaacaaggccaatgccaagccccacaaaactattttggtcatccatctgaagactagtcatgaacatggaagtgaccaaataaattatatcatataggatatattctatcttaatcatctctataagcattctcttaatttaatactaaagtaaacttgtgcataataggtaaggagcttatgacctgtgtaaggtaaactgaaattctaacatatcattatcacctcaggttaatgagagtccaaatataacttttataaacatttacatgcatttaggaaaggaaacacatataagacataactcttgagaattatctaaaataattcgtgcaagataaaatcatgggaaaattcatgtaggctctactcaacacatacaactcactgtaattttggtatgatttaataactaaatttgtacctcaaataaatcagtcaaactaataaaaactagattaactgtagttcttaatcggctaaaaccatactttatctaaaagtgcatttaactgcatagaagtgtataagtaaaataatttattcaaatactaggtcatttatcattaataaaaataattttttcagaatttatcttctctgtttagggctcctaaaaattcgaactagtttccaaagaacccatattcctctaatttctgtgagtaatctatccataatttttgagtgcaaccaaagaaaatggaaactaggtacatacacctacctccagtaaaatcaacactagttaatctgatcaacacattaagtattgaagctacaaaattagaggagaaaataattccggaaattcgtccaaaaaccaagctcacccatgtttctgcctacacatctctcttccacctagtttacttcgacctgngccccccttgtcagtccctccggcttgcccttcctctgtgcaacttccctagccgaccgagaaacactgagagggagagatcgagcgccgaccggctctggacgccgcacgacgcgtggccacgacgtgtcgacgccctaaaaacgccgagctccatttctgcctctcccagacgcgtcgccactcttcacccaccattccagtgccgatccatcgagggagagcatcctcgctgctcttctccactggttctccatcgccggctgcgaagaagacgatggccgcaatcgttgatgagccgcggtcgtttcctcttctcttgcgttccatactctcctcaccatgccgaatatttctccttttgatttcatcctctctggtgcagccaatcggcgggaacgctgccatgcacaccggagctctggagcgcgctctgcgcaccgccgcagcaacatcgtcgccgttgccatcaatctagatcaagccggagcgagccaccacgccaccagcttcacctcaacctcctctccatttcccctcaagaatcttgaagaatggtgctacgagtgtggagatcgtccaccgtcttctccacctccggtcgccgtcgccattgtcgattccgcctcctccggtgagccattgtccgattcttcgcgtatacaccatccctgggacctcactaaccccatgaaacacatgcatgtcaattcgatgagtggatcgagccgttgccgtcttcccggagctctacaccgtcgccggaccatcttcttctccgctgccgctgtccagactttccggcgcctcgttcaaggttcggtgagcacccttgagcccataggattgcattcatgcatttcattcacttagaattgagcaccaactcaacatgcagtagcagcctaagcacagccgccgctcggactcgccgccggcgttactccgatgtccactgaccaagaaaagaagaggaatggaatcgcaatagcatgatcttcattttgtcttttggtcgcaccctcaaacgagccaccgtttgccgctggcaagcttgagatcgagctcagccatggcttgatctgcttcagctcgaaccagggacctcgtcacaagaatttaggttaatgtagggctctttatgcaaaagctcaagacacacagaacagtcataggactgcgggttgatttcctgaaactataggagcctttttgcatattggcctgagactgacagtgcaccccttggaaacaaaatctgaaattataaaagaacagtaactaaaacttgtaaaaatccatataaaattaaatatagctcattttaagatgattcaaatttctgtgaactcaccaaattgggaactttgatgttatggaataaaaacttgcactcacagtacaaatttagcctctaaaatttatccaagttaaatcacacataaagcacgcacaaaatttataaaatgcatacaaaattcatttcaactcattttggagcaaactcaatttctacagatccaccaacttatgttctcctataaagcaaaatgaaatagtatacatactatacatcaaatgcctctaaaactattacctttaaatgactagttttagataagctgaattttagaagttcatataaaattcatcttagatctttttttagtaaacccaagttctgtagaatcaccaaaacatatacttccaaattataaaataaaattatatacttactgtatgataaaagcctctaaatacttatgtaagtaataaccatcatagagcaaccttaaattgtaaaatttgtagaaaattcatctttagtctaaatgaagtgaaccaaatatctatagaaccagcaaacagtgggcttcaacatagtaaaataaaatatggaaccttctgtacaggttatagctctaaactttaaatttataggataggtgctaatcacatagtatcgattgagcaatatgtatatatataaatgtatatagaaatacactctagctataatgaaactcaaataaaacttgttagaccagtgaatgcatagttccattcccatccaccaaaacttaaggcacttagctcatataataatttctaggttgatataataaattgctaacatggactagagctcccctagtttataaaatatgaaccatgataataaagaccataagcctatgaactaaggttagattagttaactaaaatattcattttatacatcactagctagatgaggcaagttctagacctaaacctctaaagccatgaacctatagaacactatacacctataacacgttataacttgtaaaatacaaaaagaattcatattaactctaaaaattatgaaaccaaatgtgttagtgttagaaaacacatatcttcaccccagcaaacataaacttaataagaattaccttacaacagcatttcacaacagtaactaagtaaatcctacactataccgacgaaacttctaaaattcataactcccaaataaaatgagataaaatagaaattctttcacctaaattaattttagaccagtacctattcactgtgcacaaatcatccattttagagtattttggatttttcgcatatttcggtgtttaattgcataacgtgtactttgtatagatgattgcttaaacggtgaagaagtgatttaggtgctgacattttcctgattcaaggcaagtcccacctccatctctttgatcactttgaacctatgttttggaggttattgaaaatgtttgcaaatcttgcatgtcgattgtacactaataaattaaaattttgttaaacttgttagacaaactcctattgtttgcattcaccttgaccccacatatatccatatccctcattcctaaccttaggaacaatatgactataccactttatatatgaattttggagtcactaggttactataatgcttagccatgcttagaatggtcttccttgtcattatgggctcattacaaatatgaaaaattgattttgaaataatctggacagaactttaatacttgtgattttgataaataaaatgatggaaaacatggattttaggtttgagcctcaagtggtgcacatatggtgattagttgtgtaccgatagggggagagtgtgcccaaaccgacctaaggacttcactcaatgtcagttcatttcgtatacagtgcaaccacatgtgctagtatgggatagcccaagcttagtaaattatttatggtttagccttacattctggtaggccggtgtgtatgagttcgtataattcagaggagcttcctatttaccccgaagtggtagtttaggtgactaagcgtgtccaatacaacggtattgtgccacgtggtgggttcccgttgtgtccgccaccacggcgttaagtttaaggcgtgggcccgccacttaacggttctaggtcatataacatgtatggcttaggatggagtaacacgtatcgtgctggtgtagggctaaatcatgaattttggaaaagctttgttgcaggtaataaatcgggtacttatgtatcgcgtgacatgctcttgcatgattattatttcgtatcatgtgggtaaagtgtacaaactctgcagagttaaaactaatcgattagccgtgctcgcggtcatgagcggcgtgtggatatgtattgagtatagacttgtgtttattcttctaaatgctgaaatttaccttcaaattgtgatgagatttgagaatgatctccttgctgccatggaaggcaatgaggtgcatatttatacatgattaatgcctaccttgatgcccaatatgtcaaatactagcttgctgaaattttatttgaaagtaaacctgatttagaaatgttttatgcaaataaaacttgctttatgctaaaaagaaccatattatgccttccttgattatatgccttgcaagtagggtcttaggcttgtcttggtgcttgccagtacattatttctaataatgtactgactcttgctattgaattaaccttttgcttgcaggttttagatttagtctttgagtgatgcgggtaatcgactacttcttctaggacttgaacttaatggggtaaacccctagtcgatgtgcttgtggattgagtagacaagcttccgctgttctatatatttatttggtcagttggccaatgtaactaaagtagatgtagtttataatcgctttcatgttatttgtgtttgctatgtataatcatgcttgagatgaaagtgtgaatctagtgcacatcctgggaactagattcacatgagtatgagttaagaatatttgagatgttgtagatctttagccattgttgtcaagtctcctgaatgtgtaacacatctggtcaccgccttcgagtggtttgacgggcacatctcaggctgaagttgactggcaggctaaaggctcggcaatgtctccaatattcctctctcgaggcgtcggatatttcattatacttgtttgatgacttgaattatacatttcatctctcaattataatggaaggtccggagagcctacgacacgatgttccgttctccacttctgagggaggattcttcgacatggagccgtccagggttgtaaccacggtgttctcgcttccggtcattgatggaccagtcgagatcgacaccgtggtgtaaaccaggaagacgagtttgccgacctaagtccataccagcattgttgaagtagaaactccttggttgatgctggggttgacgctgttgtcgacgaagcttgatgacacttgagtaccaaagccccctacctggcgcgccactatcgacgggggatacccgtagaccggatatagagggtattggggtacattggtacgagaatctacgtaatacgacatcaagcaaataaaagacaaggattatactggttcgggccccttgataggtaatagccctaatccagttggtatgggattatatgatggaaaccacaaagacaaggattatattggttcaggccccttgataggtaatagccctaatccagttggtatgggattatatgatggaaaccacagattacaaagggaatagtagaactcaatgataccgacaagaccgtagtcgagttggttcgactagatcacccggcgacttagctcctgtaggctccgacttcgtaggctgtggtggttgtgttggcggtgagattcgatccctttggtcctcccggggggtcccttttataccgcgggtcagtcgatctccaactagaactcggagatatcggactccacacgatatagtaacgactcagttctatctgagtaggactccttccatccgtggactccgtttctgttacatgatggatttccttaacatgtacaggaaacatccgtatatgtgcaggtataccgtatcggtatacaacatacatccaagggtagagggtataccttatccgtaaccctaacactcgtcgctagtgattgtctgcacatcactgcttcctgagccctagtcttcacatgaccctgttggcatgtgccaccttagcattaattgacccctagccaccaacactccttgacaaccagcaccgatccctgagtcacccaacgatgccatcccccatggcataaggtctagccacagtttgccactatgttccatcttatgaaaatttgtcttgcctgtatttttcattttacatatttggatgtggatttgtttttgttgtgacacacgaagcctcgaaagatatatttagctctagtataggtcctatcaattaggttcatgttatgctagttagtttgattttgtaactaacaaaatgaaaataaatatattagaccataaggccgatcggccaatatataaagcattttcctaacactgtgttttattttttcaagcagacaaaatattttcacttttaccgtttgaaaataccaagaggcctcatatctttggctccacctatgaaaaattgacttttacaggcgaggtttgaagaggtttgcctatgaaaatacctcatattttcgcaggtggaaactctttagaccgtgcctataaaaattaatttttgctggcggggtctaaagtcgtctgtctagaaagtggggttatagtgtgggggcgttactaaaatcaggacccgatcgatccagcggagctcgcagcgactaagtcttggtagtctcctccttcaccatgcctccaccaccggttcccctccccttccctctcctccactactgcagcagggcagcatggtggtgatgggggctcctcccctccaaatctagctggaggtaggtctgcagcacctgacgatagagaggagaggcggtggcggatgctccactgccgtcccctcctgttctatcccctcccatccctccttttcctcgcaactggctggaggcgtggttggcagcgccccagattggtggtgtcttgcatcgttcaacggtagggagaaggaggggcgatagcagaggctccagtcccctcccatcggtctcctagatttggttagagtggaggagatcaacgtttgtggcgacaggcgtcgtaaaaggagggtggcggtggcagcggcacgtggtagaatgaggaggggatgacgtggcggctccactctcccctcttccctttctctcccctccctttc

SEQ ID NO: 8971 - DNA, 19584 bp, Oryza sativa
aaagattcttttttcttacaattttcgagattttatttgaacgagacgacataagacagcggccatgtcatacgcatgagggtgactattggaacgattttggaatatagtgcaaatttttaatgctaagatccacacaatcttgataagaatgtgagatttaggggctgtttggttgctaccctgagagaaattgcctgacctaaagccagcctgagactaacacaggtcttgtttggttggtgcccttagattccaaacccttcgcctgccctgacgcagcccttcccgtcattagcgtgagctaggcgaccgaaatcgatcgcctgagctccaggcagcaacagcgatacatacttaccatcctaatctttatccaaagcggccacgcgacgtagattccaggagcgaagctgcgctgcttccgcgaagccgccgccgaccgccatcttgccggatccttgcgaagccgccgccgcccgccgtcttttgtaatccctgcgaagctgtgctactctcgctggcgtgcgaagccaccgccgttttgccggatccctgcgaagctgtgttgctcccgccggcgggtgaagctgtcgccgtcttgccggatcccagcatagcagcaccgcccatgctagatgctgcccaggctgcctttcgtgcaaaatagtaagcagatcgatttgcaggttgccagatgcatttgcacatctgggcagaatcatctgaaggttgtgctcctgatgcacggatttgggatctatttgactcttcgattgcgttctcctctctctttttttccctgcttttttttctagatttttatcctcgttatgtatgcaagatttgtgcttgtacatgggaagttgggttcataaatggatcttggcaggaggtttagatgcaatttgtggcaagatttgtgacggccattaataattgatttagctgtataataattaaaggcgtaattgcatatttgtttctcaggcagcaacaaacaaccaaacaagcatatactcaggctacctgaccaggctagatgcattgtcttctcgcatgccactcaggcgcacagaaatttcaggcatgttgctcagggcagcaaccaaacaaccccttagagcactaacagggcaaactacactaagtttcctcataaaaagagaactacacgcaggagaaatcactaacaagacacaccttccatagtgtaggtaccccgccatctcctcccctcccaccgccgtcgtcaggtggtgcggtggagggagagggagcgagagagagagatagctgagagaaagagagagacggacaggggaagggagggcgccgccgccaccttaagccgtaggtccgccaccatcttatcccctcccaccgccgtcgccgggtggtgcggtggagggagagggagcgagagagagaacttagagatggggagagagagacagcagagagcaagtcgagagagagtgagcgagagagagacagagagagagaggcgagaaagagacgtgcggtggagggagagtaatccgtggtagataaggacaagaaggatgtaggagagtgatatttagccttggttggtatcaccaatcaggattaaagatatgatctttagtcctggttggtgataccaaccggaactaatgttcgttggggacctcacatggcctgacagctattgaaaagggactaaaactgattccaacccaaactaaagatcaaaaagtaccgctgggtatttgaactcggttcctattcgatctgggactgatgtaattttcgtcatccgtgtaaagattagttctccagtagtgacacctccaataccatctagaattggtccggatattgtccactagccaagcatggcatgggaagaagaaagtgagagatggagggttcaaatgatccaacgtgcaacaaaagatattatacctagcccaaactgaaaattttcttgtgatggtccaaggtgaaaccttcgtagcataggtagatcaatgtactatttactcttatatttatagtaggcactgaaatatgtctttgtaatccaggtatatcatttcctatgacaagcgtagctagccttaatgaatatatacatgactcatttttataagtttttaatagctatagctctcaaaatctttagcttccgtaaatagtctagatttttaactagattctaccggttagtagttagaaaatccatcaaataaaataaaagtcaaaagctagaaaacttagtactccctctagttttttttgtttgacgttgccgaccggttcgattaaattaaggaagctgtgaattgacttgtttgccttcacccttatccctttgcactgatacgtttcatccatgcaggggggaagaggggaaatttgcgtacgggaggagggcttctgaactgcgagcgtcaaacaaataaacccttttgagtatgaactggaacgtcaaacgaaaaaaatgggagggagtattttcatattcggaccagctaactactcgttagctatctctcaaaatatcaagctacctaaacagagctatagcatgctattcgcttataagattgattttgaaaaggcttatgacaaagttaaatggccttttgtacaacaaacattaagaatgaaaggcttctctcctaaatagtgtgagtagatagcgtcttttattcaaggtggccatgttggtataaaagttaatgatcaaattggtaataattttcaaacttacaaaggtcttaggcaggggatcctttatctcctattctttttattattgtagctgatatgcttgctttattaattaagatggctaaagaggcggaacttttgaatggggtaattcctcaccttgttgatgatgatttgtctatcttgcaatatgctgatgataccattatctttttggagcatgatttgcaacaggtaaagaatctgaaattgattctatctgtatttgaaaagttatctggcttaaaaataaattttcacaagagtgaattattttgttttggctaggcgaaggaatgttatgatcaatattctaatatctttggttgtaaattaggttcttttcctgtcaaatatctaggaattccaatgcattttaggaagctttctaataaagatcggaaaggtattgaagaaagaattgagaaaaagcttagtagttggaaaggcaagcatctgtctgttggtggtagattggttttgattaattctgtacttttgagtttacccatgttaatgatattttttttgagataccaaaagaggttcttcgaaaattgattattatagatcgaggttcttttggcaagaggatgatcacaagaaaaagtacaggctcacgagatgggatattgccaacccaaggaccaaggggttcttgggattcataatttggaaattcataataaatgtcttttaagtaaatggttttttaagctaattaatgaggaaggggtttggcaagacttattgaagagaaaatatctttataataagtctataactcaggttgaaaagaaacagggtgactcccatttttggtttggacttatgaatgttaaaagtactttcttaaatatgggttcctggattgtcaatgatgggaaacaaattaggttttgggaggataaatggttaggcaacttggccttcaaggataaatatccatctttatacgctattgtctgaaggaagtcgtcttctattgccaccatcatgggttctgtttcgcttaatgtttcttttagaagagctttagtttgccagaatcttgcttattggcatgagttttgtgcttcaattgtacatatccagttgaatttttcttcggatagctttagatggaattttcattagaatggtatgttctcggtaaggtcaatataccttgcttttaagtaataatggctatgttgaaaggaataagtgcatttggaagcttaagatgccacttaagattaagtttttcatgtggtacttgcttaaaggagttgtgttgactaaggataatttggcgaagcggaattggaatggtagcttgagatgttctttttgtatgaacaatgagtctattcaacatctttttatggattgccatttcgcgaagttcatatggagagcagttcagttctcttttggttttaaccttccttctagcatatctcatatttttgatgggtggcttttgggtgttgacaagaaaaagagtaaactgatacttgtggaagcttctgccatttgttgggcaatatgtctaagtaggaatgatatggtatttgataaatcaccgtcaatttcctatatgcaggtcattttcagggcacagttagaaagatgtgatgaagatggagagttactaaaagttacatgttgcaagttggagactacgattatgcaacttttttgccaactatggatggagattcacaaatagactacaataaatatgttctccttatgtcagttttggttttcctttatccttgtttggtgtgttctagttgtttagatctacactcttttctcgagcacttccttataataattgtctgtagctctctttgagcaaaggccgagataatatattccattatctaaaaaaaaattcatcctttcttcattccttctgtgcagccctttcctccagcgggggccaaccggcgagctcaagctcactcaagcatcggtggagtggcaacagaggtggcaggtggtggctggcctagggctcctccctcaaccaaatttagcacctaaagttagagcattgccaaaatttggaaagcgacagatttccttcatggggccggtctgatcaccgcctatgggacagtgtaactagcacatagggttggtctgactggtggcatgtgaccggtcggacttgcagagtctgagtccaagccgattgtcatcatgtctcgggtgtcacgccctgataaatccatcccatattaaaaatcacttcctaaaaggaataatagaaattattaaaagcttaaaagaaaactcaaacactaaaatacatccaagaaaaaaattaatttgagctttggattatttttattaaattctcaatgctctaagaaaaaatcacatgacagacatgtagctaaaacgaaatgagaaaactaaaaataatcctctccctctcttttgaccgaatccggcccaaagagctctcctcctctttcggcccgccgatggagtcctcttctattccctccctcttcctctacctctccctcccgggcctctctctccctcttgggctgcagccagtcagccacctcggcctaattccccttcctctcccacgtactgaagtgcgttttatgtcctcccgatggtcacctcacctccttcctcttgggacgtatctccccgtggcccatctcagcaccacgcggcccagccgcgggtcgtctccctcctccagccgagctgccgcccgttcttctcctggccgaaccctaccgccgccggcatgccgatctcactccccggttgatttcttttccatttgaatgcaaaaatcggttcctctcctcctcatcatcaattaccccatgtttccccttcttgattcggcctttaatcgtcgaatttaatctccggtcaaccgctgccattgatggccgggccggcaagctctccggctgttcccctcctctcctccagccgttccactcttccaggcctataaaatggcggcagcatctcctctccccttacctcttaccactgcccgtgctcccttggtctcccctcatctcctcacgtcttcctctctctccaccacaccggcgaactcagccgccccctccctatcgaccggagcagcggcaaaccacaccaccacctcccacggcaccgcagagacctcctttagtcctcttaggctgtgttcgataccagccatttccaactccctcttgttttacacatgaacgctttttaaactagtaaacggtgtttttttaaaaaaaaatataccaaagtggctaaaaaaatcatattgatctatattttaaaaaatagctaatactttattaatcacgcgctaatagactgcttcatttttcgtgtgtgggtgatgggtccaacacccaccaccgaactcagccaactcctcttcccaggtctcatctccgctttgccgaagggccgccggaaccagaagcacgtcctcgtattcataatcacaatcacagtttttcttatgtgaagaagagatgaggtgtggccgtagtcctgcatcagcatatatcatatccttatctttgtagaattaagggcttatttgtttctaaggaaaaccaaaggatttccaaaacagaggatttgaatcctgtatacagcattcggtttacaggattgagctataggaaatttgaagggaaatttccttttgtgccagctgtatcggtaaaacacaggaatttttgcatccagtacgacctcttggaaattttcctggcgcgaaaagagcgcgccacgagcgcactgcgcgcgtaatcttttcgctctcacgacaaaaaaggtaggtaccgctgaaaggaaaataaaaaaaaatcacaggaggcaaacagactcgcatagaagccatcgcctttgatcccatctcctctaccacttcctctcctgtctccacgattgggtactggacctcctctcccacatcgatcgccggcaccggatgcaccttcgccgcccaggtgacaggacgcaacggcaacaacgggaagagccacggcagagatcggcaaggacgctttgattgcaggtttggtgcctcctcttccgttgttatgcatagatctgatgccccctgctgcttccttgcatacaccttagcatttgggtcgctgcggatggggtcgtagctgtaacacacaagggttcatagtgtctgcccaatggcaatcttgtttggttcagagaagttgttgccggcgggcggcggcgatgagcagcaacaagtagtaggcgagctaaccctgtatttgtggtttgtgtttgatgaatcacctaacggtgacgattggatgatatggttctttcatccatattctgtatatgtttatgcatgtaaaattaaggtccttcttctagctacttagctagcatcttgatgagcagaatgagcacatcagttatcagttcataattttttaatagcatccaactttaatttttgttctgttttatcctccctgtactatttatgatttattacagatgtctaatcgtcggaactatgagcaacaaggccatcgttcacaatcacaaggagtcagtaatgttgaagctgatatttcaatcacatggagctagaaattgcggtgtatttgcataaccagcatctacgagataaaatttaccaccaggaacttgaaaaccatgattaagtgcatcatgtaaaactcttgcatctgaagctgatccctcccatccaggatgtatatgcacaaacttcaaatcaaaatcacaagcaaccatacaattttgagagattgattgcttcctatttctatatggctcttgctcatccaatggaagtttcatagggatatgagtaccatctatagcaccaatacaattctacacaagacatgtcaaagttatttttgtccagttcatgaaaaaataggatattcaaaatatgaaatcagaacaacttaacaagtggccatacctgaaaaaaggggtaaaattgtggtttcctcaagattggatgtgggtgtagggatggtgcacgaatgtagacagatgtgagatttgtgattgcttccagcactgctttgaaatatctatgtattgtatctggactatgctgaaaccaatcttgaagtgtttcattggttgcattttttgccactgtatataagaatatagcaatctgctcttctactgaaacatatattgtgtcagttatgtactctttctcacgtaacttattgactagtgcatgaaaaatgtcgacctccatacggaagtttcttttgcataatctttcatgtcctgttaaaatctcatgtacacggcaaccccctgtaagttttgacgtgtgcattggtctcctaatacaagatgattgtgatgaatctcctaaagtaggcagaacaaaatgaatgaactcatcatcactttctgatatacgtcggtagcttggattcatggtgtgcagatgctaccaaactgatgctgtaaactcaaatagaagagagctaaaaatcaagacttttgctgaggaaaaaacaattttggtgcaccagatgaacaagtagtaccttgttgttacacgagcaagtaacgtctagctatggtggctagacgatgagtaaagcttctggaaaaattatgcagatagtgaagagaagaacaaaggatcagcaagtttcttccacagttgatgagcaaatagaaagaacaggggagaatggtgcacaaggctaacgagggctatttatgcacttcaaagctaacggctagttgagggccgatgtcagttgatgcaaacttaaaaaaatatatttcaaatggcagatttcctacacttctcctgtggtgtatccgaatgcacgttttttttcaattcctgaggtttagcttcccataggattgaactccacaaccatctctattccttcatttttcctaatcctatgaatgaaaaaatcctttaaaacgaataagccctaacgttcttggtaatcaatcgaatgatctatagctgaaaattaataatactaatttcatgtagtctttgttgatgtactacttctccaaatactcctaacttaattacgagatggtgattgctaattggtggtactagctagtaataatcagaattaattgcttacaggccggctggtcaaagacgaacacgaccgatcatatatatatatcctctggcggtggtgggtcgagctagccagccagccaattttgacttgttctaatcaatcactcgttggtaattactacaagtcagatgatatgatgaacaataagcgaccatctaccttctactaggtggtaattgcatagccagaaatttatttattttaccacggctggacctgggcgcttccatcaactcgaccagttggatcgacatgtcgtcgtcgtcgtcagatgtcatatctggtggtaacatcgccgtagccatcggtacgcgccatggatcatttgatcgattccctagctctagctcctttttgatcgatctgatcgattcatatagctagctagctagatagtttgattattatttgcgttttgcagtgtccgtgatcacaggcggcatagtagtcatcgttgttgccattctcatctacaagtgctgcaagctgcgcatgtggcgcaagtacggcctctcgccgccggaattaccggcatcgcagccgcccaggcccaggagcgacgacgaccgtgctgtggccgcgctgaccacgacgacggttgacgtcatcaaggagcggcctgtgaggttcagctcgccgcagttgcgggaaatgactggcgactacgcggagaggcttggcgccgggggtttcggggtggtgtacaaagggcagatccccggcggtctggcagtggccgtgaaggtccttggtagcgacatggggaggcgcgcagaggagcagttcatggcggagatcggcaccatcggtaggacgtcgcatgtcaacctcgtcatgctctacggcttctgcttcgacgccgacctcaaggcgcttgtgtacgagtgcatgcccaagggctcgctggagcgctacctgttcttcctcgacgaacaggagcagggcctcggcttccacaagctgttccgcatcgccgttgggactgccaaggcgatccggtacctccacgacgagtgcgcgcggcggatcatccactacgacatcaagcccggcaatgtactcctggacgaggagttggagcccaaggtgggggacttcgggctggcgaggctgtgcgacagggagaagacgcacctgacgatgacgggcggcgggaggggcaccccgggctacgcggcgccggagctgtggaagccggtgccggtgacgcacaagtgcgacgtgtacagctacggcatgttgctgttcgagatcctgggctacatgcatggtatggagagccaggagcagtggtatccccggtgggtgtggcagcgcctggagcatggcgagacggaggcggtggtggcgcgggcgcgggcgcagggaggcgccgccgccgccgacaaggcggagcggatgtgcacggtggccctctggtgcgtgcagtacaggccggaggaccgaccgtccatggccagcgtggttcagatgctagaggcccatgaccacgtcgcagcgcccaccgtcagcccctttgctcatctcgacccccaagtcatcatcaccacttcctctttctcctcgctgttacacacggatgacaccactggaggcaccacctccactcacatctcacatcacatcacttaattacttcttccaaaaattctttgctaactactccctcaattccattttaagtgcaaatattagatttcatgcacaactttaattattcgtcttatttaaaaaaaatatgattagtatttttattattattagatgataaaacacgaataatactttatgcgtgagttatgtttttatttttccaaaaaaattaaataagatggacgattaaaattgggcacggaaaatcatggctgcacttaaaatggaactgagggagtaactgctgtatgcacaataaattttaattttagatcgtgccaaaatctcctgacctttctcatgcaagttgttcctcctacgttatgagcctcactacagtcctccttactggtagtagaaactaatctgaaccattgatcttatttaatcaaaggattcagatgtatttatactactacccagttaggtcttgttcggtttggaggggatcgaagaagactggagggccttgtttggttaatccccatgagggagggattgtagtggatttattccacacctattgtggtgtggaattattcccctatcaatcccctccaattctcttcaatccctttcaaattgaacaaggccttattagtagtagaaacctggagggacattgttctcaaggcgccctccttgccctctcggtgttgccatcgtgctagtcgtgccattgtcggccctggtctcttgcactgacgacaatagtcgttcatgcagtcttcgcgtgcacgtttggtggctatgttcgtgtgcccttgtggccgccacattgttccgcatgcgtgcattcgtgtggcattcgtgtgaggcccgcttgtctcccacttgttacggttgacgcgtagggtctcactcagttctctccgtggatcatctctgggaacctggtccatggtaatctagctatttgatccatgggtctctgctgcagacctgcagtcgttcgattctctctctccttgagcgataatgcattacacataatataacggtataataataataataataataataataataataataattaaacaacttggaaatatccgctttaactgaattgcacctaaaattcggatgttcgtttctcggccatacgagctcctaattgatcggtttagattgtttaatttttttttcataacttcaagaatccgtttctgttgttttattttgttgttttaatgtattgttatcgtttctttcttagagttgtatagctctgttttgttgctcgtgtagttgtcgtcatttctgaagttcccaaggtgcatatcaagttgtcagaagacctgctcccttacttggattcaacacataatagctgaacaaggtggcaagaaagcaaaaggaaccagtctatcaatgcgcgtggtccatcaatatgttgaatttataagcacataatgatttaatttatttcataaataatcatgatattgcatatgtaaactagaataatcatatcatacgatctataaatatagattagactgtaaagcatgaacagatcgaatatgcgaaacatgttaaatatgtaccgaggagggcacgcgagcgattgtggacgatcaggtatggcgcgcagcacgcgagcgattgtggacgaacagggaaaataggcaatgtgttactaaactccctctgcatattatcctatgagatgggctttttcgattttctgtaaaattaatttttaaatagaataaggtctatctattaattccaacccaatcggttttggggatcggttttttcaagcatggccacttaggagtatggtactgctgtaacctaatggtcctctttaaagaggaaaacgattcagtgattattgctgctgcattcgttttatcgcttgaataatttattcggcggcgacgttatctggtcatcattgaatctttttgcctgttatccaaattaagcaccgtgtgtatcgaagacggattgctttcgtaggttcgtttatgttacgaaactattatcttctgccagagataaatatagactcataccaaatatatgtaaacgtatactaataagactcttcctattatgggtatatatactgagagagagagagggcttgagaggttggttgatgtatctatatataagaaagcaataaagctgtgatgcctctctctatatctgtgttcattgtttatttactatatgattgtgtgcatgagatcgtcgttttctactccggatcagcgaatatgccactagttatttaacacgttatcagcacgagttcactcgttccgctgatccgataagcgtttttactagatcaatttgttttcgtaataattagattgatctattgtgtttatacatgtgtctgccgtcggccgagacgatggcctctgtacgtagccgcgcaccgaggcagcccggagcagcagccccgccggtcgtcggcactggagcccccaagccatctgacacatgcgcagatcgcagttgcagcagccatatgccaagcacaaaacatgcatgcccacgcatatggacctatccaaattcaattcactaatgcatatgcatatgtatcggtacaactatatgatctcgtatctaaccacagattgatctattgttttgcatgtccgccgtcggcttgctgatctaccgcctgcgccgccgcgcgaggcaccgcggtcaggcgcctgcacgtccggcactcgtgccggagattgctgtgtccacgcagtcacgcacggagatgtggcgcctgggccgctcgcgcgcaagcttcgcgtacaagccgccgacgcatgcacatgcactagtgcagattgcaaccagccgatgaaccaagaaagcacatgcgtatgggtgtgtgatccactctacgttcaatgcatgcacggatcagcatgcaagatgcacgtagtgacgtaccaatcgatcttcaccaatccatcgtattcttcaacaaccggacgtcatcacgccgatccgcggcgatacgctatgcattggcatccgcggatcggcgaactttacgtcggttaaacgagataagttatcgatttaatcaattctaaaaattagcagcagcgagattaatatgctagatcatgcctctagtcgttttattttctcgcatgaatagatgtatttgtccggcctttgcgccgactcttctcttgttatattgccgaccacgaagttcagcaccacgcgcccgaacgcgcttaccgtgtacacaagaaggtgcacatacataatccgtttaattgaacgacggagtgctatcccaaacgacgacacctcacactcggtaacacacgacaccacctagaagttgtcgtctatctggctaacatagtcgttgatctacgaatatattaatacacttgtcatcgccgatcttatggatcagcgcgcttgggacactgtgtcggttgtgacttgtatgttaataatccgtcatattgttatctgtatgaagtagatggtaacaaatccgagtcattggcacctgcatgcgccgccgccgccgcctgtacgtagcgacacccggacgccaccgcatgatgtcttcccctttgtcaatggttgccgaatcaatccagagacttttcctcgtcgatccgccatctgaaacgtcgactcgacggcctttcgaggccatccgcaatgcaattgacggtcgccgcccgtagcgacgccgaggagcttacgcccgcctcccctcgccaccggtacgcacggcatgcctcccgtgctaccacacgcggccgggacgagggtcgaagccgccgtgagcacccgccgtcgatagccgtccgccatgccggcctgtatgccgagccgagtttcatcgacacgtaacatggagctatgattgtcggacgccggtcacggcctgatgccaacgaatgccggtgtcggtgctactagatgttgcaccgccgctccgcctctgaccatggcaacttcccatagtcgtccatctctaccgagggctcactagcacgtttgccattggttccatccgttgtctccattgaagaatgacaattagatcatacctcacccacttcttgtgggggaaggtcgtaatagcccattaggcaacatctgagatgggctggccaggttttaaagctagccagtataaggaggtgggccaagtagaaattggcctattaaaaggagtcgggcacgaaccgtgatttttgtccgaaaacgatattttatttcaaaagtccttggtttccaaggcattatgcggaactcggaaattatgcggaaaagtcctatgggacattagaaattacggggaatatacattcgccatttatactctgaaccttcatgaattaggtttacgccaaatagagaagaattaaggatttataccttagtcccgtatttataagtatttgctttaactatttagttagtttcttgaataaccataatcaatcctagaaacattgtttttaggcaaaagagcttccatgaacttgtgaaacctttgttttagcaccccttttggaagcattatattttatggtttatttactagcaattgtttgtttggggtaattgattgttctgtgggttagtagttctgtaaattacacatacctttgaatagtagaaaatcatgttaattgctaggattgtaataaaaggtgtgtatagaaaaccattatttactattttatactcgttttgtgcactttatttactagaagtaaaccggtagaaagttgcatagaaggacatcatgtaagtagttgcatgtagcaaatacatttattgcgtaaatgagtaatagaattattcatatatcttctctttgtctaattgtcgccacatttgtagaaggcacaattatatattctccgtatagaataaatatatacacttttcatgaagagagtatacttagagatatttattagtgcataactatcatagaagataagctacaactaatttatattaattgtgtccaagtagatacaatgtcatcgaatttgcaaatatatagacgagaagtctatatgccaatatgccctgcaccaaaattatctatcaaaagactatgtacctatgcagtgtctatagttaatttgattgataatgttatgtgcatcttctacgtataaatgactttacaaatgaagtattgtttttatggatgtatgtacattattttgaataaattggtcatttgcatttgaagcaattttgacctagatgcaacatgtttagttgttagaattgatacacaagaagttgtattactgtcaacatatgcatttgcacgcacatatatgacttatactattaatatgttcatgaagaacatgcatactcaaaatttgtggaaggaaaggaatttggtatatttgaatttgatgttcaactcagggggagacgaatagtaatgacagtaatcttgcattcgttcttttgagatagtattttacaatacacgagttacattatagtttagattaagttcaatatgaagaacatggttaagctcatgtagagcatctttatcttttgctttagtcatagaagcttctgcattagattactgaatttttttttatataggtcatctcaccttacctatattgccttttttttacttgtagtaattctttaaccttttgtggaataaaattgtgaattgtatgtctaacattgaacgtaaatatttgtcttgcctattatttgaagtttttttggcgaatgtattcttattatccactaagcctcaatcaaccatgtaggttgatagttctaagtgcattgacgccatattggcatacatgtaaagtttacttatgcacatgaacaattagaatatttatgtttaagcattgaagcttaaatatatccacccgcaaccacattatttcttttagaaaagttgtaccatgaagttacaacaaatatgtgggtttcacgataactattttgtaaattttcttatgattggcgtgaaaagggggaggaatatgtgtattttgcaaattaatttcagaatatttgcaataaagaagcataagaaattgtggatatgtggcaggcaaattggtgtgttataggtcaaatgctagaagcaaaaatagcccaaactattagcgaatcttatttgggataattatgaattattgtcacacaacgaagtgtgttatttattggccattgaaaattgcatattcatcgaggaagtatgaaattgcatatagctatttgaaagctattggtttacttgtagtaaataatatcctaaataaataatgaccttttggattcgaatgattctgaatgatcaaatgacaccacatttacttaggcgtaatgaataaaagttagatatgtcacccaattaatttattggcatattcaagaagaataaatattctcgtagaataatgtttgggtgatttgaaaagttccatgatggttaaacttgttcatagattaatgttttagtgttatagttatgttcttgaagacatcgtgaagttatataatactaacgcatccatcttatgatcatatctatgttgcataaatataaacatgaagtttattgatccaacttaattcaagaattgagtatagtatgagtaattggatcaagtcttgggcaaataataaaaaagctagaaaatagagtaattttctcgactagtggatatttgtttgggcttcattgtcgcagaataataaccctctatgaattgggataacctacagtattagggatgcgcaatttttcatgccattgcattaattcttatgttagctcactgcatataatatctttaccccctttattttgtattagtgcatgttcaatgaatgaacatttccctcatatatgtaatggactcaaattttcagggaaaatttttttgcgaaatattttaattgcactcttctcgattcttctattgaagtgatcttaccttctgttaatttcttttaacttggatttaaaactttatttgcaaagttaatcgctctcttttaaattttacaaaacctctctatttattttctttaatctctaactttggctctagattatatttcctttgattccattcttgaacatctccaacaaataccctttcaattcccattcaaccatacctagagtacatgaaatgtcgatacctttcatttggatccccacctaaatattcccagagttcataaaatatccttttcaatccccctttgagtcaacatacccaacctttagaatttatcaatctaccaccaatcctgttcgtgtagaaattcccatctacatatacttccaagtccagatctatactcccacaaatatattcccttgaaatcccgttcctccaaattatccatttaagattccacagtctacttgggccaatattttcccgattgacccgactctttgttatatcccattaaccatttgtatccttggggttaaaccaatataactcccttcttgttgtaatttattttggatcagacctctatctaaacctatccccagaaacctttatttccttttaatcgatccaaaatatcctgtgatcaggttcctattttgatccatccaccaatttgattcctatgacttgatcacattcttggcacaagaataatattatcatgattgctcttgtgctaagaagaatatttttccctcttccaaattaatcccctattagccacaaatatttctccaaatcctccctaaaacctaggtatccaaatcttctttaaattcaaattctatccaaatctcctttaaatcctagccaaaccaaaccattcaaattccatccaaaaattagaaaaacatttatttcaatctgggccaaaatcccatcttttcttcccttcggcccattggcccagccgagccccgccccccgcccgaattttttttatttataattttttttattaaaagttttacaaaaataattttccattttgaaaattgacggaagtagtcgcctaccgccctctgggagggcgatttttaaaaatcgccctctcagagggcggcgaaaatgacgtggcagacggccgttcgctctcgggcgacggccgtcaacgaaatttgcaggcggcccccttgccgctctccgctagggcgattttgtactgtgcggggggccgcctgcaaatgggcggcggggggggcatggaattttgcaggcggcccccttgccgccctgggggagggcgatttttgcctctccctctataaagcccagtccctcctctgtgaaatttcattatattcactaaaaatccaaaaaaaacgaaagagagagaggggagggcagcagaaggggagcggcgaagccctgctggttcgctcaattcatcacaagtatgctcccatacatcttttgcatttgtactaatatgttatgtttgagtatatatgttgcgttttagttttagttccatatattttagcacatctgtagcacacagcacatatgtgtagatccagagcatagaatataatagtatgaattgagacatagacagtagtgttaattgtaagatgtagtttagtttgatctggagaatgtaacgtaattttagaaatttagagaacaatattgtagagaatgtaacttagggcgtagtacagaaatgcgaggttaacgcagttattgttttcatcaggcacaatgtcaagtaaggtcacatttcagatagttcacgatgaaggaaatattagatttggtccagatggtgttgatctgtcagattttgtaatgacatctaagggcatcgataggcctgcggagagaacatttcagtcaatttatagttggttgttgagaggatttagaatagaccaagaagtatacacaatgtcagtgtcagttgtagtgagtcgtgcaacagaaggttatttttgggaactaatgccgatggacagcactgatgcttggagacggtatgtggaaatggcttttgaacggtcatggcc

SEQ ID NO: 8972 - DNA, 18615 bp, Oryza sativa
ttcctgcagccccgcaagtgcgtcggaagtattcaagaagattaattgaaaaccgattattgcaaggcaagtcacacagatcccaaacacaattcctttgagcatgttgatcctatatttaaattctctatttatttcaactgtgcatttattttcgaatgtcaccgggtggtgtgaacctattcctttggtatggccactttgtattgattaccctattcttcgatacctttggttttaattggactagttgtacttatataatggttcaactagatgtattagacataattgcttagccacgcttagaaacattagcacgcaattaggataactaatgtttcactattacttaatgatgggtatttgatgatagctcacgatggttaatcgtgattggttaattaattaatttgccaactaaaacttgataatggtgggttgtgggcacatggttttgatggtcgtgctcatgacaattaaggaccagttcacgagtttcgattgtgaaacattaaacgtgccaaccacaagccagcatgggcaacggctttaccttctgtatagcatggttcattgcggagcaccagactgagaagtggtggagataagcccacgggggtcgctggggagtccatgccttgtttgtaagggggtgattatgatccaggaacggtgcgctgtggtggattgtgttgtgcgaggggtactgtcacagctcctttctgagatacccgtggtggtattgaggcacatggtgacatgatgtggggttgtgtcttgtgggtacagtggtacacctctgatcagagtaaaactattcgaatagccgtgcccgcggttatgggcgggtctaacaatgtctttcgtgattagtcccacacttctcaccatagtaaatgatgctataattggtaataatttgattagctcctggtttggaatggtacattcctggtttggagatagaactgtgcagccgggatggttgtccagaatggttgggcctatacaacagggtatgttgtatagcgttggattaatattgtttaatacttaactgttttattaaattctcaaatgtttgttaaatgctgcttttgcaaatgaaaccctactatgccatcctttgttatcctgtgcacttgcatatttgctgcgtggcttgctgagtatgtcatatactcaccttgcaatcattcatcagaggaagagttctacaatgaggctgatggtgtggaggattaggtgtagccttggtcaagctgcctgtggagtggagccgtctgcaccgtttatcttatttttccactgcttagatctttattgtttgagaggaactatctacctctgtaatgacattttattcgcttattaattagagtaataattgtactctattatcaatttgttattgtgtgcctcggctgattcctggacgagggtttacacacatgtaagcgtttggaattttggatagaaattccgggcgtgacagttcgtcgctaggatgggagagcgtggacaacctttcttcgctctgctgaagaaacaagataaatttgtatggacacaggaagccgaagaggcgttcatcgcactcaagcgctacctgtcaaatccccctatacttgttgctccccaacctaatgaagaattattcctctatatcgctgccacgccatattctgtgagtaccatcattgttgtcgagagagaaggtgcaaaggccagtttattaagtcagcgaagctctccacaatgcaaagacaagatacacacagatccaaaagctgctttacgcagtaatcatgacatcaagaaagctacgccactacttccaagcccacagggtcatagttgttttctccatccctcttagtgaagtcgtgagaaataaagacattgtcggccgcatcgcgaaatgggtagtcgagctaagctagtttgatgtccactttgtaccacgaacaaccatcaagtcccaggtcctcgccaatttcgtagctgactggactatgcctgaaaacaggctggacagtcaaaccgacagcgaaacatggacaatggcgttcgacggtgcactctacagccaaggagcaggggaagggttcatcttgacatcaccttcgggagaccagttcaagcatgcaattcacctcaacttgaaggcgaccaacaacacagccgagtacgaaggactactcgctgggataagagcagcagccgcactaggagtcaagcgactaatcgtgaaaggagattccgaactagtcgtaaaccaggtgcacaaagactacaagtgctctagccccgagttatccaagtaccttgcaggagaaaaggtttgacgggatcgaagttcgacacgtatatcgcaaggacaacatcgaactcgacgacctagcacggcgttgaagcatctaggcccccggtgttaattttggtaattaatgacaagcgctaattgtggactaaccgttgtctttgagctatacattttaagttaggtccacgtcatatgtgcgcatggatgattattgatggattaaaattgacggcgcaaagcaaagggaaagaagacggtaaaactagcacttttatttagaattgatcgaggtgtagggcgatcaaatttgctagtttatttttagtttcgccgtactattaagaggggtaatgacctagcaaagagatgatgttaattgccacattaggtcattatacatttagacttgtgctcacttttcacacacacacacacttcactgggtttggcctgaccaggggcggtcagagcagccacatagtggcggtctgaccggcgccacaatggcggtctgaccggcgcataaggccagtctgaccggcaggacatgcgcggtcagaccggccccctggtggccgggatggtgctgctcaggatggccgatacagagccgagggaaccgtattctgtcagaccgagctgatggcggtctgaccgagccgaggccggtctaacaggccaccccttgtcggtctgaccggccaggccgatggggccctctgacagcactacaacggctagttttctagccgttgctgagtagcacggtctgaccggtcacatacctccggtcagaccggcagagcacagagttgggggatttcgcccaacggctagttttggtgggtgggagtataaatactcccccaccagcagcaagggggctcttttggcacccaattcaattgcatacaccccttgcacctctctcacacaccattgagcttagtgttcatccattgtagtggttgaggttgatttagccaagagtcaagtgcatttgcttccattgtagagctagtgtggcacttgatcatctccacgccgggtcattgcttgttactcttggaggttgccgcctcctagacggcttgtggaggagttgcccggtgacctctccgagaagattgtggaggaggcacggcgccggtttgtgattggtttggagttcaccaccttcggagtgaaggaagaactaccctagtgatcgaggcttgggtagtcctctccgtgggccggctgccgccgtgcccaccccttgacgaagggggcgtgcggtggcttcgtggttgagcggtggagttgggctcacctcaacggggagtaggaaaccggcgagttttcgaacctcggtgaaaaatatcttgtctcatcgtctcatttgattgtcgcatttacatttgtgcaatttacatttctagagacattcttgagatcatatcaccctaggattgctaaacattgacataggagtgtgatttactttcctagagatataattgagccactatcaccctaggtttgcaaaatataacttagttgcttagttagagttgaccctcaccaagcctagcaacttaggttagttttgattaggtgtcatttaattttaaatcgcctattcaccccccactagtcgacatctcgatcctacaagtgttctcagagcttggtctctcttgattgggctttccgcctagagagaagatgtcgaacgaggtgaaccatgtagggaaggctcccatgtttaatggcacaaactactccacttggaaaattaaaatgtctactcacctcaaagctatgagcttccatatttggtaaatgacgaagatagcacagtcgtccccgacatcagctcgggggctacaaaagcagaacgcgccgttgccgacattgagaccacagacgattggcggaccctactcatcaagttcctgagtagtgacgagttgccggaggacgatgcagaagccgaaaaaataacccgtcaagccaaaaatctactgtatgattggcgacgatctatacaagaaggcgccaaacggggtatttctcaaatgcatttcatcccacgacggcaaacatcttctcctcgacatacacgaagggatctgtgggtcacacgccgccggtcgcacattggtcagaaaagcttttcaacaagggtttttttggccgaccgccgtcaaagatgcttgcgacatggttcagcggtgtgaagcctgccaattccacagtaaacacacaaggctaccagcacaggcgctccagactatccctcttacttggccgttctcgtgctgggggctcgacatactcggaccattcccacgaggacagggcggatataggttcctattctgcattaaagggatattctgcatcataacagacaacggctcccagttcatcagtgtcgacttccaggattactgcattggattaggcgtcaatatctgctttgcctcggtttctcaccctcagagcaacggacaggtcgagagggcaaacggcatagtactacaagggatcaagacccgtgtctacgacagactcatgtcacacgacaagaagtgggtcgaagaactcccctctgtcttatgggtcgtgcgtaccacaccgataacgtccaacaacgagacacccttcttcctcgtgtatggctcagaagccatgcttcccacggagctacgacatcagagcacacgagtacagaagtactccgacaaggatcaagaggggcagtgaagcgacgatgttaatctactcgaagagcatcgagaaagagttgccgtcagagcagccagctaccaacaggccctttgccgataccacgagaagcacatcagagcacgcacgctttcgatcggcgattacgtccactgacgggttcaaagccaagcagggcgtaacaagctctcacccaagtgggaaggaccatacacgatcacgcaagtcttgtggccaggtgcattcaagattgcagacggcgatggtcgcgagttagcaaattcatggaacattgatcaattacgtaaattttatgtgtaaatcaatagtatccatacttgtaagacatcttacgacttcaaaaaaagttgattttaggtaaagactacaatcaaagtgttccttcccgacgatcccttaccacgacgacacatagcgttgaaacctatcctcatgtccctttacgccgtcttgacaaggcctctgaggaacctaagtgaacttcggctggggacgcccaaagcgggtaaggccttgtcggatcatgtagggacaaacgactatgtaagatctgttcatgtaagagctcttgccgtgcgtattaaccaagccgtgtaatcggaaactgagttttccaacttcacggctaggggctagtgtcggtgacatgggaccgggggtatcgtgactagaggcttgggcagccgcggtcacccacgtggcctgaccccctcggggggcgtcgggcccgagggtgacgtggccacccctccctctgtctccccgaggggtcgggccgctcccgtttcggccccgagggctggggcgccccgaccccccgtggtattggcgccacgtgtgcgggttaggtgagcacagcggcgctcacctaaccgcatttatagcggattgaacgagcgcgtcacgccgcatttaatgcggcgcagcgcacgtttatccggtccgtgaccagtcgcggtgtgtgaccggtcacagaccggtcagatcgcgggttaggtggcaacaggcggcctgtcacacgcctcgccccgtcccgtcggaatgatgggagcttcctggctctcgtccctagccggagccggcgtgctaactcctggagttggtatgtcagtcccggtcagattcattccaggcttcagcgcaagtatggcaaagggggcctgcgcggtctcccggtgaggagccccaagctccgtcagctaggattagtgctttttttcaaccaaggcaagtcaagggtccaagagccttatcctccaagaacgcttctccaaagacaaggctgggggctagggagagtgtatgactcaaaaccctaaacctaaaccctagtcagatagattccttttctatttcacgagtacttcttacaatttataactactccaaaatatattacatgtctccttgaagataatttttacaggatacaaagactaccaggatggctaacgccaatccatggattgaaagactttctcggcaagcggcgccattgacttcgccagattgtctatctctgcgggagtcctccgagaacgtgaaaacccttcttggaggaactcgaggtgcagctgcgggcggtgatctcggacacaggccagcacgtgccctccggcatatcggctcaaccgacgacactcctgtttcagggcctcgtcgatatgcttgccgatgacttcaagctgagtgcaggccccatttaaccatgagatgtatccagccgccgactcctcgggattcccgcgaggtactcggagctccctacagactccagccatcgccatgcagcagctcctgaggtacgagttgaaccacacctcgcgacctcggagggcttccacggcctgctctttcttcacttccaccatagtcctctcgagttcggccaccttgaacttcatcctccaatattggattcgatgatctcggtcggccaacacactctcgaggtctgctcaaacacggaaatgactaagtcgagttgttctcctctttcgagaacacggcaaattaagtcgatccgaacaaaagagtaaaggagatgaagaccaaagtaccaacctaaggaagtcatcaccatgtccgcctccacggacaggctttgatcgacatcgtcccgcggcacgtacggcttaagcacaagtgccggaacgactaccggcaactcaagctgcccgcgttgctggacatcctcgatatcaacatctctacatttacaacaaagtactcggaatcaacatgctaaagaaaacgaaggaaacaactgcatacacaaaagcagtttgaacctacgaaagttttacaagcataatcgattaaggagtacaggggaaataaaatcctactcttcaaaaacggggagaacagactaccccaagtcaccgaattcgtccatcacgcccttgcgcgtgtcattggcggccccctgatccaagatcctctggaggtcgatattagggtgcgccaacctcatgcacgcgaggacgtggctcgccccggtgtagatcccgttaaacatctcctcgccgatcctggccgcatgcttgcaggggatctcctccatcgccgtggctagttccgtgagtgaggacgtcagcgagaactcgtcagggttcaccgtaatggtgctcgtgacgccgcactccccggcgagctggtgtaggccagtgtaagtcatccgcagcgagccgcggatctccgacaagttgttctcgagctccgacattcggtgctcgagtccttgtcgctgccttttgttgccggtcaccagctccctcatctttaggaggtcctctcgaacctccgccaggtcacgtgctagtttgttggcacgctcgttcgccgacgacgccgctaccctggcctcctcgatttcatgtcctacgccgcgagcacttgccgggagaatacgctccatctcggattggagctccccccaggtgaggacatcagcaggcgcgccccgagcgggtaaaaggccaccggcgaggccgcttggcgtcacctcccgctccctggccacgaccacgacatccgtcgaggccgctgcaggggatgcaatggaggctgcactggacccgtcttgcgcagcctttcgcccgcgccgccctgcgcaaaattcccacgatttcatgaagtcaggcaatcaagactttgcaaataggacgacttctaaagcatctacttacttttcgccgagcgtcaccagcctttgccttcgctggggtgggggagatgcatccatggcctaaacaagatagcacgatatgaggtcaaaatattctgactacatgaacgaaagacaagagaggcttaccgacggagtaggtgctttccgacggttcccgagtacggaggagaacatcctccccttcttcggaacattgctgccactcgtcgttgcagcagcagcaatgtcggacacctccttggcgacgccctccttcaacgacgccgccgcctggtgatccgcaagcggtccgatgacatccgttagagggagagcctgcgtacatgaagtcactatgcgctcccaataagacagaagtaaaggagtcaacgagtacactcacgttgatcccagcctcgtgttcgaccgtccccttctctcaaagggggacggggatgtcgctcgctgtcgtggggccgctgatcatcacttgaccgacgcggcgctccacggtttcgctattcaaacctgtaagatcgacaaacagaactcgataagtcaggaggaacatgcaaaggccgggtaggctcgggcctggagcggttggatccacctaccgatgaagtcggcagcaacttcataccccgacaaccctcgtactcggaggtcatcaataatgtcgattaaagactgaagggagggagttagggcgggtttggcggtccactctagaatcttgtctggttgctcctcaggaacaacagaggctggatccgagttctctatctgaagatagaaccaccttgcccgtcatttgctacgagaagaggggcactggaaggggatgtatcgcgacttcaggccatcccgaagtcggaaaccgagacatccagataccttttttggttccgtccagcgcaactcgtagtaaaagcgaaagagatcaagaaatgactctaccccaatgtaggcctcacaaaggtaggagaaaatgctaaggaatgcgatagaattggggttcagatgaagcaaggaaaggccgtagaaattcatgacaggaagaagaaactcggagggcggaggaagaaaaccacaaagaatgtaatcctcaaccgcaaccatgcggcccaggacaggttcgggttcagtacctcctagttcgctctccatgatcccgcgaccagggagggcaccgtcgtcctgcagcttcttcagggacgcgttggtggaggtggacttgtcgaaatccatcaccgccgaagatcgccggagaataagaccgagatgagcaaactagggttttttttgcgggagcggagaagacgaggggagcttgaaggctagaaagttttgcggcaaacggacttcaaaatggatccctaaaacccctttaaataagcgcactaccgacggtgcgaattccaaggaaaggagagagatggccgccgaaaatttctgggtccgttacgcgcagcagttttcggactacaatttaaatttactcatgaccgttgaacttcgtacaatgttatcgataactctatgtctctacggttctcataccgagatcgaccagttgagagcgataacgattccgacatccgaagtcgcgatcggtcacatgagttcatttaagcagaattcgggggttactgttagggttacggataaggtatacactctacccttggatgcatgttgtataccgatacggtatacctgcgcatatactgatgtttcctgtacatgttaaggaaatccatcacgtaaaagaaacggagtccacggatggaaggagtcctactcggacagaattgggtcgttactatattgtgtgggtccgatatctccgagttctacttggagatcgactgacccgtggtataaaagggaccccccgggaagaccaaagtgatcgaatctcaccgccaacacaaccgccacagcctatgaagtcggagcctacaggagccaagtcgccgggtgatctagtcgaaccaactcgactacggtcttgtcggtatcatcgagttctactattccctttgtaatctgtggtttccatcatataatcccgtaccaactgtattagggctattacctatcaaggggcctgaaccagtataatcgttgtcttttatttgcttgatgtcgtattacgtagatcctcgtaccagcgtaccccaataccctctatatccggtctacgggtatccccgtcgacaacaagaatagcaagagagagatgaggatacgtacgaggaggataaaaggtgggatgctgacctcgggcggttagtaggagccacaaattggatttgttccccagagaagcctagcctggctgtctagtgagctggaggacatgaacggctaagaccctgtttagatgggactaaaacttttaattccctatcacatcggatgtttggacattaattataaatattaaacatagactattaataaaacccatccataatcttggactaattagcgagacgaatctattgagcctaattaatccatgattagcctatgtgatgctacagtaaacattctctaattatagattaattaggcttaaaaaaattgtctcacaaattagttttcatttatgtagttagttttgtaagtagtgtatatttaatactctaaattagtgtctaaacatagagactaaagttaagttcctggatccaaacgccacctaagccattgttgtcactattgccgttgttaccgtcgtgttgtcctttaggatagctgcgcattgcagaacccaacgtgacttatgttatgaacatattcttcaagccaagcgttggagccgctgtaggttgtctctgtagagccacctgctgttttccatacctctacttaagtagggggagagtgagaggcaaagaaatagatcgagagagagagaaagaggagaaaagatgaagagatttagagagagaactttcatatatttttcccttgctaggttcggctaggctaggctttgtgtcggtgcatttgaaaaaatagggcgacatagtgttggtttttaacacggaccgtgacctatcacattagtaacagattttttttctataaactggcacttatataatcttattaatgtcatttttttttaccatccaatgcacgctcgtgtcctagggatggacacctcgtgacttttgtccagtcggcattgattattgttgttgcttcattattttccaacatttcgatccaagtggatacaataatcgtgcttgctatatccgaggaccgtacgtgaccaccaatcatccactggggcaaaacgtgcagatttatatagacgacaaatactacgcttcattgtgataagatattattgctcctgcaacaatctaacgtgatccaaagaatcaactaaatcatattatattatacatactaagtacgctacgttgtgataagatatttctctgcaacagaagccatcgaacgtgatccgaagaaacaactagataattaattgtatcaaggatgcactccatccgtagaaaaaatatatatttctcgagtatcgtcaatttatcctaaaatgtagtaactggttctccccctacctccaaatctcaatcagccataaacatctactatttaatttcttcacatagtttatcttctgaaccaatcacaaattttcacgattcaattaaaactgcttatttaattatcctaaaaacctatagaaattcttatattttagggagggcttggacttctgatctttgttctcctaacgttattggcaaggtctccagatttttgatttgcatgttgaagatctgagtagaaatttggtttgcatgttgaagatatgagtagaaaagttcttataattttgttgaaagtacttgattttgaaatcttaattgtaatgtttttacttaaatatttgatgttttgagtactagaaactatacaaaaatttgagttgataggttaaagttacatgtagaatgtattgaaattataagttataaaattttggaaattgaaaatgtcaatattttcaacatagtttttaaaaatttcatatgaaactcagatttttgaagataaatatgtattgttattcaagtaagagtttaaaagatgttgaattaaaagtgtgagtaagcaagctttgaaaatgaatttccttgggaattctaagcgcacagcgagcactcatgaaaaggggaaggcgatcaaatgaaaaaaaaaggatgaggtcattcgcaagcaactactactcatcctaatcatacgcatatcatttcttcatatataattggtgcgcaataaaggtcatttttgtgctataaagctcaaattctgtgaagccaagtcatccacgaaaaattaaccgtcggatcatttgaggaagttattctcaaccattcgattatctccaatatgcttctttttatggtccattcatttgattaggtccattggaaattcttattcttctcagcccatcaaagaccaggcaacgaggtatggagttgttcgatctccccatgtggggctacaagtggtcactagggacgtaccaatactctgttgcttcatctccatattagaggatcggtcgacatctactagggcaatcagcggtaataactatttgtaccctgagaaaaatccctcattcttttcactaagctctttatctgttacactaattctgctaaacaccacgatgctcataagtcataacgtctcgaagggaggtgaagcagcctgcggcggaggcgtacgtagataccgctggctatggcgaaatctcagccgacatgccttgccttcaggaattgacggagctgctgtaacagagagatcgatcaatcttgtttgtttctgacttttgcctaatagattgaaaaaatatggttatataacttacaagagtaaaaattccacaggtgcttttcctatctaatcagataaattgaggtgtacagatcagctaagttcctcctctctctcgctctctcttttccatttttactgattagtttatctttacagtgtcagaggagtaagattattaaggaatgtaagatcaggcaccattgtgcaatcatgcaaatacatgtgtattcggtaaaagaacaatgatcattggcatcattttccattacattacaagacattgtgcttaaggttcagcgctgtacatctaaccaacccctacatgagtctttttttcctttctatttaattagttattaaacttttttactaaattttacaactagagggctgctaccccatgagattccattcaaagtggtagtcacaggataattaaacaactgacagatttaatacacatctccttttccggtccgagccccacgcgattacacgacccccacctggctccgcgtccgcgtagatacatcacctgcggcaccacctggctcagcatcgcgccagcggcgcggagcaccactacaactagccgaagcagtagtgctctctccctccatgatcctcctaggtatcgcacttcctgcgtcttgaaccaatgcttgtggagacaatgacgttggttgcggcagtagtaagaaacaaggaccgatctgaggggaaggaagaagaggagaagagacgtgtggtgcttgatacttgatacctcacagccatcatgatacctgatacttcgcagccagccatgatacctcgcaggtaccgagtatcaggtttgatacctttagggtatcaaccatgataccataggtaccaagcatggtacctagtatcagccagccatgatacctcgcaggtaccaggtatcaggtttgatatatatgggtatcaaccatgataccacaggtactaagcatggtatctacaagtaccaggtatcaggtttgatatatatgggtaccaaccatgtgttgacagaaaacacgaggcctgggagatctgcttaactacagttcaggtccaaagctcgccttcggatgtatgagcgtgccagttgatttgatcctgcaatcaacaagaaacaaagacaaagaaaccgtagttaaatctataaatgatagcggatcggctgtttgccgatgacatatcatttatctctgagccgatatcgtatgtgaatcgatcggcgatcatcaataagtaacaaaacaccaaatctactagatcggctgtagatatcaacaatatataatctttatatcaatatacacttaaatcaagtgattggagtagatcggtcaccataccgagacagtataaatcacttaaatcgaaatatatattaataacgagattatatatatatgtttgtagcatagccgatcaaatagatctagcatgtatcggctaatactccgataccgctttatattaagatattgaagcagataaaatactcaagcagatgcttaatatacttagatgtgacaagatcttaatataaagggcagatttaacatgtcaatgaagcatataaagcaaatatggtcgaatcagattagatcggctaaaactccgagactaccctaatcggcaaccagaaggcaggctagagattgtaattctaagcacgacttaatagatcaaactcaactgatgcagcattaagtatgaaaagaaggacaatatctagacaatcaaaccgctggatgtttcatagggtggtagatatcttatataatctgaattaacatcgaaatctaacctaatcagctgccttccttgatagatgttagccgattgtaggttagatgacgatattgccagagatcacgtaagatatacgataactcgacgaatcacataaacaagattagagtatcgtaaagatggaagcactaatcccgagaacgcatgtcatcataacaagttttatctcttgttgaagatcgaaaccgatgcagctcaacccgaaagcaagaactcgtcgaaataaaattaaagcaaaaggtggcgatgtgccgaaattgtattgaacgtgtgtgttaaaaattacataggtctcggggtctatttatacccgagaattacaagatatgcccataccggacacgactgttatctctaacaaactctaagatatcataagtctttgcggaagacttttgcccacctttatctataaggaatttacataaaatatcctaattaatagatacaattgcctttccaggactctatccgtgcgtggcaatcatattgaagtacattaatttgaacccaatgtcgtatacaagtcgtattgtcggaatcggctgaatcacttaacccaatctgactcagacttagccgatcctaaccgtagccgatctagactccagccgatactcattctgtttccacgacaatcctcatcttcgattccgcttcgatcccatcttcctctccgatgctgacactaccaaatttggttgttaacacatgccccccaagtccgggatatttggtaatgttccgaatttgtcatgtaccgtctccgagtaagtttcgcactccgccattattgaccgttattccagcgctttaaatactaaccgttcccctcgagaaatctcacgccgtgacttccgttttcaccgctcaagcaaaacttcttcctctctcttctccggcgattcctccggcgcaaaggcgatttccaggcgacttcctccccgacgagatttccgcccgcagcgatgtcgtcttccgccggcccatctgatgcgccatcagccgagtacgctgaggtaagttctcatcggctaaatcccttttcccaagagtagattgattttctcttgtctcctattgttctcttcttctcggtcgctttggatttgtagcacctctccaacctagttgcgattcccagcttatcgcatgaaaaccactactttctcggcccaatcggcaatcctgatccaaccgagttcattatctgtgaaaccaataggattctgttaagattaaccaatccagatccaggtcactggaaaaacacctttaaatcttggccgtctctagaaaaaacttccctcgagaaaagttggactacatggttcatgcgtatgtcggctagcaaaagagttcactgggacgaaattggaatcggccaagcacttgacctaaccatagcaaactcagccaaggatgaacctctcatggcagctgcctcttatttctggtccaacactatcaatgccttcttattcaaccaagggccgatgaccccaactctcctagatatcatcatgatcacgggtctggatatcacctcatcggctaaccctatgagcttgaacataaagaaccaatatgacttcaagaccaagagcataggcggctggtcaggttatgtagcagtatatatgggccaaggttcggtcaccccccgagaaccttttcaactgttgatcctatttaaagctattgttttgggccgactttcggcccaaagccaaaaaggactttttaaaacctttttcaatttaaattatttcttaaatgcaattccatttattaaaaatacttccttagctcaaataaatcccagaaaaatctaggaattatagaattaagcaaagtatttaatgaaattttatctggccccattttatattggaatttattaattaaaattagatcttctcttcaagacttttaaaattatttctaaaaattccatttaaacaacaatttatatattttgaattttcagggtgtgacatagatgtacagtaccgataacactggaataaattttaaatgagaactattaaaagatattatgaagtgcatgtgccattagtttggtttaattaaaagagaaagggaggagaacagttctacttttccaatatttttagagggcttctatgagtaaccatttggcataacctagggtcaaggaggctctgataccaacttgtcacgcccataaccacgggcacggctattcgaatagttttactctgatcagaggtgtaccactgtacccacaagacacaaccccacatcatgtcaccatgtgcctcaataccaccacggtacctcggaaaggagttgtgacaataccccttgcataacacaatccaccgcagcgcaccttcctggatcataatcacccccttataaacaaggcatggactccccagcgacccccgtgggcttatctccgccacttctcagtctggtgccccgcaatgaaccatgctatacaaaagataaagccgttgcccacgctggcttgtggttggcacggttaatgtttcacaaccgaaactcgtgaaccggtccttaattgtcatgagcacgaccatcaaaaccatgtgctcacaacccaccattacagggttttagttggcacattaattaattaaccaatcacgattgaccatcgtgaactatcattaagctatcattaaataatagtgagtcataagttatcccaatagtgtgctaatgtttctaagcagggctaagcaattatatctaatatctagttgaaccaatatacatagcccaactagtcaagttataataacccaaggtatcaaggaataaagtaatcaagaacaaatgggctataacaatgaataggttaattccacccaatgacattcgaaaataaatgcaatagttgaaaagaaacaatagctttaaacgggatcaacatgctcaaagggttgtttgggatctgtgtgacttgccttgctggccttggaactcttcaaactcttctcctgcggaaacggactctccggaaacgacggaatctaagcagaaaagagcaaaatcaccaaaacagcacataaacaagcatgaacagtacatgtggatatttttaatatgtagatctcaattttagaaaaatttagagacttgaaccaactaaatcggagctaagatgaattagttatgaatttttgaagattaaatcggattaaaacacttaaattgattttaattgacttatgacgcaataatgaattatttttgaaaaggaaaagaggatttattgcgtcagcggctagggtttcggtggaccgggcgcacggcggcggttcacgcgaacggacggccgagatcgacttgatccaaaacggacggctgagatcgatcggtccacgaccggctcacggcgaacggccccgatgacgtcagcgatgacgtcaccaccggcggcggcggctcggcggctcgggcttgcatgctcgctggcgaacgacggcacggcggcgcaaacggaaggcaccaacgggtagagcgcgacgcgacgaactcaccggtgaccaaaagagcggcggaagatcaacggacggcgacggcgacgacgaagaaacggtggcggtct

SEQ ID NO: 8973 - DNA, 14038 bp, Oryza sativa
ggtaccagttcctagtaccgttagctttgccacctatttgtatcatcaccaacctcttcgaaactcgtacctacctgctttttctcccttcatacacaactactaggcagctagctagcaatggtgtggagcagcacaactttctacatggcagagtagagaaaggaatccgatgggttcacatggcagagcaagagggatgaattggatggtgttgtgctacgtgggcatcagcaccaaggtgcacgtagccccgcgtgggtggatgagtggcagccgtgtgccccacgatttatcccgtacatgatcgatgcaacgggataccgtggactagcagtcctcttatatatataatgggttccttaactaatcaaaaccagtcacgcgaggtcctttgacggttttcaacccggttttgtccaacgtggctgctgagttagcgtgagacccacgtggaccccacatatcagctgaccacgtcatcaccctctcgcctcctctccggctctccctttctcctctctctctctccctctcactcttctcgtttgggtaggcagctgggtgcctgggaggtagtgctgcggtttgccgtcgatggaggtagtgctgcggcttgccggcgatggtggtggcgccgtcgccggcgggctcggcatccatgatggtctcgaaggcgccgaggagcgccttcaccctgctgcactgccgcttctccagcagcttgctccgcgcctcctcgatcacgtcgttgctccaccacgccatctcccaccggcgaggctgctcctcctccaacctcttctccatcgccgtcttcaccctgctccccttgaccttctccgggatgacctccagcagatcttgccttgcaccgccgctgccgccatggacgtcgtcgtcggtggtagtgatcccatccaaggaacgcatgctcaccgactcggagaccttgccgttaaccgaggccgactggccgagttgtcgccgccgacgtcgtccttgctattcctccggcgagatgacttgctgctgccgctgcggcggaacgcgcgctgcatgagcttcctcggcgacagcatcgacgagtagtacgacagcgagggcgacggctgcatggctgcttggctgccgccttgtccttgtgggtggtggccggcggcggcgactcgtcgtcagtcctgaccgtcatgcagctgatgcctcaaaccggcatgaaccaatacagagaatatatacggctggttaaggatgttgagctaatttcctaatacaaagggatactgacgctaacatgtggggcccgcatgagtcccatactgattcagccgacacataaactaaaaccggcgtcaaaaccaccaaaagacgttgggtgatctgttttgtatagttaagggaccctgtatatctggttttacggttcgaggatgttttttatgccgataacaaactgagggaccttcggtgtacttttcccaagaatatatggtcttttggtaccgatggatttcatcataggctatcattaactgatctaatacaacctggcccaatgggccacatgagatcggggcctgacccgatgaacccgctgggcagaatttgttgaatctgcatacaaacatccatccatccaggcacgcattaggcattaaaatagatgaaatgattaatgtctacaagtatatcattttatggacgtaactacacagctagtagctgatttgtctaaatcagctaccactttatctataagagacaccatctacctatacttcaaatacaattttctcttaaattactcatccgatctacgatccgattacaccgttgtgttcgtaagaattaaatctttacaacaagatctcacatcattatattttgataaaaaatcacaaattacttttatgatatgtctaaattacttttagatttcactaagttacttcttagatataaaagtaaattcagtaaagcctaaaagtaatttacatatattataaaagtaacttagaacaaaacgaaggtaactttagtttagagccgtcagagccgctggttctgttcaccggttttggttgatcatttaggcgatcccgtgtcatgtagaattgactcgttgagtcggtatctcgtgaggctcgcttgccagatcaattcaagccatcaaatcttagtcaactctcggtcgagattaatctcagccgctcaaaatcgatataaatcccctccttttcaatggcatattattcctttttaatatatatcatctaccaaatatgatctaatcttttccggaggttgctttaatcttttatctccgttataaatcatttgtaaatgatttaattaatttggaatagtcttttctttaataggtttaattggaattaaatcttgtaaaatttgtaattaattcataagaaatcggaatgaggtcgttcaagtctctaaattcatctaaatgtactgtttatttagtttttattagtctttttcctcgttttgcatgttagctcgtcgtttccgtcgtttcgaaggttcgcaagtgcgtcggaagtattcaagaagattaattgaaaaccgattattgcaaggcaagtcacacagatcccaaacacaattcctttgagcatgttgatcctatatttaaattctctatttatttcaactgtgcatttattttcgaatgtcaccgggtggtgtgaacctattcctttggtatggccactttgtattgattaccctattcttcgatacctttggttttaattggactagttgtacttatataatggttcaactagatgtattagacataattgcttagccacgcttagaaacattagcacgcaattaggataactaatgtttcactattacttaatgatgggtatttgatgatagctcacgatggttaatcgtgattggttaattaattaatttgccaactaaaacttgataatggtgggttgtgggcacatggttttgatggtcgtgctcatgacaattaaggaccagttcacgagtttcgattgtgaaacattaaacgtgccaaccacaagccagcatgggcaacggctttaccttctgtatagcatggttcattgcggagcaccagactgagaagtggtggagataagcccacgggggtcgctggggagtccatgccttgtttgtaagggggtgattatgatccaggaacggtgcgctgtggtggattgtgttgtgcgaggggtactgtcacagctcctttctgagatacccgtggtggtatcgaggcgcatggtgacatgttgtggagctgtgtcttgtgggtacagtggtacacctctggccagagtaaaactattcgaatagccgtgcccgcggttatgggcgggtctaacaatgtctttcgtgattagtctcacacttcttaccataataaatgatgctataattggtaatactttgattagctcctggtttggaatggtacattcctggtttggagatagatccgtacagccgggtatgattgttcaggatggttggacctgtgcagcatgggtgtgttgttcagtgttgattaatattgatgattaattattctactgttttacaattctcaaatgtttgttaaatgccgttttcgcaaatgaaccctatattatgccattctttggtatccttgtgcacttgtatatttgttgtgtggcttgctgagtatgtcatatgctcaccttgcaataatcaatcaaacctcagtggaagaaaaaggatccagaataagaagacgtttggcttatacctcatttgagctgcctgtgggagtggagccggagcttcgctagaccgtaattctgctgctgtttttcttttcttttgtaagtatgtaacgttattattatgatgaatctgtatattatattgtcagtttgtgtacctcggctgattcctagacgaggatgtaatgcacaaataagttcggaaattactagtgaatttttgggcgtgacaaatatttcccctacttacttaattaatggattagtactacagtaaagtaagattcttcaagctaacacatatctagattctggataggcgtcgcttgttatgactaaatcaagagtggtctcgaattagattttgcgcatttttatctattcacatcatccaacctctccttcagaaaatgtgagagcttcacacacaaatgggagatcaaccgtatgagggtaattcactactctattttataatttccctcacaaaccgactggttcttgcatgcgtggatctacctgaactcttttttttttttttgagaaactacctgaactcttttattgcacctagtctaataatggactttgtattatatcgtgatgggctatcattagcggatcttatactatttggccccatgggtcacggagtttggccccggataccccaaattagtcccataaaataaaataggttataataatctcaaactaacaagtggatgaaataatcaaaattcctttgttaatgaaagaaaaaaagagaactgtttcattcctattaacatacccggatggaacatatatactgaattgctatatggaattcgatagaaatttctggatgaaatcttacagattttatatcgttggatccatgccaagattcgtacatcgcttcttctcctccaactctggcgagctccccttcttctccggcgctggcgacacccccaacaccagcagggagcatacaggtatgggtttggggttgggattagggtaggaggggttaggggaggaggaagtgggggggttggccgtgggcggtggaggactgacagtgggtggtggacccgggcaggtggcgaggcgttggcagcggtgtcgaagacatgaggttggcagcaggtcgagggccagccttggcggcaggggaaaatacccagactggttaggagacggaggctgggtggtggcaaatctggtggctgggagccataggagatagggaggacggcggggcgggggcactcaccttagggaagagaagggcggaggtggagaaagccggtgccgttgacaccttccgaccagccggcgaggctgggcagcggcgcggcgaggcgacagggtggcggcccggcaactgcgtgcaggatgcagaggcggaggagagctcgcacacgctcgtgcaaaatggtggtggcgacggcgggcaaactgagaagagtcggattggaaaaatggttatggctattgacaatcgatcgagacgatcgatggatggtgtagcgggaggactcatcatatccttgcctccacggaaggggtgccatggatgtcctgccgcctgatggcgtttccatgggatcctttgacgacggcatggtacaagacgatgccacacgcctgatggattgcatcgtcgcctccaactcgccttagagccaaatcagctttgttccctccggataaaccgtagatagcgcaggcttatcgatctgggctagcgagaagtatttagaattaaatttaaaaatatattgttcttttaattttttctcatgaatattcgggatgtaaaattttttgtgtaaatataccttcgatctcgcacaaccgttgcgcgaaaccgagattggtgtgacgtcatgggcggtaccgcgcgttgaaagtgcgagaacgcgcggtctagcgcgacgaaggcacgagagcgcgcggtttcgcgcaatgaaagagcgagaccgttcggtctcgcggaatcaaattgcgtaaatgtccacaggctccatttaattagtgcttaattacttaattagcaattaactaataataattagcaactaattatcctaattagcgattaattaataattaattaattgtaattaattaatcgctaatcaagataattagtcgctaattgaatcagcatggcaccggtctcgctcagtgcttgcgcgagaccgttctgtctcgctgcgccattccgcgagacccgttgttccgcgagaccgcgcggtctcgcgccttcgccgtgcgataccgtccacgacgtcattcccacgtcattctcgcgcaacggttgtgcgagattgacggtatatttacgcaaaaaattttacatcccgaatatttataagaaaaaattaaataaacagtatatttttaaatttaattcgaagtatttatacgcgagatcattagtattcctgttttcccattacaatgcgaaactttttctcgttcaaagcggatccgcctagtggatccggtaacaagcttcatcgaggcttgcagcgatggacggtagatggaaccgggagtacgtactcttgagggtacagaatcattttcatatcttaatcttaactaattaaaagattcatatttttccgttcgtcactttcccgtttcatccgtttttcgttcgtcacttcagccgcgatcacccgtcgctcctcctaaactctttttcatcctcagaatcggattaagaaaaccaagtcataacaacagaatcctcgtatgaatccaatcttagacaggcacttttcaaaatcagtgtttcacagcttccatacaaccaaatcagatgcataacgaaaagcaagatcagaagataaacagcaaaatccaaaaatttgttctacctccagccaccgcttgagagacaccatcgtcattgcgtcatcatctacaaaccgctaaagcctggctcccttcctccgttgccattgccactacctctatgtggagatagcgacaagaagcaggttaggggttgccatggatacatcaagaggagggggaggcaacgccaatggtgatctccgaccaccgcacattcacgacctgcccctaccaccgcatggccgcgccagtgtcccggcctccacatcgcaccgagccaccaccgccgcacggcctcatcctcgtcgtctccctgccgtgcctccacctagccgcgcagccgttgcccgttgcctgaccgactgacacaaaaggaggaaaagagaaaaaatagcatcagatttgtacgaacaaacaaacaaacatcatatggactaaggggtacggggagcgacggagaggaagccacgctgccgtggggggagccggggagggggagggggaggggcggagatggagggcgtggccggctgagagaaggagaaaaggagggaaaggaaagagggaaacgaaggagagaagggcgagcaagaaagaggcggaggcgaggcggaggaaagagatcgggaaaacaaatgaagagataaggacgggcgaaagaatcgaggtgcgtgggcagttgggcacgccgctctctctccgctcttagagcaagtacaatagtaggctataagctagctataaacatattttaaagagataaaggaagagagagcaagtacaatagtaggctataagctagctataaacatattttaaagagataaaggaagagagagaaaagcagcagactacagatatgtagccagctgcatcacggactccaagacgtaatgtgtgtatgacaggtgggacaggtattaatagtatagtaagcaactattgtatgaattggctattacattggctatagataatttggagctagtagtgggctatactattaaacttgctcttatgggccgttaaaaaaaactattataaattatttttttaagaaaacggtgcatatatgtcagtttttatttgaaattaggtgggaaaaggattaggaaggactagagaatctatttttgcaattaattagagaagaaaatgtatatgtagacattttattttgtatagattttggagcggatgttcttttttttacagactttgagtcggacgtttttttattttttgtttacggacgagaagtcctgttttccagggagtcagacgtttctttcctttttttttacgacagaatttttttctttccttttttgttacgatagaattttattctcgccatttttttagttttatactgacaacggaaacatctattattttattttttttatttattatttattttagataatcttttttaattattttaattttaattttatttttttattaggtttatctactttaaaatattgattttctgttcatcacacaaatttctatctttatctcctgcacaaaggcaatcacactgttcgcccattcgttcctcccatatgctacatccatcacgcgtcgtgtcacgagcatcatccacatcccgtaaaatataaagtagattaattgtccaagaacaaacatgactttttgtcattatacacatcgtcaatgccgatgatcatgctcgggtgcttcgataaataattgagatcaaacttcagccacatctggtgcaacgcacgagcattttgctagtatatgtatatatatgtatatctatatgggtaaattaactggtgctacatggagtatgggctccaagattcaaattgagtatatatccaatttgaatgagtatgaatttttttaaaatgtttaggtatgaacattaacttcttgactaccaagttcaaacaaatttgaactgagtttgaactttttttttgttagattttggttctaggtatataacatccaaacatataattcgctaggtatgtaataatgaattgtgaaataaagttgagtctaatttattttgttgttaggtattggtatgaatcaaattcatatacctgggtttatactcacaatttaaatttttaaaaaaaatttgagagattttgtgtgttttatactttggagcccgggcaccatggagtcccatatgggtatcccatatgtatgtatgtatgtatgtatatgaaggttaaaatataatttatttgaatatcctgatcgaacagagttgtatacgagggtaagtgctaaaaggtcaaatttcagggaaatataactatttgatgtgaaatgtttctagatgaggttccaaatccttgggctgagcttaatacaagtggtgtgtaagacattttcatgtgccaattaccaaatgcgataaattcataagaataattgtcgcagaaaaatgttcactaaaattttaatgctagaaataatttctaggacgacttgataaagtcaaccaagtcctgtagggctaaatcagaagaaccacctttcgtagtgcattttgacacgacatcacccatctctctcatcctatctctaactactccaccctctatcccatccatcaacctctcaatcgctgcctgtattccccctctggtcagcttatcctcgacctcaaccctaacacccaccttccacatgtcacatacatacctcgccgtccctaactggtcaccgccacatggcttgcatatcatcggcacggtcctggatatgctctccagcgtcgagttccacccacagtgtgtcaaaaacgcgcctatagcggggtggctcaggacctcctcttgtggtgcccacctgatgatcctccctctgccacgtgtctcctcgagcagctcgctggggagctcgacggagtcgcgcccacggaccagccttggccggaccacccacaggaacggccggttgctggcagcgaggccccaagccacctccaagagctcgtcggcgtcaatggagacgagggtgccgaagctgacgaacagcacggagcctgggagctgcgtgttcagccattccaggcagctgcggtcctcgaggagcaggctgcttttctgcgtcgccaccgtcgctggtggcgagagcatgtggagggggccaacggggaacactgggatggcggtgtcgcgccggatctgctcgacgtcggtgcgctcgatggcgttgaaggtgttgaggattagaccagaggattggcggacaccggcgacgatgtgggcgagcaggctggcgtaggcgacgtgccgagacgtgtccatcatgatgtggaggtctcgcaccaacaacggcggatgcttgtccactggcatgtccagatttgactctgaacaacatatacgattgcattatgtagtcagtattgaatgaaaagtggtttcattcatcaagaggatatcctctcatttcttgtacctcacttagataattataaaaaataaaaaaaattgacaaaataaaataatatcagatagatcactatgtaaacatgcaggtacacaaataacaaatataaatataaatatatgataactagctatagtttaatttgttcttttacatagtgaaatttctatggaaatgtgtgaaatttctatagaatgcctcacttcatgcaagttttaaaagaaactaggaagaaagcctgcgcatgtgcacgggcaatttatttactgtttataaaaataatattaaaagaagccctatctcaccatattcactacaacaccaacttttgggtttgaatgtgggaacccacttgtgggtttgaatatggaagaagtgagttttttcgaatggagagagtagacaatagatgctaacagttgatacactaaacgatattgtcagaaaatttggatgtctttttaatagatattattacatctgtacctataaaaaaccaaatgcgtcattaataccaaaaaacttcagctctacttcatacccatgtctcatagatatccaaatctatatataaatatttaaaaattctgcttctaccaattaataggataaaatcgtatatgaatgcccctctaatagctgggtgaagccaattgtagccactaaggctttttccttggatgccttgacttatgggtcccgtattgatatagtcgtgctcatcacgaaaagtgtgaagtataattttataaaggattgtatttgtatgtaggtcaattgagctctattgtcaacaattataaccttttactcggaccacctcaacttaacaatgcatactcctgtcattgttatttcaacgtggccaattaagattcatgcttgttgccctttaggatatgagtgaataaagatggaggtgatgaaaatagtttttcttatatcttgggttgacttgttgtatagagtagatataatttgtttcaagtgttaatcgatagtacagaaataattttctcttttaaaagttttcatggttgatcattccactctacttaaaaaaaactaatagcttcaatggtgacgaccacgtaaaatttttttttctcaaattgtgatcctttgctaacatacgagttaatataggttttgatttttttttcttgtttacacatttaattcacgtatgctttgttcacggtgattaatattcgatggaatttgtcaaaactatttgtgctaattgttaacacaatttgaataacaatgacgtttaaaacggggatataatgtagttaagtgtatgtttttttccgaatagtattctctcgtatgtttgttttttcattttcttttaatgaattttatctatcatagagacagggtgtacgtatgtgtattcatagtgtgcgtacgcatgcatttataagagctcatgtgagccttttacatcattggtacaaaagaatacttcaaaaaaattgatggcaagagggtgagcaacgggtggcgtgaggcggcgccatggcgtggcttcttttaccacctcgcttggagtggtcgctacgcgtatgctcaatttgggaaaaaccttatagctggtaagaaaaagaaaactaccaaatgggacatatcatatccacactccttttttttctttttatatacgttgcatacgcatgtacataggagttgtgtatgtatgtaagggaagattagacagcctttaggatagaggaactactgtcatagatctaatttatttgttgaaaataatggatcaccgattttgagtgtaaatcgatggatagatgttttgccttttattattttatttcttatattctctcttattagagggtcatgtgacatcttataagcgtttatatgagtgtaggaacactattactcatagccgcaatctatttatagtcaactattatttgcggtggattggttgcgtcctctatttaactactccctctatcccataatataaggtgtggtcaaagttggcacagtctccaaaactaatttttaacttataatttctcatatactataagatttgtagcaacaaaattataaccatatgaatgtaaatttaaatctcaatctaatgatataatttttaactaataaaatttattttatattatactaagtgttggtcaaatgttttaaagtttgaatcttgaaatgcgtccatgtcttatattatgggatggagggagtatcatttgttgaccgttatgcacttagtattgccctttatatttgtgcttgataacacacgtgcttattagatagatacctcataagtaatatgaaatatgacttggcgattagtggatagtggcttatatataaaacttacaaacatagggatcagtcaggacatacaattgatattttaggctaggattgaccaagtatattctaaactacataatatgtgttttattatcgaagtaataaatttaagagcgcgttctaacgtgtatataggattagatactcccttatttgtagcgagcacatttctcgagcggctaaatgctgcattacaaggtgcatgttattcaaatcctttatatatataaaagttgttttttaaaaaataaattcatttttagttttgtaatatttaatactcaattaatcgtatggtaataatctgtatcacttcgtgtgcctggataagctcacttaatgacgaagcctaagtaggacatagaagacatggacacgatatcaaaagaacatacttgaccgttaatttctaataatatatataaaaaaattataatacatgaaaatacattcatgacaaatttagtaatattattttgatataacagtttttttcatagtaaggagtgagtatttttttgaatattactcacaactggagttgttttgtttttgaaaatacaaatcgaattcaacaaaacatgttattaagtgatatacaattatataattatataatgtatattattcattttatttagattatggatatttcgatgacgtgagtttagtacaatacaactgaaaaaaacttatatttgtgcaactatgagctggaactattaatgtggtttttatctcatgtgagtaaaaaaaggaaaaacgaaagactattaatatggtttttatctcgtgtgagtgaaaaaaggaaaaataaaacaaaaggatggacgtggggcactgcgtgagaagtacatactcctatgtactcctaagaactatatgggctggaaattatgaattttgtttttttatgttagtgaaaacgaaaaaaaagaggggcatggggcccacgtacaaaatatgtacgtatatgcacgtacatgtatcgatgtacgggagctgtggttttttaaatataaatattgttggttttttaagctatatctaacggttgaaaataatggatccatcagattaaatcaaaaccaatggttaaatattttacttttttttataatatctctaatttaatagagtgccacgtggcggcgtattagcgttgtacagtgccacgtggtggtttgggagtatttttaggaagtttatttaacttttagtatataatagatagatagatagatagatagatagatagatagatagatagatagatagatagaagatttaacatgggctagaaccttatggaaatttttctttgagtatttatctttacttaaattcttgtatttttttctgcggttcaattaaacgatattttgtatttttcctatattttgcaatcatttattttatatttatattcatatcagaatcttatgttttgcttattcgtctattttttttatttctacgattcaataggccctgattattctaattagtctgctgaaactagttctctgacgaacacattttcgccgggccatttcaaaataatggaaaaataa
